United States Patent Application Publication US 2018/0126003 A1 - sequence listing, part 125

SEQ ID NO: 218789 - RNA, 2676 nt, Artificial Sequence
  derived and/or modified sequence
augcucccaacagaaguuccccagucucaucccggcccaagcgcgcugcugcuccugcaacuucuucugccacccacaucggcuuucuuccccaauaucugguccuuguuggcagccccaggaucuauuacacaucaagaccuuacggaagaggcagcacugaauguuacacugcaacuguuccuugagcaacccccuccuggccggccaccccugagauuagaggacuuucucggccgcacguugcucgccgaugaccucuucgccgcuuauuucggccccggcucaucacgacgguuuagggcagcucugggugaaguuucaagggcaaaugcugcucaggacuuucucccuacuagcaggaacgauccagaucuacacuuugaugcugaacggcugggucagggucgcgcacgucuugucggcgcuuuaagagagaccguuguagcugcccgggcacuggaccacacacucgcuagacaaaggcugggggcagcccugcacgcccuacaggacuuuuacagucauaguaacugggucgaguuaggagagcagcaaccucacccucaucugcuuuggcccagacaagaauuacagaaccuggcacaggucgccgauccaacauguucagauugcgaggaauugucuuguccucgaaacuggcugggauucacgcuacugacuuccggauauuucggcacacauccuccuaaacccccaggcaaguguucccauggaggccacuucgaccgcucaagcucccagccaccccgcgggggaauaaacaaggauagcacaagcccuggguucucaccucaucacaugcugcauuuacaggcugcuaaguuggcacugcuggcaucuauccaagcuuucucucuccugcgcuccagacugggcgaccgcgauuuuucccggcugcuggauaucaccccagcaucuucacuaagcuucgugcucgauaccacaggcuccaugggcgaagaaaucaaugcggcaaagauccaggcccgccaucuuguugaacagcggcgagguaguccuauggaacccguucauuacguacuggucccuuuccaugacccuggcuuuggccccguguuuacuacaagcgauccggauuccuuuuggcagcagcugaacgagauucacgcucuggguggcggagaugaacccgaaaugugccuaagugccuuacagcuggcccuacuacacaccccuccucuauccgauauuuuugucuucaccgacgccagucccaaggacgcuuucuuaacaaaucaagucgaaucccucacucaagagcguagaugucgggugaccuuucucguuacagaggauaccagcagagugcaaggccgagcccgccgagagaucuugagcccacugcgauucgaaccuuacaaagcuguggcccucgccucuggaggcgaaguaaucuuuacaaaagaucagcacauccgcgacguggcugccaucgugggggaguccauggcagcgcuggucacuuugccccuugauccuccaguuguagugccgggccagccauugguuuuuucuguggauggucuccugcaaaaaauaacagugcgcauccacggcgacauuucaaguuucuggaucaaaaacccugccggaguaucacagggucaagaggaaggaggaggaccucugggacacacaagaagauucggucaguucuggauggugacuauggaugauccuccacaaaccggcacaugggagauucaggugacggcugaggacacacccggagucaggguucaagcacagaccucucucgauuuccuuuuucacuucggcauccccauggaagaugguccacaucccggccuuuacccuuuaacgcagcccguggcggguuugcagacacagcugcucguagagguuacggggcucggguccagagcaaauccaggagauccccaaccucauuuuucucaugugauccugcgcggagugccugaaggugccgaacugggucaggucccucuugagcccguugggccacccgaacggggcuuguuagccgccucucugagccccacauugcugucuacaccccggccuuucucccuggaacugaucgggcaggacgccgcagggcguagacuccaccgcgcagccccucagccauccaccgugguaccuguccuguuggaacuuagcggcccaucuggcuuuuuggcuccaggaucaaaaguaccucucagucugaggauugccucauucagcggcccccaagaccuggaccucagaaccuuugugaacccaagcuucucuuugacuucuaaccucuccagagcucaccuggaauugaaugaauccgcuuggggacgacuuuggcuugaagugccugauuccgcagccccugauuccgugguuaugguuacagucacagcuggaggccgcgaagccaaccccguuccccccacucaugcauuucugagacuccucgucagcgcccccgccccgcaagaucggcauaccacaccuacaggcucaucagacccuauucuuaccaccgcuacacccgcauuuucacccuucacccuggugacucagggccgcgcgggcgcaggacuggcugcuggaucaccuugguggggaaccgucggcggcguucuguuguugcugggucucgccagcugguag

SEQ ID NO: 218790 - RNA, 2559 nt, Artificial Sequence
  derived and/or modified sequence
augcugccaacagaaguaccccaaucucaccccggaccaucugccuugcucuugcuucagcugcuucuucccccaacuucugcuuucuuuccuaauaucuggucccugcuugcagcccccggaagcaucacccaccaagaccucacugaggaagcagcacuuaacgugacguuacaguuguuucuugaacagccucccccaggcaggccaccccugcgacuggaagacuuucugggccggacccuucucgcagaugaccuguuugccgcuuauuucggccccgguuccagcagacgauucagagcagcuuuaggcgaggugucucgggccaacgcugcacaggacuuccuuccaacauccaggaacgaccccgauuugcauuucgaugccgaacgccucgggcaagggagagcuagacuugucggugcccugagagagacagugguugccgcuagggcccuugaccauacccucgcucggcagcgcuugggcgccgcacugcaugcacuccaagacuucuacucucacucuaacugggucgaguuaggggaacagcaaccccacccucaucuguuguggccacgccaggaguuacaaaauuuagcucagguggccgauccuacauguagcgauugcgaggagcuguccugcccuagaaacuggcuuggcuucacccuccuaaccuccggguauuucggcacccacccccccaaacccccaggcaaauguucucauggugggcacuucgaucggaguucaucccagccucccaggggcggcauaaauaaagacucuacuucgcccggcuuuucaccgcaccacauguuacaucugcaggcagcaaaauuggcauuguuagcaagcauacaggcuuuuucucuacuuaggucccgacugggggacagggauuuuaguagauuacucgacaucacgccugccucuucccucaguuuuguccuugauacgacuggaagcaugggcgaagaaaucaacgcggccaaaauucaagccagacaucucguugaacagcggcgcgggucccccauggaaccggugcacuauguccucgugccguuucacgaccccggguuuggcccaguguuuacuaccagcgaccccgauuccuuuuggcagcaauuaaaugagauacaugcauugggaggcggcgaugagccagaaaugugccuaucagcucuacaacuugcucuccuccacacccccccccucagcgacaucuuuguuuuuacagacgccucuccaaaagacgcguuccugaccaaccaagucgaaucccuuacccaagaaagacgcugucgaguuaccuuccucgugaccgaggacaccagccguguucaaggaagagcccgccgcgaaauccuguccccacucagguuugagcccuauaaggcgguggcacucgcaagcgguggggaggugauuuuuacaaaggaucaacacauuagggauguugcugccauuguaggcgagucuauggccgcacucguuacucucccguuggauccuccaguagucguaccaggucagccucucguuuucaguguggacgggcugcugcaaaaaaucacggugcgaauccauggagauaucagcagcuuuuggaucaaaaauccugcaggcgugucacaagggcaggaagaaggggguggaccucucggacauacacgccgguucgggcaauuuuggauggugacaauggacgaccccccccagacugggacaugggaaauucaggucacugcagaagauacacccggcguucgcguacaagcccaaacaucucuggauuuccucuuccacuucggaaucccuauggaggauggcccacaccccggacuauaucccuuaacucagcccguggcaggacuucagacucagcuccucguggagguaacugggcucgggucacgcgcgaaccccggugacccacaaccucacuuuucucacguaauccugcguggaguccccgaaggagccgagcucggccaggugcccuuagagccagugggaccuccugagcgcggacuccuugcagccucacuguccccuacccuguuaaguaccccucgaccuuucucacuggaguugaucggccaggaugcugccgguaggcgacuccaccgcgcugcuccucaaccaucuacggucgucccugucuuacuugagcugucaggacccucugguuuucucgcccccgggagcaaggucccuuuaagucugaggauugccaguuucuccgguccacaagaucucgaucucagaaccuucgucaacccauccuucucucuuacauccaaccucagcagagcacauuuggaauugaaugagagugcguggggcagacuuuggcuugaagugccugauucggcugcgccggauagcguagucaugguuacggugacagcuggaggaagagaagcuaaucccgucccaccuacccaugcauuuuugagauuacucgugagcgccccugcuccucaaguucgcaaccacuacuuuccaucucagggucccgcccaccacccauacaggcucauuuag

SEQ ID NO: 218791 - RNA, 2559 nt, Artificial Sequence
  derived and/or modified sequence
augcugccuacagaagucccacagucacacccaggaccuucugcucuacuuuugcuucaguuacuccucccacccacauccgccuuuuuccccaauauuuggucccugcuagcagcccccggaucaaucacacaccaggaccucacugaggaggcagcccuuaauguuacacugcaauuguucuuagagcaaccaccgcccgggagaccgccuuuacggcucgaagacuuccugggccgcacgcuacuagcugaugaccuuuucgcugcauacuucggaccaggcaguucaagacgguucagggcagcccuaggagaggugagucgggcaaacgcggcccaagacuuucugcccacuucaagaaaugaucccgaccuucacuucgacgcggagaggcucggucaggguagagcaagacucguaggagcacucagagagacaguuguagccgcacgugcucuggaccacacacuggcuagacaacgacugggugcggccuugcacgcucugcaggauuuuuauagccacucgaacugggucgagcucggugagcaacagccccauccccaucuguuauggccgcgacaggagcugcaaaaccuagcccaaguugcggaccccacguguagcgacugugaagaacuguccuguccucgaaacugguuaggauucacacugcuuacgagcggcuauuucggcacccauccccccaaacccccaggaaaaugcucccacggugggcacuucgauaggucaagcagccagccuccacguggugggaucaacaaggauagcacuucucccggcuucaguccacaucauaugcuccauuuacaggcagccaaacuugcccuccuggccucuauucaagcguucucccugcugaggagcagacucggugacagggacuuuagccggcuacuggacauuaccccagccuccucccucaguuucguuuuggauacuacaggcucaaugggcgaagagauuaacgccgcgaagauucaagcccgccaccugguugaacaacgcagaggcaguccgauggagccugugcauuacguucuugucccauuccacgacccaggcuucgguccuguuuuuacuaccuccgacccugacuccuucuggcaacagcugaacgaaauacacgcccucggggggggugaugaaccugagaugugccucuccgccuuacaacuggcacuacugcauacacccccccuuucagauauuuucguguucacugacgccagcccaaaggaugccuucuugaccaaucagguagagaguuugacccaggagaggagaugucgggugacguuccuggugaccgaggauacuuccagaguccaaggacgcgcccgcagggagauacugucaccgcuaagauucgaaccuuacaaggcuguagcccuggcaaguggaggagaggugauauuuacuaaagaccagcauauuagagauguggcugccaucguaggugagucuauggccgcccugguuacacugccccucgaccccccaguuguggugcccggacaaccucuaguuuuuucagucgauggccugcuucagaagauuaccguacgcauccauggugauaucagcuccuucuggauaaaaaaccccgccgggguuagccagggccaggaagagggaggaggcccucucggacauacuagaagauuuggccaguucuggauggucacuauggaugaccccccacagaccggaaccugggagauccagguuacagcagaagacacacccggcguccgagugcaggcccaaaccucauuggauuuucucuuucacuucgggauucccauggaagauggaccccacccaggacuguacccucugacccaaccaguagccggccuucagacucaacuguugguggaggugaccggccucggcagcagagccaaccccggagacccccaaccgcauuuuagccauguuaucuugagagggguucccgagggagcugaacugggccaggucccuuuagagcccguuggacccccugaacgaggauugcuggcugccagccucuccccaacccuacucuccacccccaggccuuuuucucuugagcucauuggacaagaugccgccggaagaagacugcaucgcgcggcuccucaacccuccacaguagugccaguucuguuagaacucucaggcccaucaggcuuucuagcccccgguuccaaagugccuuuaucauuacgcauugcauccuuuucaggaccucaggacuuagaccugagaaccuuugucaauccgucuuucucccucaccagcaacuugagccgugcacacuuggagcugaaugaaucagcauggggacggcuguggcuagaggugcccgauucugccgcccccgacuccguugugauggucaccgugacugccggcggaagggaagccaauccagugccccccacccacgcguuccugcgcuugcuuguuucugccccagcuccccaaguucguaaccacuauuuccccagccagggcccugcacaucauccauauaggcugaucuag

SEQ ID NO: 218792 - RNA, 2559 nt, Artificial Sequence
  derived and/or modified sequence
auguugcccacugagguuccccaaucacacccaggaccuagugcccuccuucuguuacaauugcuacugcccccaaccuccgccuucuuucccaacauuuggucccugcuagcagcuccgggaagcauaacacaccaggauuugacagaggaagcagcccuuaacgugacacugcagcuuuuuuuggaacagccccccccugguagaccgccucugagacuugaagauuuccugggccgcacucuacucgcggacgaccucuuugccgcuuauuuuggaccuggaucaucgcgaagauucagagccgcccugggcgaagugagcagagccaaugccgcccaggacuuccugccaacuucuagaaacgauccagaccuccacuuugaugcagaaagauuaggccaagguagagcccggcugguaggagccuuaagagagaccguggucgcagccagggccuuggaccacacccuugcacgccagaggcuuggagcugcccuacaugcucugcaggauuuuuacucacauucaaacuggguugaacuuggggagcagcagccucacccccaucuuuuauggcccagacaagaacuccaaaaccuugcccagguggccgaccccaccuguagugauugugaagaacuuucaugcccaaggaauuggcuaggcuucacacugcuuacaucaggauauuuugggacccauccuccaaaaccccccgguaagugcagccacggcggacacuuugaucgauccagcagucagccuccacgaggcggaaucaauaaggacucaacuucccccggcuucagcccacaccacaugcugcaucuccaagcugccaaacuugcccugcuggcgucaauccaagccuuuagucuacuccggucccggcuuggugaccgcgacuuuagcagguuacuugauauuaccccagccagcucucuuagcuucguccuggacaccaccggaagcaugggcgaggaaaucaacgccgcuaagauucaggccaggcaccucguagagcagagaagagguagcccuauggaacccguccacuauguccuugucccguuucaugaccccggauuugggccuguauucaccacaagcgacccagacucuuucuggcaacaauuaaaugaaauucacgccuugggcgguggagaugaaccugagaugugucuuuccgcucugcagcucgcacuccuccacacacccccucuuucugauaucuuuguguucaccgaugcuucgcccaaggaugcauuucucacgaaucaggucgaaucacuaacccaagagcggagguguagggugaccuuccuugugaccgaggacacaucacgggugcagggucgggccagacgggaaauacugagcccacuuagauucgagccuuacaaagcugucgcacuugccucggguggggagguuaucuucacuaaagaccagcacauccgagaugucgccgcaauuguaggagaauccauggcagcccuggugacuuuacccuuagauccucccguugugguccccggccaaccucugguauuuucgguagauggccugcugcagaagauaacggugcguauccacggugauaucucuaguuucuggauaaaaaacccggcgggaguuucccagggccaggaggaaggcgguggcccccuuggacauacgcggcgauuuggacaguucuggaugguaacaauggacgaccccccacagacaggcacaugggagauucagguaacagcggaagacacgccaggcguuaggguucaagcacaaacaagucucgauuuuuuauuccauuucgguauaccuauggaggacgggccucacccaggcuuguauccucuuacccagcccguugccggccugcagacucagcuauuaguggaagucaccggucucggcucucgagccaacccaggagacccacagccacacuuuucgcacgucauucuucggggggugccugagggggcagagcugggucagguaccguuagaaccggucggcccaccggagaggggccucuuagcugccucccugaguccaacccuacuuucuaccccuagacccuuuaguuuagaguugauaggucaagacgcggccggucgacgauugcauagggcugccccacaacccucaaccgugguccccgugcuucuagagcuuuccggccccuccggguuucuugccccaggaagcaaagucccuuuaucccugcggaucgcgucauuuucugguccacaagaccucgaccugcgaaccuucgugaauccuucauuuagccucaccaguaacuugucuagagcccauuuggaacuuaaugaguccgcauggggucgccuaugguuagaggugccagacuccgccgcccccgauucggugguaaugguuaccgugacugcaggaggaagggaagcuaauccuguuccccccacucacgccuuuuuacgucuucuaguaagcgcuccagccccucaaguuaggaaccacuacuuuccaagccaaggaccggcgcaucaccccuauagguuaaucuag

SEQ ID NO: 218793 - RNA, 2559 nt, Artificial Sequence
  derived and/or modified sequence
auguugccaacugaaguaccacagucacauccaggacccuccgcccugcuccuccuccagcuguuacucccucccacaagugcguuuuuuccuaauauuuggucccuacuugccgcuccaggcaguaucacacaucaagaccugacugaagaggccgcccuaaaugucacacugcaacuguuucuggaacagccaccccccgggaggcccccccugaggcuggaagacuuuuugggacgaacccuucucgccgaugacuuguucgcugccuacuucggaccuggcuccucgagaagguuuagagccgcccuuggggaaguuucucgggcuaacgccgcucaggacuuccugccaaccaguagaaacgauccugaucugcauuucgaugccgagcgacugggacaagggagagcacggcucgucggcgcuuugagagagacugucguggcugcuagagccuuagaucacacucuugcgagacagcgucugggcgcggcuuugcaugcauuacaagauuuuuauagccacuccaauuggguagagcucggagagcaacagccgcauccucaucuccuuuggccacgucaagaacuucaaaacuuggcccagguugcugacccgacuugcuccgauugcgaagaacugaguugccccagaaauuggcuaggcuuuacauugcuuaccaguggcuacuuugggacccacccgcccaaaccaccaggaaagugcucccauggcggacauuucgaucgcuccagcucccagccucccagagguggcauaaacaaggacuccacaucaccuggguucaguccacaccacaugcuccaccugcaagccgcaaagcuugcguuguuagcaaguauucaagcauuuagccuucuaaggucuagacuuggcgacagagacuucucgagacuauuagauaucacuccagccagcagccucuccuucgugcuugauacuaccggcucuaugggcgaggaaauuaacgcugcaaaaauccaggcucgucaucuuguggagcagcgcagaggaagucccauggagcccguucacuacguccuggugcccuuccacgaucccggcuuuggcccuguauucaccacaucggacccagauuccuuuuggcagcaacucaaugaaauucacgccuugggagggggggaugaaccugagaugugucuuuccgcuuugcagcuggcucuuuuacacaccccaccauuaucagacauauucguguucacugaugccagcccuaaagaugcuuuccugaccaaccagguggaaagucugacccaggagaggaggugccgagucaccuuucugguaacugaagacaccagucgcguacaaggccgggcuagaagagaaauccucucuccauuacgcuuugagcccuauaaagccguagcccucgcaagugguggcgaaguuauauuuaccaaggaucaacauauccgugacguugccgcaaucgugggcgaguccauggcagcccuaguaacccucccacuagacccaccugucgucguucccggccagccccugguauucuccguggacggacuguugcagaaaauuacaguuaggauucauggcgauauuaguaguuuuuggauuaaaaacccagcaggcgugucccaaggacaagaagaaggaggagguccgcuuggacacacgaggcgauucggccaguucuggaugguuaccauggaugauccgccccagaccggcaccugggagauucaggucacagccgaagacaccccaggcgugagaguccaggcgcaaacaucccuggacuuccuauuccauuuuggcauuccuauggaagauggaccucaccccggguuguauccacuuacacagccaguugccggccuccaaacacaauuacuaguagaagucacuggucucgguucacgcgcuaacccuggcgauccucagccucacuucucccauguuauccuccgaggggucccagaaggggccgaacuggggcaggucccacuggagccuguuggaccacccgaacggggucugcuggccgcgucgcugagccccacacugcuuucaacaccuagaccuuucucccucgaacucaucgggcaggaugcagccggcagacgcuugcauagggcugccccucagcccaguaccgucgucccuguuuuacuagaauuguccgggccuucuggcuuccucgccccuggaucuaaaguuccucugucccuuagaaucgccaguuuuagcgguccucaggaccucgaccuccgcacauuugugaacccuucuuucucccugacauccaaccucucucgggcccaucuugaacuuaaugagucagcauggggucgacuauggcucgaggugccagauuccgccgcaccagacagcguuguaaugguaacagucaccgcuggcggcagagaagccaauccaguucccccgacccaugcauuucuaaggcuguuagucucagcuccggcaccccagguaaggaaucacuacuuuccgucucagggccccgcacaucaccccuauaggcuaauuuag

SEQ ID NO: 218794 - protein, 287 aa, Artificial Sequence
  derived and/or modified sequence
MASLGANPRRTPQGPRPGAASSGFPSPAPVPGPREAEEEEVEEEEELAEIHLCVLWNSGYLGIAYYDTSDSTIHFMPDAPDHESLKLLQRVLDEINPQSVVTSAKQDENMTRFLGKLASQEHREPKRPEIIFLPSVDFGLEISKQRLLSGNYSFIPDAMTATEKILFLSSIIPFDCLLTPPGDLRFTPIPLLIPSQVRALGGLLKFLGRRRIGVELEDYNVSVPILGFKKFMLTHLVNIDQDTYSVLQIFKSESHPSVYKVASGLKEGLSLFGILNRCHCKWGEKLL

SEQ ID NO: 218795 - protein, 822 aa, Artificial Sequence
  derived and/or modified sequence
MASLGANPRRTPQGPRPGAASSGFPSPAPVPGPREAEEEEVEEEEELAEIHLCVLWNSGYLGIAYYDTSDSTIHFMPDAPDHESLKLLQRVLDEINPQSVVTSAKQDENMTRFLGKLASQEHREPKRPEIIFLPSVDFGLEISKQRLLSGNYSFIPDAMTATEKILFLSSIIPFDCLLTPPGDLRFTPIPLLIPSQVRALGGLLKFLGRRRIGVELEDYNVSVPILGFKKFMLTHLVNIDQDTYSVLQIFKSESHPSVYKVASGLKEGLSLFGILNRCHCKWGEKLLRLWFTRPTHDLGELSSRLDVIQFFLLPQNLDMAQMLHRLLGHIKNVPLILKRMKLSHTKVSDWQVLYKTVYSALGLRDACRSLPQSIQLFRDIAQEFSDDLHHIASLIGKVVDFEGSLAENRFTVLPNIDPEIDEKKRRLMGLPSFLTEVARKELENLDSRIPSCSVIYIPLIGFLLSIPRLPSMVEASDFEINGLDFMFLSEEKLHYRSARTKELDALLGDLHCEIRDQETLLMYQLQCQVLARAAVLTRVLDLASRLDVLLALASAARDYGYSRPRYSPQVLGVRIQNGRHPLMELCARTFVPNSTECGGDKGRVKVITGPNSSGKSIYLKQVGLITFMALVGSFVPAEEAEIGAVDAIFTRIHSCESISLGLSTFMIDLNQQVAKAVNNATAQSLVLIDEFGKGTNTVDGLALLAAVLRHWLARGPTCPHIFVATNFLSLVQLQLLPQGPLVQYLTMETCEDGNDLVFFYQVSDLIRSGKPIKPVKDLLKKNQMENCQTLVDKFMKLDLEDPNLDLNVFMSQEVLPAATSIL

SEQ ID NO: 218796 - protein, 821 aa, Artificial Sequence
  derived and/or modified sequence
MASLGANPRRTPQGPRPGAASSGFPSPAPVPGPREAEEEEVEEEEELAEIHLCVLWNSGYLGIAYYDTSDSTIHFMPDAPDHESLKLLQRVLDEINPQSVVTSAKQDENMTRFLGKLASQEHREPKRPEIIFLPSVDFGLEISKQRLLSGNYSFIPDAMTATEKILFLSSIIPFDCLLTPPGDLRFTPIPLLIPSQVRALGGLLKFLGRRRIGVELEDYNVSVPILGFKKFMLTHLVNIDQDTYSVLQIFKSESHPSVYKVASGLKEGLSLFGILNRCHCKWGEKLLRLWFTRPTHDLGELSSRLDVIQFFLLPQNLDMAQMLHRLLGHIKNVPLILKRMKLSHTKVSDWQVLYKTVYSALGLRDACRSLPQSIQLFRDIAQEFSDDLHHIASLIGKVVDFEGSLAENRFTVLPNIDPEIDEKKRRLMGLPSFLTEVARKELENLDSRIPSCSVIYIPLIGFLLSIPRLPSMVEASDFEINGLDFMFLSEEKLHYRSARTKELDALLGDLHCEIRDQETLLMYQLQCQVLARAAVLTRVLDLASRLDVLLALASAARDYGYSRPRYSPQVLGVRIQNGRHPLMELCARTFVPNSTECGGDKGRVKVITGPNSSGKSIYLKQVGLITFMALVGSFVPAEEAEIGAVDAIFTRIHSCESISLGLSTFMIDLNQVAKAVNNATAQSLVLIDEFGKGTNTVDGLALLAAVLRHWLARGPTCPHIFVATNFLSLVQLQLLPQGPLVQYLTMETCEDGNDLVFFYQVSDLIRSGKPIKPVKDLLKKNQMENCQTLVDKFMKLDLEDPNLDLNVFMSQEVLPAATSIL

SEQ ID NO: 218797 - protein, 190 aa, Artificial Sequence
  derived and/or modified sequence
GSFVPAEEAEIGAVDAIFTRIHSCESISLGLSTFMIDLNQVAKAVNNATAQSLVLIDEFGKGTNTVDGLALLAAVLRHWLARGPTCPHIFVATNFLSLVQLQLLPQGPLVQYLTMETCEDGNDLVFFYQVSDLIRSGKPIKPVKDLLKKNQMENCQTLVDKFMKLDLEDPNLDLNVFMSQEVLPAATSIL

SEQ ID NO: 218798 - protein, 467 aa, Artificial Sequence
  derived and/or modified sequence
TVYSALGLRDACRSLPQSIQLFRDIAQEFSDDLHHIASLIGKVVDFEGSLAENRFTVLPNIDPEIDEKKRRLMGLPSFLTEVARKELENLDSRIPSCSVIYIPLIGFLLSIPRLPSMVEASDFEINGLDFMFLSEEKLHYRSARTKELDALLGDLHCEIRDQETLLMYQLQCQVLARAAVLTRVLDLASRLDVLLALASAARDYGYSRPRYSPQVLGVRIQNGRHPLMELCARTFVPNSTECGGDKGRVKVITGPNSSGKSIYLKQVGLITFMALVGSFVPAEEAEIGAVDAIFTRIHSCESISLGLSTFMIDLNQQVAKAVNNATAQSLVLIDEFGKGTNTVDGLALLAAVLRHWLARGPTCPHIFVATNFLSLVQLQLLPQGPLVQYLTMETCEDGNDLVFFYQVSDLIRSGKPIKPVKDLLKKNQMENCQTLVDKFMKLDLEDPNLDLNVFMSQEVLPAATSIL

SEQ ID NO: 218799 - protein, 158 aa, Artificial Sequence
  derived and/or modified sequence
HESLKLLQRVLDEINPQSVVTSAKQDENMTRFLGKLASQEHREPKRPEIIFLPSVDFGLEISKQRLLSGNYSFIPDAMTATEKILFLSSIIPFDCLLTIPSQVRALGGLLKFLGRRRIGVELEDYNVSVPILGFKKFMLTHLVNIDQDTYRNPQQMPL

SEQ ID NO: 218800 - protein, 745 aa, Artificial Sequence
  derived and/or modified sequence
MASLGANPRRTPQGPRPGAASSGFPSPAPVPGPREAEEEEVEEEEELAEIHLCVLWNSGYLGIAYYDTSDSTIHFMPDAPDHESLKLLQRVLDEINPQSVVTSAKQDENMTRFLGKLASQEHREPKRPEIIFLPSVDFGLEISKQRLLSGNYSFIPDAMTATEKILFLSSIIPFDCLLTPPGDLRFTPIPLLIPSQVRALGGLLKFLGRRRIGVELEDYNVSVPILGFKKFMLTHLVNIDQDTYSVLQIFKSESHPSVYKVASGLKEGLSLFGILNRCHCKWGEKLLRLWFTRPTHDLGELSSRLDVIQFFLLPQNLDMAQMLHRLLGHIKNVPLILKRMKLSHTKVSDWQVLYKTVYSALGLRDACRSLPQSIQLFRDIAQEFSDDLHHIASLIGKVVDFEGSLAENRFTVLPNIDPEIDEKKRRLMGLPSFLTEVARKELENLDSRIPSCSVIYIPLIGFLLSIPRLPSMVEASDFEINGLDFMFLSEEKLHYRSARTKELDALLGDLHCEIRDQETLLMYQLQCQVLARAAVLTRVLDLASRLDVLLALASAARDYGYSRPRYSPQVLGVRIQNGRHPLMELCARTFVPNSTECGGDKGRVKVITGPNSSGKSIYLKQVGLITFMALVGSFVPAEEAEIGAVDAIFTRIHSCESISLGLSTFMIDLNQQVAKAVNNATAQSLVLIDEFGKGTNTVDGLALLAAVLRHWLARGPTCPHIFVATNFLSLVQLQLLPQGPLVQYL

SEQ ID NO: 218801 - protein, 466 aa, Artificial Sequence
  derived and/or modified sequence
TVYSALGLRDACRSLPQSIQLFRDIAQEFSDDLHHIASLIGKVVDFEGSLAENRFTVLPNIDPEIDEKKRRLMGLPSFLTEVARKELENLDSRIPSCSVIYIPLIGFLLSIPRLPSMVEASDFEINGLDFMFLSEEKLHYRSARTKELDALLGDLHCEIRDQETLLMYQLQCQVLARAAVLTRVLDLASRLDVLLALASAARDYGYSRPRYSPQVLGVRIQNGRHPLMELCARTFVPNSTECGGDKGRVKVITGPNSSGKSIYLKQVGLITFMALVGSFVPAEEAEIGAVDAIFTRIHSCESISLGLSTFMIDLNQVAKAVNNATAQSLVLIDEFGKGTNTVDGLALLAAVLRHWLARGPTCPHIFVATNFLSLVQLQLLPQGPLVQYLTMETCEDGNDLVFFYQVSDLIRSGKPIKPVKDLLKKNQMENCQTLVDKFMKLDLEDPNLDLNVFMSQEVLPAATSIL

SEQ ID NO: 218802 - DNA, 864 bp, Artificial Sequence
  derived and/or modified sequence
atggccagcctgggcgccaaccccagaagaaccccccagggccccagacccggcgccgccagcagcggcttccccagccccgcccccgtgcccggccccagagaggccgaggaggaggaggtggaggaggaggaggagctggccgagatccacctgtgcgtgctgtggaacagcggctacctgggcatcgcctactacgacaccagcgacagcaccatccacttcatgcccgacgcccccgaccacgagagcctgaagctgctgcagagagtgctggacgagatcaacccccagagcgtggtgaccagcgccaagcaggacgagaacatgaccagattcctgggcaagctggccagccaggagcacagagagcccaagagacccgagatcatcttcctgcccagcgtggacttcggcctggagatcagcaagcagagactgctgagcggcaactacagcttcatccccgacgccatgaccgccaccgagaagatcctgttcctgagcagcatcatccccttcgactgcctgctgaccccccccggcgacctgagattcacccccatccccctgctgatccccagccaggtgagagccctgggcggcctgctgaagttcctgggcagaagaagaatcggcgtggagctggaggactacaacgtgagcgtgcccatcctgggcttcaagaagttcatgctgacccacctggtgaacatcgaccaggacacctacagcgtgctgcagatcttcaagagcgagagccaccccagcgtgtacaaggtggccagcggcctgaaggagggcctgagcctgttcggcatcctgaacagatgccactgcaagtggggcgagaagctgctgtag

SEQ ID NO: 218803 - DNA, 864 bp, Artificial Sequence
  derived and/or modified sequence
atggcgtccctaggcgcgaatccacgtcgaacaccccagggcccccgccctggagcagcgtcgtctggatttcctagccccgctcccgtacctggaccaagggaggcggaagaggaggaagttgaggaggaggaggagctggctgaaattcacctgtgtgtactctggaacagcggctacctgggcatcgcttattatgacacttcagattctaccatccattttatgcccgatgccccggaccatgaatctcttaagctcctccagcgcgttttagacgagatcaacccccaatcagtagtcacctctgccaagcaggatgagaatatgaccagatttttgggtaaactggcctcacaggagcatagggagcccaaacgacccgaaatcatcttcctgccttccgttgatttcggtctggagatttcaaaacagcggctactttccggcaactacagcttcattcccgatgctatgaccgccaccgagaaaattctgtttctatccagcattattccattcgattgcttactgacacctccaggagatttgcggttcacccccataccgctcttgatcccgtcccaggtcagggccctgggcggactgctgaaattcctgggcaggagaaggattggggtggagttagaggactataatgttagtgttccaattctgggctttaagaagtttatgcttacgcacctggttaacattgaccaggacacctatagcgtccttcagatcttcaagtctgaatctcacccctcagtttataaagtggcaagtggactcaaggagggcctgtctctcttcggcatcttgaatcgatgccactgtaaatggggagaaaagctgttatag

SEQ ID NO: 218804 - DNA, 864 bp, Artificial Sequence
  derived and/or modified sequence
atggccagcctgggcgccaaccccaggaggaccccccagggccccaggcctggagctgccagcagcggcttccccagccctgcccctgtgcccggcccccgggaggccgaggaggaggaggtggaggaggaggaggagctggccgagatccacctgtgtgtgctgtggaacagcggctacctgggcatcgcctactatgacaccagtgacagcaccatccacttcatgccagatgccccagaccacgagagcctgaagctgctgcagagggtgctggatgagatcaacccccagagcgtggtgaccagcgccaagcaggatgagaacatgacccgcttcctgggcaagctggccagccaggagcaccgggagcccaagaggcctgagatcatcttcctgcccagcgtggactttggcctggagatcagcaagcagaggctgctgagcggcaactacagcttcatcccagatgccatgacagccacagagaagatcctcttcctgagcagcatcatcccctttgactgcctgctgaccccacctggggacctgcgcttcacccccatccccctgctgatccccagccaggtgcgggccctgggcggcctgctgaagttcctgggcagaagacgcatcggcgtggagctggaggactacaacgtgtctgtgcccatcctgggcttcaagaagttcatgctgacccacctggtgaacatcgaccaggacacctacagcgtgctgcagatcttcaagtctgagagccaccccagcgtgtacaaggtggccagcggcctgaaggagggcctgagcctgtttggcatcctgaaccgctgccactgcaagtggggcgagaagctgctgtag

SEQ ID NO: 218805 - DNA, 864 bp, Artificial Sequence
  derived and/or modified sequence
atggccagcctgggcgccaacccccggcggaccccccagggcccccgccccggcgctgcatcgagtgggtttccatctcctgctcccgtgcccggacctcgagaggctgaggaagaagaagtggaagaggaggaggagttggcagagatccatttatgcgtgctgtggaactccggatacctgggcatcgcttattatgataccagcgatagcacgattcacttcatgcctgatgctccagatcacgaatcgctcaaacttctgcagcgtgtcctggatgagattaatcctcaatcagtggtaacaagcgcaaaacaagatgagaatatgacccggttcctggggaagttggcaagccaggaacatagagaaccgaagagacctgaaatcatattcctcccttcagtcgatttcggactggagatttccaagcagcgtctgttaagcggaaattacagttttatcccagacgctatgacagcaacagagaagatcctgtttctgtcatccataattccatttgactgtctcttgacgccgccgggcgacctccggttcaccccgatccccttgctgataccctctcaggtgagagcgctgggggggttattgaaattcctgggccgacgccgcattggggtcgagctggaggactataacgtcagtgtgccaatattgggcttcaagaagttcatgttgactcatctggtaaatatcgatcaggatacctattcagtgttgcaaatattcaaaagtgagtcccacccttccgtgtacaaggtggcttccggattgaaggagggattaagcctattcggcatccttaaccggtgccactgcaaatggggagagaagcttctgtag

SEQ ID NO: 218806 - DNA, 918 bp, Artificial Sequence
  derived and/or modified sequence
gcggtcggtcagcggggcgttctcccacctgtagcgactcagagcctccaagctcatggcctccttaggagcgaacccaaggaggacaccgcagggaccgagacctggggcggcctcctccggcttccccagcccggccccagtgccgggccccagggaggccgaggaggaggaagtcgaggaggaggaggagctggccgagatccatctgtgtgtgctgtggaattcaggatacttgggcattgcctactatgatactagtgactccactatccacttcatgccagatgccccagaccacgagagcctcaagcttctccagagagttctggatgagatcaatccccagtctgttgttacgagtgccaaacaggatgagaatatgactcgatttctgggaaagcttgcctcccaggagcacagagagcctaaaagacctgaaatcatatttttgccaagtgtggattttggtctggagataagcaaacaacgcctcctttctggaaactactccttcatcccagacgccatgactgccactgagaaaatcctcttcctctcttccattattccctttgactgcctcctcacacccccaggagatttaagatttaccccgattccactgctgatcccctcccaggttcgagcacttggagggctgctgaagttcctgggtcgaagaagaatcggggttgaactggaagactataatgtcagcgtccccatcctgggctttaagaaatttatgttgactcatctggtgaacatagatcaagacacttacagtgttctacagatttttaagagtgagtctcacccctcagtgtacaaagtggccagtggactgaaggaggggctcagcctctttggaatcctcaacagatgccactgtaagtggggagagaagctgctcag

SEQ ID NO: 218807 - DNA, 864 bp, Artificial Sequence
  derived and/or modified sequence
atggccagcctaggtgcaaaccccagacggaccccccagggacctaggcccggtgcagcatcttccgggttcccctcaccagcacctgtacccggaccaagggaggcagaagaagaagaggtggaggaagaggaagagctggctgagatccacctctgcgtactgtggaactcagggtatcttgggatcgcttattatgacacatcagacagcacaatacatttcatgccggatgccccagaccatgagtctctcaaactgttgcagagagtgctcgatgagattaacccacaaagcgtcgtaacgagtgccaagcaggatgagaatatgacgcgattcctgggaaaactggccagtcaggaacacagggagcctaagagaccagagattattttcctgccaagcgtggactttgggctggagatcagcaaacaaagattgctgagcggtaactacagtttcatccctgatgccatgacagcgacagaaaagattctgttcctcagtagtattatcccttttgattgtttgctcacccctccaggtgatctcagatttacacccattcctctcctaattccctcacaagtgcgcgcactcgggggtctgttgaaatttttagggagaagacgcataggtgtcgagttggaggactataatgtctcagtccccatcctcgggtttaaaaagttcatgctgactcacctggttaatattgaccaggatacatatagcgtgcttcagatttttaagtcagagagccatcccagtgtatacaaggtggcttccggcctgaaggagggattgagcctgttcggtatcctgaaccgctgccactgcaaatggggcgagaagcttctgtag

SEQ ID NO: 218808 - DNA, 2469 bp, Artificial Sequence
  derived and/or modified sequence
atggcttctctaggggctaacccacgccgtacccctcagggaccgaggcccggcgccgcttcaagcgggttcccaagccccgctcctgtgccaggccctcgcgaagctgaagaagaagaggtagaggaggaagaggagcttgccgagattcacctctgcgtactatggaacagcggttatctggggatagcctactacgatacctccgatagtactatccactttatgcctgacgcacccgaccacgagagcctgaagctgttgcagagagtgttggacgaaatcaatcctcagagcgtagtgacttcagcaaagcaggacgagaatatgactcgattcctcggcaaacttgcgagccaggaacatcgcgagccaaagcgtccagagatcatctttctgccaagtgtggactttggcctggagatttccaagcagagactgctgtcaggtaactattcatttatccccgatgccatgaccgctacagagaagatcctcttcctgtctagcatcataccatttgattgtctgttgacgcctcctggcgatctgcgtttcacgccaattcccctgcttattcccagccaggttagagcgctggggggcctgctcaaattcctgggcagaaggcgaatcggagtggaactcgaagattacaacgtgagcgtgccaatcctcgggttcaaaaagttcatgctaacgcaccttgtgaatatagaccaggatacctatagcgtgctgcagatctttaagtccgagtcacatcctagcgtgtataaggtcgcctctgggttgaaggagggcctcagtcttttcggaatcctgaaccgctgccattgcaaatggggcgaaaagcttctgcggttatggttcacgcgccccactcacgatttgggagagctgtcatcacgactcgacgttattcagtttttcctgctgccgcaaaatctggacatggcacagatgctccaccgactgctcggacatatcaaaaatgtgccactgatcctgaaaaggatgaaactctcccacacgaaggtgtctgattggcaggtattgtacaagactgtgtatagcgctctgggcctgcgtgatgcctgcaggtctctgccccagagcattcaattgtttagggatatcgcccaagaattttcggatgacttgcaccacatcgcaagcctcatcggaaaagtggtggatttcgaaggcagcctggccgagaacaggtttacagtacttccgaatatagatccagaaattgacgaaaaaaagaggagactcatgggtctccccagctttcttaccgaggtggctcgaaaggagctggagaatcttgattctagaatcccctcttgttcggttatctatattcctctgataggatttctgctgtccatccccagactgccctctatggtagaggcatcagatttcgagatcaatggccttgacttcatgttcctatccgaagaaaaacttcactataggagcgcccggaccaaagagctggatgcactgctgggggacctgcactgcgagattagggaccaagagacgttgttgatgtatcagttacagtgtcaggttcttgctcgcgctgccgtgctcacacgcgtccttgatctcgccagcagattggacgtgttgttagctttggcctccgcggcccgggattacggctatagtcggcccagatactcaccccaggtccttggcgttaggatccagaacggcagacatcctctgatggagctgtgtgcgaggacattcgtccccaattcaacagagtgcggaggcgacaagggccgcgtgaaagtcataaccggccccaactccagcggaaaatctatctacctaaagcaggtcggcctgataaccttcatggctttggtaggatctttcgtgcctgctgaagaggccgagatcggggcagttgacgcaatcttcacaagaatccacagctgtgagagcatctccctcggcttatccacgttcatgatcgatctaaatcagcaggttgcaaaagcggtcaacaatgccacagcacagtctctcgtcttaatagacgagttcgggaaaggaaccaatacagtagacggtctagccctgctagccgcagtgctcaggcattggctggcccgggggcccacatgtccacatattttcgtggccacaaactttttaagtctcgttcagctgcagctgctcccccagggtccactcgttcagtatctgactatggagacgtgtgaagacggaaatgacctggtttttttctaccaggtcagtgaccttatccggtccggtaaaccaatcaagcccgtaaaagacttactcaagaagaatcagatggagaattgtcagacccttgtcgacaagttcatgaaactggacctcgaagaccccaacctggacctcaatgtatttatgagtcaggaggttctccctgctgccaccagcatattgtag

SEQ ID NO: 218809 - DNA, 2466 bp, Artificial Sequence
  derived and/or modified sequence
atggctagcctgggcgccaacccccgacgtactccccagggcccccgtccaggcgcggcctcttcggggttcccgagccctgcgcctgtccccggcccacgggaggctgaagaggaagaagtagaagaggaggaggaactggccgaaatccacctgtgtgtgctgtggaactctggctacctagggatcgcatactacgatacgtctgattcaacaatacacttcatgcccgatgcccctgaccatgaatctcttaaactgctgcaaagggtgttggacgagatcaatccccagtccgttgtcacgagcgcgaaacaggacgagaacatgacccggtttttggggaagttggcctctcaggagcatcgagaacccaagcgtccggagattatatttctcccttcagttgatttcggactggaaatctcgaagcagcgactcctgtccgggaattatagttttatccccgacgctatgaccgccaccgagaagattcttttcctcagctctatcatccccttcgactgtcttctcactccgcccggtgatctacggttcacccccatccccctgttgattccctctcaggttcgtgcactggggggactactgaagtttctgggaaggcggcggataggcgttgagctggaagactataacgtatcagtgccgattctggggtttaaaaagttcatgctgacccacctcgtgaacattgaccaggacacttactcggtgttacaaatcttcaaatccgagtcccaccctagtgtgtataaggtggcttcaggtttaaaggagggcctgtcactgttcggtattcttaaccgatgtcattgcaagtggggggaaaaattgcttcgactgtggtttacccggcccacacacgacctgggagagctatcctccagattggacgtaatacagtttttcctgctgccacaaaatctcgacatggcccagatgctgcacaggcttcttggccacattaaaaatgttcctctgatattaaagcgaatgaagttatcacatacaaaagtgagcgattggcaagtgttatacaagacagtctacagcgctttggggctaagggacgcctgtagatccttaccgcaaagcatacagctgttcagggatattgctcaggagtttagtgatgacttacaccatatcgctagcctgatcggtaaggtggtggattttgagggcagcctcgccgaaaatcgtttcacagtgcttcctaacattgaccccgagatcgacgagaaaaaacgccgactcatgggtctgcccagctttctcactgaggtggcacgcaaggagctggaaaacctggattctcgtatcccctcctgttctgtgatctatataccgctgatcggcttccttctttctatccctagactcccttctatggtggaggcttccgattttgaaattaacggactcgacttcatgtttttaagtgaggagaagctgcattaccggtccgcacggaccaaagaactcgatgcgctcctgggggaccttcattgcgaaattcgagatcaggagacactgctgatgtatcagcttcagtgtcaggttttagctagagccgctgtgcttacaagggttctagaccttgctagtcgtttggatgtgttgctagcactggcgtcagctgctcgggattatggatattcgcgtccacggtatagtcctcaagtgctgggagtgaggatacagaacggccggcatcctctcatggaactctgcgcccgcaccttcgtgccgaactctaccgaatgcgggggtgacaagggccgagttaaagttatcacaggccccaattcatcaggtaaatccatttatctgaaacaggtaggacttattactttcatggccttagttgggtcattcgtgccggccgaagaagccgagatcggcgccgttgatgcaatcttcacccggattcacagctgtgagagcattagtttgggcctaagcacctttatgatcgatctgaatcaagtggctaaagctgtgaacaatgctacagctcagtccctcgtgctgattgatgagtttgggaaggggactaataccgtggacggcctcgctctgcttgccgcagtattgagacattggctagcaaggggccctacatgcccccatatctttgtggcaaccaactttctgagccttgtccagctccagctactgccccaggggccgctggtgcagtacctgacaatggagacatgcgaagatgggaatgatttagtgtttttttaccaagttagcgatctgatccggtctggaaaacctattaagccggtgaaggatctgctgaaaaagaatcaaatggagaattgccaaactctggtggacaagttcatgaagctggacctggaggatccaaacttggatttaaatgtttttatgtcacaagaggtgttgccagccgcgacctcgattctgtag

SEQ ID NO: 218810 - DNA, 2469 bp, Artificial Sequence
  derived and/or modified sequence
atggcctctctaggcgcgaacccgcggcgcacccctcagggcccaaggcctggcgccgcctcatccggttttccgtcccctgcccctgtacccggcccgcgggaagccgaggaggaggaggttgaggaagaagaggagctggccgagatccacctctgtgtgctttggaactccgggtatctagggattgcctattacgatacttccgattctaccatccacttcatgccagatgcccccgatcatgagagccttaaactgctccagagagtcttggatgagatcaatccccagtccgtggtgactagcgccaaacaggacgagaatatgacaagattcttgggcaaattagcttcccaggaacatcgggaacccaaacgccccgaaatcatcttcttaccctccgtggatttcggcctagagattagtaaacagaggctcctgagcggtaactacagttttattccagatgctatgactgccaccgaaaagattctgttccttagctcaattatccctttcgactgtcttttgactcccccaggtgacttgcggtttacgcccattccgttgttaatcccatcccaagtgcgcgccttaggggggctgctgaagtttctgggtcgcagaagaatcggagtcgagctcgaggattataatgttagcgtccccattctcggctttaagaaattcatgttgacacatcttgtgaacatagatcaggacacatacagtgtgctccaaatctttaagagtgagagccatcccagcgtgtataaagtcgcttctgggctgaaagaagggctgtcactctttggaatactcaatcgatgccactgtaaatggggagaaaagcttctgaggctatggttcacacgtcctacccatgacctgggcgaactctcttcccgcttagatgtgatccagttcttcctgctaccccagaatttagatatggcgcagatgcttcataggctgttaggccacatcaagaatgtccctttaatactcaagagaatgaaattgagtcacaccaaagttagcgactggcaggtgctgtacaaaactgtgtatagcgctctaggtctgcgagacgcatgtaggagtctgccacagagtattcagttatttcgcgatatagcccaggagttcagcgacgacttacaccacattgccagcttgatcgggaaagttgtcgactttgaaggatcattagccgaaaacagattcaccgtcctgcctaatatcgatcctgaaatcgatgagaagaagaggcgactgatggggttgcccagcttcctaaccgaggtggcccgcaaggaactggagaacctggattccagaatcccgagctgtagcgtcatctatatccccctgattggctttctgctatcgatcccgcggcttcctagcatggtggaggcttccgacttcgagatcaacgggctggacttcatgttcctgtccgaggaaaaacttcactaccgcagtgcgcgaaccaaagaacttgacgccctgcttggcgacctccactgtgagattagggaccaagaaacattgttgatgtaccagctgcagtgccaagttctggctagagcagcagtactgactcgtgtcctggacctagccagtcgcctggatgttttattggccctcgcctctgccgcaagagattacggttattcacggccccgctacagtcctcaggtgctaggggtcaggatccagaacggcagacacccacttatggaactgtgcgccagaacatttgtacctaacagcacagagtgtggaggcgataagggacgggttaaagtgatcacgggaccaaacagttctggaaaatcgatatatctgaaacaggtcggactgatcacttttatggcccttgttggctccttcgttcccgccgaggaagccgagatcggggcagtcgacgcaatttttactcggattcatagttgtgagtccatcagtctgggcttgtcgaccttcatgatcgatctcaaccaacaagtagctaaagctgtcaataatgcaaccgctcagtcccttgtgctcatagatgaattcgggaagggaacaaacacagtcgacggcctggccttgctcgcagctgtgttgcggcactggctcgcacgagggccgacttgccctcacatcttcgttgctacaaatttcctctctctggttcaactccagctgctgcctcagggacccctcgtccagtatctgaccatggagacatgtgaagatggtaacgatctggtgttcttctatcaggtgtctgatctaataagaagcggtaaacccatcaagcccgtcaaggacctacttaagaagaaccagatggagaactgccagactttggtggacaagtttatgaagttagatttagaggatcccaatctggatcttaatgtcttcatgtctcaggaggtactgccagcggccacttcaatcctgtag

SEQ ID NO: 218811 - DNA, 2466 bp, Artificial Sequence
  derived and/or modified sequence
atggcctcgctgggtgccaatccaaggcgcacaccacagggaccccgacctggagcagccagcagcggctttccaagccccgctcccgtgcccggcccacgcgaagcggaggaggaggaagtcgaagaggaagaagaactcgcagagatccacctttgcgtgctttggaattcgggttatctgggaatagcgtattatgatacatctgattccacaatacacttcatgccggacgcacctgatcacgagtccctcaaactcctccagcgagttctagacgaaatcaacccacagagtgtggtgaccagtgcaaaacaggacgaaaacatgacaaggttcctaggcaaattggcctcacaagagcacagagagcccaagcggccggaaatcatttttctaccttctgttgacttcggattagaaatttccaaacagcgcctgctcagcggaaattatagcttcatccccgacgcgatgaccgcgaccgagaagatactctttctgtcttccatcattccattcgattgcctgctaacacctcccggcgatctccgcttcaccccgatacctctcctgattccctcacaagttagagccctgggcggccttctaaagtttctgggcaggagaagaataggcgtcgagttggaggattataatgtgtccgtccccattcttggattcaaaaagtttatgctgacccatttggttaacatcgatcaggacacatattccgtcctgcagatcttcaagagcgagtcgcacccttccgtctataaggtggcttctggcctgaaggaggggcttagcttgttcggtatcctaaacagatgccattgtaagtggggggagaagctgctccgactgtggtttacaagaccaacgcacgaccttggcgagctgtctagccgattggatgttatccagttcttcctgctcccccagaacctggacatggcacaaatgctccacaggttgttggggcacataaaaaacgtgccgttgatcctaaaacgcatgaaacttagtcacacaaaagtgtcagactggcaggtgctgtataaaaccgtgtatagcgccctgggactccgcgatgcgtgtcgtagtttacctcaaagcatccagctgtttcgggatatcgcccaggaattctcagatgatttacaccatatcgcaagcttgataggcaaagttgtcgatttcgaaggctcgctagcagagaatcggttcaccgtgctgccaaatatagaccctgaaatcgatgaaaagaaacgacggctgatgggtttgcccagctttctaactgaggtcgctcggaaggagctggagaacctggattcacgcattccctcctgcagcgtgatctatattcctctcattgggttccttctgtcaattcccaggcttccttccatggttgaggcctctgacttcgaaattaacgggttggacttcatgtttctgtcagaggagaaacttcattatcggagcgcacgcacgaaagagctggacgccctcctcggagacttacattgcgagattcgcgaccaggagacactgctgatgtatcaactgcagtgccaagtgctggcccgagcagctgtgctcacgagagtcctggatctggcaagccggctggatgtgctgctggccctcgcatctgctgcaagagactacgggtatagtcgtccccgctattcccctcaggtactaggggtccgtattcagaacggaagacatccgctgatggaactatgtgccagaacatttgtccccaatagcaccgagtgcggtggggacaaggggcgggtgaaggtcataacgggccccaatagcagcggtaagtcaatctacctgaaacaggtgggcctgattactttcatggccctcgtcggttcattcgttccagctgaggaagctgaaataggggctgtcgacgcaatcttcacgcgcatccacagctgtgagtctatctccctcggtttgagcacctttatgatagacttgaatcaggtggccaaagcagtaaacaatgctacagcccagagtctggttctcatcgacgagttcggaaagggtaccaacaccgttgacggcctggcccttttggccgctgtcctgcggcactggttggctaggggccctacatgtcctcatatctttgtcgccactaattttctctcactcgtacagctacagctgctgccgcaagggccgttagtgcagtatctcacaatggagacctgcgaagatggaaatgacttagtgttcttttatcaagtgtcagacctaatacgtagtgggaaacctataaagcccgtaaaggacctcctaaaaaagaaccaaatggagaattgccagaccctggtggataaattcatgaagttggacttggaagaccccaatctagacctgaatgtgttcatgagtcaagaagtactcccggcggcaacttccatcctgtag

SEQ ID NO: 218812 - DNA, 2669 bp, Artificial Sequence
  derived and/or modified sequence
gcggtcggtcagcggggcgttctcccacctgtagcgactcagagcctccaagctcatggcctccttaggagcgaacccaaggaggacaccgcagggaccgagacctggggcggcctcctccggcttccccagcccggccccagtgccgggccccagggaggccgaggaggaggaagtcgaggaggaggaggagctggccgagatccatctgtgtgtgctgtggaattcaggatacttgggcattgcctactatgatactagtgactccactatccacttcatgccagatgccccagaccacgagagcctcaagcttctccagagagttctggatgagatcaatccccagtctgttgttacgagtgccaaacaggatgagaatatgactcgatttctgggaaagcttgcctcccaggagcacagagagcctaaaagacctgaaatcatatttttgccaagtgtggattttggtctggagataagcaaacaacgcctcctttctggaaactactccttcatcccagacgccatgactgccactgagaaaatcctcttcctctcttccattattccctttgactgcctcctcacacccccaggagatttaagatttaccccgattccactgctgatcccctcccaggttcgagcacttggagggctgctgaagttcctgggtcgaagaagaatcggggttgaactggaagactataatgtcagcgtccccatcctgggctttaagaaatttatgttgactcatctggtgaacatagatcaagacacttacagtgttctacagatttttaagagtgagtctcacccctcagtgtacaaagtggccagtggactgaaggaggggctcagcctctttggaatcctcaacagatgccactgtaagtggggagagaagctgctcaggctatggttcacacgtccgactcatgacctgggggagctcagttctcgtctggacgtcattcagttttttctgctgccccagaatctggacatggctcagatgctgcatcggctcctgggtcacatcaagaacgtgcctctgattctgaaacgcatgaagttgtcccacaccaaggtcagcgactggcaggttctctacaagactgtgtacagtgccctgggcctgagggatgcctgccgctccctgccgcagtccatccagctctttcgggacattgcccaagagttctctgatgacctgcaccatatcgccagcctcattgggaaagtagtggactttgagggcagccttgctgaaaatcgcttcacagtcctccccaacatagatcctgaaattgatgagaaaaagcgaagactgatgggacttcccagtttccttactgaggttgcccgcaaggagctggagaatctggactcccgtattccttcatgcagtgtcatctacatccctctgattggcttccttctttctattccccgcctgccttccatggtagaggccagtgactttgagattaatggactggacttcatgtttctctcagaggagaagctgcactatcgtagtgcccgaaccaaggagctggatgcattgctgggggacctgcactgcgagatccgggaccaggagacgctgctgatgtaccagctacagtgccaggtgctggcacgagcagctgtcttaacccgagtattggaccttgcctcccgcctggacgtcctgctggctcttgccagtgctgcccgggactatggctactcaaggccgcgttactccccacaagtccttggggtacgaatccagaatggcagacatcctctgatggaactctgtgcccgaacctttgtgcccaactccacagaatgtggtggggacaaagggagggtcaaagtcatcactggacccaactcatcagggaagagcatatacctcaaacaggtaggcttgatcacattcatggccctggtaggcagctttgtgccagcagaggaggccgaaattggggcagtagacgccatcttcacacgaattcatagctgcgaatccatctcccttggcctctccaccttcatgatcgacctcaaccagcaggtggcgaaagcagtgaacaatgccactgcacagtcgctggtccttattgatgaatttggaaagggaaccaacacggtggatgggctcgcgcttctggccgctgtgctccgacactggctggcacgtggacccacatgcccccacatctttgtggccaccaactttctgagccttgttcagctacaactgctgccacaagggcccctggtgcagtatttgaccatggagacctgtgaggatggcaacgatcttgtcttcttctatcaggtctcagacttgatccgcagtggaaaacccatcaagcctgtcaaggatttgctaaagaagaaccaaatggaaaattgccagacattagtggataagtttatgaaactggatttggaagatcctaacctggacttgaacgttttcatgagccaggaagtgctgcctgctgccaccagcatcctctgagagtccttccagtgtcctccccagcctcctgagactccggtgggctgccatgccctctttgtttccttatctccctcagacgcagagtttttagtttctctagaaattttgtttcatattaggaataaagtttattttgaagaaa

SEQ ID NO: 218813 - DNA, 2666 bp, Artificial Sequence
  derived and/or modified sequence
gcggtcggtcagcggggcgttctcccacctgtagcgactcagagcctccaagctcatggcctccttaggagcgaacccaaggaggacaccgcagggaccgagacctggggcggcctcctccggcttccccagcccggccccagtgccgggccccagggaggccgaggaggaggaagtcgaggaggaggaggagctggccgagatccatctgtgtgtgctgtggaattcaggatacttgggcattgcctactatgatactagtgactccactatccacttcatgccagatgccccagaccacgagagcctcaagcttctccagagagttctggatgagatcaatccccagtctgttgttacgagtgccaaacaggatgagaatatgactcgatttctgggaaagcttgcctcccaggagcacagagagcctaaaagacctgaaatcatatttttgccaagtgtggattttggtctggagataagcaaacaacgcctcctttctggaaactactccttcatcccagacgccatgactgccactgagaaaatcctcttcctctcttccattattccctttgactgcctcctcacacccccaggagatttaagatttaccccgattccactgctgatcccctcccaggttcgagcacttggagggctgctgaagttcctgggtcgaagaagaatcggggttgaactggaagactataatgtcagcgtccccatcctgggctttaagaaatttatgttgactcatctggtgaacatagatcaagacacttacagtgttctacagatttttaagagtgagtctcacccctcagtgtacaaagtggccagtggactgaaggaggggctcagcctctttggaatcctcaacagatgccactgtaagtggggagagaagctgctcaggctatggttcacacgtccgactcatgacctgggggagctcagttctcgtctggacgtcattcagttttttctgctgccccagaatctggacatggctcagatgctgcatcggctcctgggtcacatcaagaacgtgcctctgattctgaaacgcatgaagttgtcccacaccaaggtcagcgactggcaggttctctacaagactgtgtacagtgccctgggcctgagggatgcctgccgctccctgccgcagtccatccagctctttcgggacattgcccaagagttctctgatgacctgcaccatatcgccagcctcattgggaaagtagtggactttgagggcagccttgctgaaaatcgcttcacagtcctccccaacatagatcctgaaattgatgagaaaaagcgaagactgatgggacttcccagtttccttactgaggttgcccgcaaggagctggagaatctggactcccgtattccttcatgcagtgtcatctacatccctctgattggcttccttctttctattccccgcctgccttccatggtagaggccagtgactttgagattaatggactggacttcatgtttctctcagaggagaagctgcactatcgtagtgcccgaaccaaggagctggatgcattgctgggggacctgcactgcgagatccgggaccaggagacgctgctgatgtaccagctacagtgccaggtgctggcacgagcagctgtcttaacccgagtattggaccttgcctcccgcctggacgtcctgctggctcttgccagtgctgcccgggactatggctactcaaggccgcgttactccccacaagtccttggggtacgaatccagaatggcagacatcctctgatggaactctgtgcccgaacctttgtgcccaactccacagaatgtggtggggacaaagggagggtcaaagtcatcactggacccaactcatcagggaagagcatatacctcaaacaggtaggcttgatcacattcatggccctggtaggcagctttgtgccagcagaggaggccgaaattggggcagtagacgccatcttcacacgaattcatagctgcgaatccatctcccttggcctctccaccttcatgatcgacctcaaccaggtggcgaaagcagtgaacaatgccactgcacagtcgctggtccttattgatgaatttggaaagggaaccaacacggtggatgggctcgcgcttctggccgctgtgctccgacactggctggcacgtggacccacatgcccccacatctttgtggccaccaactttctgagccttgttcagctacaactgctgccacaagggcccctggtgcagtatttgaccatggagacctgtgaggatggcaacgatcttgtcttcttctatcaggtctcagacttgatccgcagtggaaaacccatcaagcctgtcaaggatttgctaaagaagaaccaaatggaaaattgccagacattagtggataagtttatgaaactggatttggaagatcctaacctggacttgaacgttttcatgagccaggaagtgctgcctgctgccaccagcatcctctgagagtccttccagtgtcctccccagcctcctgagactccggtgggctgccatgccctctttgtttccttatctccctcagacgcagagtttttagtttctctagaaattttgtttcatattaggaataaagtttattttgaagaaa

SEQ ID NO: 218814 - DNA, 2666 bp, Artificial Sequence
  derived and/or modified sequence
gcggtcggtcagcggggcgttctcccacctgtagcgactcagagcctccaagctcatggcctccttaggagcgaacccaaggaggacaccgcagggaccgagacctggggcggcctcctccggcttccccagcccggccccagtgccgggccccagggaggccgaggaggaggaagtcgaggaggaggaggagctggccgagatccatctgtgtgtgctgtggaattcaggatacttgggcattgcctactatgatactagtgactccactatccacttcatgccagatgccccagaccacgagagcctcaagcttctccagagagttctggatgagatcaatccccagtctgttgttacgagtgccaaacaggatgagaatatgactcgatttctgggaaagcttgcctcccaggagcacagagagcctaaaagacctgaaatcatatttttgccaagtgtggattttggtctggagataagcaaacaacgcctcctttctggaaactactccttcatcccagacgccatgactgccactgagaaaatcctcttcctctcttccattattccctttgactgcctcctcacacccccaggagatttaagatttaccccgattccactgctgatcccctcccaggttcgagcacttggagggctgctgaagttcctgggtcgaagaagaatcggggttgaactggaagactataatgtcagcgtccccatcctgggctttaagaaatttatgttgactcatctggtgaacatagatcaagacacttacagtgttctacagatttttaagagtgagtctcacccctcagtgtacaaagtggccagtggactgaaggaggggctcagcctctttggaatcctcaacagatgccactgtaagtggggagagaagctgctcaggctatggttcacacgtccgactcatgacctgggggagctcagttctcgtctggacgtcattcagttttttctgctgccccagaatctggacatggctcagatgctgcatcggctcctgggtcacatcaagaacgtgcctctgattctgaaacgcatgaagttgtcccacaccaaggtcagcgactggcaggttctctacaagactgtgtacagtgccctgggcctgagggatgcctgccgctccctgccgcagtccatccagctctttcgggacattgcccaagagttctctgatgacctgcaccatatcgccagcctcattgggaaagtagtggactttgagggcagccttgctgaaaatcgcttcacagtcctccccaacatagatcctgaaattgatgagaaaaagcgaagactgatgggacttcccagtttccttactgaggttgcccgcaaggagctggagaatctggactcccgtattccttcatgcagtgtcatctacatccctctgattggcttccttctttctattccccgcctgccttccatggtagaggccagtgactttgagattaatggactggacttcatgtttctctcagaggagaagctgcactatcgtagtgcccgaaccaaggagctggatgcattgctgggggacctgcactgcgagatccgggaccaggagacgctgctgatgtaccagctacagtgccaggtgctggcacgagcagctgtcttaacccgagtattggaccttgcctcccgcctggacgtcctgctggctcttgccagtgctgcccgggactatggctactcaaggccgcgttactccccacaagtccttggggtacgaatccagaatggcagacatcctctgatggaactctgtgcccgaacttttgtgcccaactccacagaatgtggtggggacaaagggagggtcaaagtcatcactggacccaactcatcagggaagagcatatacctcaaacaggtaggcttgatcacattcatggccctggtaggcagctttgtgccagcagaggaggccgaaattggggcagtagacgccatcttcacacgaattcatagctgcgaatccatctcccttggcctctccaccttcatgatcgacctcaaccaggtggcgaaagcagtgaacaatgccactgcacagtcgctggtccttattgatgaatttggaaagggaaccaacacggtggatgggctcgcgcttctggccgctgtgctccgacactggctggcacgtggacccacatgcccccacatctttgtggccaccaactttctgagccttgttcagctacagctgctgccacaagggcccctggtgcagtatttgaccatggagacctgtgaggatggcaacgatcttgtcttcttctatcaggtctcagacttgatccgcagtggaaaacccatcaagcctgtcaaggatttgctaaagaagaaccaaatggaaaattgccagacattagtggataagtttatgaaactggatttggaagatcctaacctggacttgaacgttttcatgagccaggaagtgctgcctgctgccaccagcatcctctgagagtccttccagtgtcctccccagcctcctgagactccggtgggctgccatgccctctttgtttccttatctccctcagacgcagagtttttagtttctctagaaattttgtttcatattaggaataaagtttattttgaagaaa

SEQ ID NO: 218815 - DNA, 2469 bp, Artificial Sequence
  derived and/or modified sequence
atggccagcctgggcgccaaccccaggaggaccccccagggccccaggcctggagctgccagcagcggcttccccagccctgcccctgtgcccggcccccgggaggccgaggaggaggaggtggaggaggaggaggagctggccgagatccacctgtgtgtgctgtggaacagcggctacctgggcatcgcctactatgacaccagtgacagcaccatccacttcatgccagatgccccagaccacgagagcctgaagctgctgcagagggtgctggatgagatcaacccccagagcgtggtgaccagcgccaagcaggatgagaacatgacccgcttcctgggcaagctggccagccaggagcaccgggagcccaagaggcctgagatcatcttcctgcccagcgtggactttggcctggagatcagcaagcagaggctgctgagcggcaactacagcttcatcccagatgccatgacagccacagagaagatcctcttcctgagcagcatcatcccctttgactgcctgctgaccccacctggggacctgcgcttcacccccatccccctgctgatccccagccaggtgcgggccctgggcggcctgctgaagttcctgggcagaagacgcatcggcgtggagctggaggactacaacgtgtctgtgcccatcctgggcttcaagaagttcatgctgacccacctggtgaacatcgaccaggacacctacagcgtgctgcagatcttcaagtctgagagccaccccagcgtgtacaaggtggccagcggcctgaaggagggcctgagcctgtttggcatcctgaaccgctgccactgcaagtggggcgagaagctgctgcggctgtggttcacccggcccacccatgacctgggggagctgagcagccggctggatgtgatccagttcttcctgctgccccagaacctggacatggcccagatgctgcaccggctgctgggccacatcaagaatgtgcccctcatcctgaagaggatgaagctgagccacaccaaggtgtctgactggcaggtgctgtacaagacagtgtacagcgccctgggcctgagagatgcctgccgcagcctgccccagagcatccagctgttccgggacatcgcccaggagttcagtgatgacctgcaccacatcgccagcctgattggcaaggtggtggactttgagggcagcctggctgaaaatcgcttcaccgtgctgcccaacatcgaccctgagattgatgagaagaagaggcggctgatgggcctgcccagcttcctgacagaggtggccaggaaggagctggagaacctggacagccgcatccccagctgcagcgtcatctacatccccctcatcggcttcctgctgagcatcccccggctgcccagcatggtggaggccagtgactttgagatcaatggcctggacttcatgttcctgtctgaggagaagctgcactacagaagtgcccggaccaaggagctggatgccctgctgggggacctgcactgtgagatccgggaccaggagaccctgctgatgtaccagctgcagtgccaggtgctggcccgggctgctgtgctgaccagggtgctggacctggccagccggctggatgtgctgctggccctggccagcgctgcccgggactatggctacagccggccccgctacagcccccaggtgctgggcgtgcgcatccagaatggccgccaccccctgatggagctgtgtgcccggacctttgtgcccaacagcacagaatgtggcggggacaagggccgggtgaaggtgatcaccggccccaacagcagcggcaagagcatctacctgaagcaggtgggcctcatcaccttcatggccctggtgggcagctttgtgcctgctgaggaggccgagatcggggctgtggatgccatcttcacccgcatccacagctgtgagagcatcagcctgggcctgagcaccttcatgattgacctgaaccagcaggtggccaaggctgtgaacaatgccacagcccagagcctggtgctgattgatgaatttgggaagggcaccaacacagtggatggcctggccctgctggccgctgtgctgcggcactggctggcccggggccccacctgcccccacatctttgtggccaccaacttcctgagcctggtgcagctgcagctgctgccccagggccccctggtgcagtacctgaccatggagacctgtgaagatggaaatgacctggtgttcttctaccaggtgtctgacctgatccgcagcggcaagcccatcaagcctgtgaaggacctgctgaagaagaaccagatggagaactgccagaccctggtggacaagttcatgaagctggacctggaggaccccaacctggacctgaatgtgttcatgagccaggaggtgctgcctgctgccaccagcatcctgtag

SEQ ID NO: 218816 - DNA, 2466 bp, Artificial Sequence
  derived and/or modified sequence
atggccagcctgggcgccaaccccaggaggaccccccagggccccaggcctggagctgccagcagcggcttccccagccctgcccctgtgcccggcccccgggaggccgaggaggaggaggtggaggaggaggaggagctggccgagatccacctgtgtgtgctgtggaacagcggctacctgggcatcgcctactatgacaccagtgacagcaccatccacttcatgccagatgccccagaccacgagagcctgaagctgctgcagagggtgctggatgagatcaacccccagagcgtggtgaccagcgccaagcaggatgagaacatgacccgcttcctgggcaagctggccagccaggagcaccgggagcccaagaggcctgagatcatcttcctgcccagcgtggactttggcctggagatcagcaagcagaggctgctgagcggcaactacagcttcatcccagatgccatgacagccacagagaagatcctcttcctgagcagcatcatcccctttgactgcctgctgaccccacctggggacctgcgcttcacccccatccccctgctgatccccagccaggtgcgggccctgggcggcctgctgaagttcctgggcagaagacgcatcggcgtggagctggaggactacaacgtgtctgtgcccatcctgggcttcaagaagttcatgctgacccacctggtgaacatcgaccaggacacctacagcgtgctgcagatcttcaagtctgagagccaccccagcgtgtacaaggtggccagcggcctgaaggagggcctgagcctgtttggcatcctgaaccgctgccactgcaagtggggcgagaagctgctgcggctgtggttcacccggcccacccatgacctgggggagctgagcagccggctggatgtgatccagttcttcctgctgccccagaacctggacatggcccagatgctgcaccggctgctgggccacatcaagaatgtgcccctcatcctgaagaggatgaagctgagccacaccaaggtgtctgactggcaggtgctgtacaagacagtgtacagcgccctgggcctgagagatgcctgccgcagcctgccccagagcatccagctgttccgggacatcgcccaggagttcagtgatgacctgcaccacatcgccagcctgattggcaaggtggtggactttgagggcagcctggctgaaaatcgcttcaccgtgctgcccaacatcgaccctgagattgatgagaagaagaggcggctgatgggcctgcccagcttcctgacagaggtggccaggaaggagctggagaacctggacagccgcatccccagctgcagcgtcatctacatccccctcatcggcttcctgctgagcatcccccggctgcccagcatggtggaggccagtgactttgagatcaatggcctggacttcatgttcctgtctgaggagaagctgcactacagaagtgcccggaccaaggagctggatgccctgctgggggacctgcactgtgagatccgggaccaggagaccctgctgatgtaccagctgcagtgccaggtgctggcccgggctgctgtgctgaccagggtgctggacctggccagccggctggatgtgctgctggccctggccagcgctgcccgggactatggctacagccggccccgctacagcccccaggtgctgggcgtgcgcatccagaatggccgccaccccctgatggagctgtgtgcccggacctttgtgcccaacagcacagaatgtggcggggacaagggccgggtgaaggtgatcaccggccccaacagcagcggcaagagcatctacctgaagcaggtgggcctcatcaccttcatggccctggtgggcagctttgtgcctgctgaggaggccgagatcggggctgtggatgccatcttcacccgcatccacagctgtgagagcatcagcctgggcctgagcaccttcatgattgacctgaaccaggtggccaaggctgtgaacaatgccacagcccagagcctggtgctgattgatgaatttgggaagggcaccaacacagtggatggcctggccctgctggccgctgtgctgcggcactggctggcccggggccccacctgcccccacatctttgtggccaccaacttcctgagcctggtgcagctgcagctgctgccccagggccccctggtgcagtacctgaccatggagacctgtgaagatggaaatgacctggtgttcttctaccaggtgtctgacctgatccgcagcggcaagcccatcaagcctgtgaaggacctgctgaagaagaaccagatggagaactgccagaccctggtggacaagttcatgaagctggacctggaggaccccaacctggacctgaatgtgttcatgagccaggaggtgctgcctgctgccaccagcatcctgtag

SEQ ID NO: 218817 - DNA, 2469 bp, Artificial Sequence
  derived and/or modified sequence
atggccagcctgggcgccaacccccggcggaccccccagggcccccgccccggcgccgcatcctcaggatttccctccccagcgcccgtgcctgggccccgagaagccgaggaagaggaggtggaggaggaagaagaactggccgagatacacctgtgtgttctgtggaattccggttacttgggaatagcatattacgacacgtctgattccactatccactttatgccagatgcccccgaccatgagtccttaaagctgcttcagcgcgtactggatgagatcaatccgcagagcgtagttactagtgccaaacaggacgagaatatgactcgctttctcgggaagcttgcatctcaggaacatcgggagcccaagagacctgaaatcatctttttgccatctgtagacttcgggctggagatctccaaacagaggctcctgtctgggaactatagtttcatcccagacgccatgacagccaccgaaaaaattctgttcttgtcttcaattatccccttcgattgcttgctgaccccccctggcgatttgcgctttaccccaatccctctcttgattccttcccaagttcgagcactgggcggacttctcaagttcctggggagaaggcgcattggagtggaattagaggactacaatgtctcagttcctatactggggttcaagaaattcatgttgactcacctggtgaatatcgaccaggatacgtacagtgtactgcagatcttcaaatcagagagtcacccaagtgtgtataaggtggccagcggcctgaaggaagggttgtcactgttcggaatattgaatcgttgccactgcaagtggggcgaaaaactgttgcggttatggttcactcggcctactcacgatctgggcgagctctcttcgcgactggatgttattcaattttttctgctgccccagaacttggatatggcgcaaatgctgcaccgtctgcttggtcacatcaaaaacgtccccctgattttgaagcgaatgaaattatcccacacgaaagtttccgactggcaagttctgtataagaccgtgtattcagccctcggtttacgtgatgcctgtagatcactgccacagagcatccagctctttcgcgacatcgcgcaagaattttccgacgatctgcaccacatagcttctttgattgggaaggtggtcgacttcgagggaagcctcgctgagaaccggttcaccgtcctaccaaacatagatccagaaattgatgaaaagaaaaggcggttaatgggattgccgagcttccttacagaagtcgcacggaaggagttggagaatttggacagcaggattccctcatgttccgtgatttatatcccacttatcgggtttttactcagcattcccaggttgccatccatggtcgaagcatcagactttgagatcaacggtctcgacttcatgttcttgagtgaggagaagttgcattacagatctgctcgcaccaaggagctggatgctctgttgggggacttgcattgtgagatcagagaccaggaaaccctgctcatgtatcaactgcagtgccaggtgctggcgagagccgccgtgctgacccgggtcctggacttggccagccgcctggacgtgctgctggcactcgcctctgctgctcgtgactacggatattctcgtccacggtatagccctcaggtccttggagtccgaatccagaacggcaggcaccctctgatggagctgtgcgccagaactttcgtgcccaatagcacggaatgcggtggagataagggcagagtgaaagttattacgggcccaaatagctcgggcaaaagtatttacctcaagcaggtggggctgattacgtttatggccctggtggggtctttcgtcccggctgaagaagccgagattggcgcagtggatgcaatctttaccagaatacacagctgtgaatcaatttctctcggtctgtcgactttcatgatcgatctgaaccagcaggtggcgaaggctgtaaacaatgctaccgcgcaatccctcgtgctgattgatgaattcggaaaaggcaccaatactgtggacggattggccctcctcgcagccgttctgcgacactggttggcccgcggacctacctgcccccatattttcgtcgcaaccaatttcctgtcgctggtgcagctccagctactcccacagggaccattggttcaatatcttacaatggagacctgtgaggatggcaatgacttagtctttttttaccaggtgtccgatcttattcgctccggcaagcctatcaaaccagtgaaggacctgttaaagaaaaaccagatggagaattgccagacactcgtcgataagttcatgaagctggatttggaagaccctaacctggatttaaacgtgtttatgtcccaggaagtactcccggccgctacttcaatcctgtag

SEQ ID NO: 218818 - DNA, 2466 bp, Artificial Sequence
  derived and/or modified sequence
atggccagcctgggcgccaacccccggcggaccccccagggccccaggcccggtgccgcaagctctggattcccttcgcctgctccagtcccaggccctcgagaggccgaggaggaggaggtggaagaagaagaggagcttgctgagattcacctctgcgtcctgtggaactcagggtacctaggcattgcttactacgacacttcagatagcacgatccactttatgcccgacgctcctgaccatgaaagcctgaaactgctccaaagggtcctggatgagataaacccacagtccgtcgtgaccagcgctaaacaggacgagaacatgacacgctttcttggaaaactcgcttctcaggaacaccgggagcccaagcgcccagagatcatttttctgcctagcgtagacttcggtctcgaaatctctaagcagcgcctcttgtctggcaactattctttcattcctgacgctatgaccgctacagagaagatactttttctgtcctctattattcccttcgattgccttctcacacccccaggcgacctcaggtttacgccaattccactgctgataccttcccaagtgagggccctgggcggacttctgaaattcctggggagaaggcgtatcggggtggaacttgaggattataatgtgtccgtgcccatactggggttcaagaagtttatgctgacccatcttgtgaatatagaccaggacacctactccgtcctgcaaattttcaaaagtgagagccaccccagcgtttataaggtagcaagcgggctcaaggaagggttatcgttatttggcatcctgaatcgctgccactgcaaatggggggaaaaactgctgcgactgtggtttacccgacctacacatgatctaggggagctaagtagccggctggacgtcatccaattcttcttactcccacagaatctggatatggcacagatgctgcaccgattacttggccacataaagaacgtacccctgattctgaagcgaatgaagctctctcataccaaagtgagcgactggcaggtgctgtacaaaacagtgtactccgccctgggtttaagggatgcgtgcagaagcttgcctcagagcatccaactttttcgggacattgcgcaggagtttagcgatgatcttcatcacatagcctccttgatcggtaaggtcgtggattttgaggggagcctggccgagaatcgcttcacggtgctgcccaatatagatccagagattgatgagaagaaaaggcggctgatgggcctgccaagtttcctgaccgaggttgctagaaaggagctggagaatttggattcacgaattccttcctgtagcgtgatctacatccctctgataggatttctgctgtctattccccgactgcccagtatggtcgaggcaagtgactttgagatcaacggtctcgatttcatgttcctctctgaagaaaaacttcactacaggtctgcaagaacaaaagagctggacgcgctgctcggggatctccattgcgaaattagggaccaggagacactcttaatgtaccagttgcagtgccaagtgctggctagagccgctgtgctgacccgagtgctagatctagcatcccggcttgacgttctgctggccttggctagcgccgctagagactacgggtactctagacctcgctacagtcctcaggttttaggggttcgaattcaaaatggtaggcacccactcatggaactgtgtgctcggacctttgtccccaattccactgaatgtggcggcgacaaagggagggtgaaagtcatcaccggccccaactcctcaggaaaatcgatatatctgaagcaggtgggactgattacattcatggctttggtgggctcgtttgtgcctgccgaggaagccgagatcggagcggtggacgcaatattcacgagaatccacagctgcgagtctattagcctgggcctgtccactttcatgatagaccttaatcaggtggccaaagctgtgaacaatgcaaccgcccaaagtctcgtcctgatcgacgagttcgggaaaggaaccaacacagtagatggactcgcccttttggctgccgttctgaggcactggcttgcaaggggcccgacatgcccccacatcttcgtcgccaccaactttctttctttggtccagcttcagctgttgccccagggccctctggttcagtatttaaccatggaaacctgcgaagacggaaacgacttggtatttttttatcaagtcagcgacctgatccggtcgggcaagccaattaaacccgtaaaagacctgttgaagaagaatcagatggagaactgtcaaacgctggtggataaatttatgaaactcgacctagaagatccaaatctggatctaaacgtcttcatgagccaggaggtcctccccgccgctacctcaattctatag

SEQ ID NO: 218819 - DNA, 2469 bp, Artificial Sequence
  derived and/or modified sequence
atggccagcctgggcgccaacccccggcggaccccccagggccccaggcctggcgccgctagctccgggttcccctctccggctcccgtacccggtccgcgcgaggctgaagaggaagaggtcgaggaagaagaagagttggccgagatccacctgtgcgtcctgtggaactcagggtacttagggatagcttactacgacacaagtgacagcaccattcactttatgcccgacgcccccgaccatgagagtctcaaactgctgcagcgcgtgctggacgaaatcaacccccaaagcgtggtcaccagtgccaagcaggatgaaaacatgactcggttcttagggaagctcgccagtcaggagcaccgcgagccaaagcggcccgaaattatctttttaccatctgtcgacttcggactcgaaatttctaagcagcggctattgtccggcaactacagctttatccctgatgcaatgacggccactgagaaaatactttttctgtcgtccataatcccctttgattgtcttctgactcctcctggggacctccgattcacacccatcccattattgattccatcacaggtccgagcactcggaggcttgttgaaattcctggggcgtcgaagaatcggggtggagctggaggattataatgtctccgtacccattctaggcttcaaaaaatttatgctcacgcatcttgtcaatatcgaccaggacacctacagtgtccttcagattttcaagagcgagagccacccctcggtgtacaaagtggcttcaggcttaaaagaaggcctctctctgtttggaatactcaataggtgtcactgcaaatggggtgaaaaactgctgcgcctgtggttcaccaggcccactcatgacttgggcgagctttcatcacggttggatgtgattcaatttttcctgcttccccagaatctggatatggcccagatgctccaccgtctgttgggacacattaagaacgtgccgttgatcctgaaacgtatgaaactttcacacactaaggtaagtgattggcaggttctgtataaaacagtctattctgccctggggctgcgcgatgcatgtcgatctctgccacagagtatacaactttttcgggatatagcccaagaattctctgacgatttgcaccacattgcttcactgataggaaaggtcgtcgatttcgagggaagcctcgctgagaacagattcacagtgctgccaaacatcgaccctgagatagacgagaaaaagcgaagactgatgggacttccctcctttcttacggaggtcgctaggaaggaacttgaaaacttggatagccggattccctcctgctctgtcatctacatccccctgatcggttttctcctttccattccgagattgcctagcatggtggaagctagtgattttgaaattaacggcctggactttatgttcttgtcagaagaaaaactgcactacagatcagcgcgcactaaggaactggatgcactgctgggcgatctgcattgtgagatccgtgatcaggagaccctcctgatgtatcagctgcagtgtcaggttctggcacgagccgcagtactcacccgagtgttagacctcgcctcaaggcttgacgtcctactcgctcttgcaagcgccgccagggattacgggtactcgaggccccgatatagtcctcaagtgctgggggtccgtattcagaacggaagacaccctctgatggaactctgcgccagaacgtttgtgcctaattctactgagtgcggcggagataaaggacgcgtgaaggtcattaccgggccaaactcaagtggaaagagcatctacctcaagcaggttggactgatcacctttatggcactggtaggatccttcgtccccgcagaggaggcagaaatcggcgccgttgacgcgatctttactaggatacatagctgcgagtccataagtctgggcttaagcactttcatgattgacttgaatcagcaagttgccaaagccgtgaataatgcaactgcccaaagtctcgtgctgatagacgagtttggaaaggggacgaacacagtcgacggcctggcgctcctcgcagcagttctgaggcactggctggcccgaggcccaacgtgtcctcatattttcgtcgccactaactttctgtccctggtccagctgcagctgctcccacagggtcctctcgtgcagtacctgactatggaaacctgcgaggacggaaacgaccttgtgtttttctatcaagtctccgatcttattaggtcaggcaagcccatcaaaccggttaaagatttgctcaaaaaaaatcaaatggagaattgccagacgcttgtggacaagtttatgaaattggacctggaagatccgaacctggacctgaatgtgttcatgagccaggaggtccttcccgccgccacgagcatcttgtag

SEQ ID NO: 218820 - DNA, 2466 bp, Artificial Sequence
  derived and/or modified sequence
atggccagcctgggcgccaacccccggcggaccccccagggcccccgacccggtgcagcttcgtccggattcccttctcccgcccccgtacctggaccacgcgaagccgaagaggaagaggtggaggaggaggaggaactcgccgaaatccacctgtgcgtactctggaactcaggttatctcggaattgcctactacgatacgagcgacagtaccatacattttatgcccgacgcgcccgatcacgaaagcctgaaattgctgcaacgggtgcttgacgaaattaatccccagtccgtggtgacatccgctaagcaagatgagaacatgaccagattcctcggaaagctggccagccaggagcatagagaaccaaaacggcctgagataatctttctccccagcgtagactttggcttggagatttctaagcaaagactgctgtctggcaattacagcttcatcccagatgcgatgaccgcgacagagaagattctctttctgtcaagcataattccgttcgactgtttgctgactccaccaggcgatctccggttcacccctatccctctactcattccttcccaagtccgtgcgctggggggacttcttaaatttctggggcggaggcgcatcggagttgaactggaagattacaacgtttccgtacctatcctggggtttaagaagtttatgttaacccaccttgtaaacatcgaccaggacacatatagtgtgctccagatctttaagtctgagtcccaccccagtgtatataaggttgctagcggactcaaagagggattatccctcttcggcattttaaatagatgtcattgtaaatggggcgagaagctgttgagactgtggtttactcgccctacccatgaccttggtgagttgagttccaggttggacgtgatacagtttttcctgcttccccagaacctcgacatggcccagatgctccatagactgctggggcatatcaaaaatgtccccttgatcctgaagaggatgaagttaagccatactaaggtgagcgattggcaggtgctttacaaaaccgtatacagtgctttgggactccgtgacgcttgccggtcactacctcaatccattcagctgtttagggatattgcccaggaattctccgatgatctgcatcacattgcaagcttaattggtaaagtggtggatttcgaaggctcactggcagagaacagatttactgtgcttcctaatatagatcctgagatcgacgaaaagaagaggcgcttaatgggacttccttcttttctcacagaagttgcccggaaggagttagaaaacctggactcacgtatccccagttgtagcgtcatctacatcccattgatcgggttcctgctgtccatcccacgcctgcccagcatggtcgaagcatcagacttcgagatcaacggcctcgactttatgtttctcagtgaggagaaacttcactaccgaagcgctcggaccaaagagctggacgccctgctgggtgacctgcactgtgagatacgagaccaggagacccttctgatgtaccagctccagtgtcaagtgctagctcgcgcagctgtgctgaccagggttttggatctggcttctcgactggatgtactgctggctttggcaagcgccgccagagattacgggtatagcaggcctcggtattccccgcaggtgctgggcgtgcgaatacaaaatggaaggcaccccctgatggaactgtgtgcccggacgttcgtgccgaactctactgagtgtggcggagataagggacgcgtgaaggtgattacaggacctaactcgtccggaaaatctatttacctgaagcaggtcgggctcataacattcatggccttggtggggtcctttgttcctgcagaggaggctgagatcggtgcggtcgatgctattttcacacgtatccacagctgtgagtctatctcactcgggctgtctactttcatgatcgatctcaatcaagtcgcaaaagctgtgaacaatgctaccgctcaatccctcgtgctgattgatgaatttgggaaggggacaaataccgtggatgggctggccctgctcgcagccgtgcttagacactggttggctcgggggcccacctgtccccacatatttgtagcaacgaattttctgtctttggtgcagttacagctcctgccccaggggccacttgtacagtacctcactatggaaacctgtgaagacggtaacgacttagttttcttttatcaagtgtctgacctgatccgaagcggaaagcccattaaacctgtaaaggacttgctgaagaagaatcagatggagaattgtcagaccctcgtcgataaattcatgaaactggacctggaggatcctaaccttgacttgaacgtgtttatgtcacaagaagtgctccctgccgcaacatccatcctgtag

SEQ ID NO: 218821 - DNA, 2469 bp, Artificial Sequence
  derived and/or modified sequence
atggccagcctcggtgctaaccctcgacgcaccccccaagggccacgtcctggggctgcgagctctgggttccccagccccgcacccgtgccagggcctcgtgaggctgaagaggaagaggtggaggaagaggaggagttggcagaaatacacctgtgcgtcctttggaactcaggttatcttggcatagcttactacgatacctctgatagtacaattcattttatgcctgacgcccctgaccatgagtcactgaagctgttgcaacgcgtgttagacgaaatcaacccacagagtgtagtgacctccgcaaaacaggatgagaatatgacgcgattcctgggaaagctcgcatcccaggagcaccgtgaaccaaaacggccagagatcatctttctaccttccgtggattttggtcttgagattagcaaacagcgactgctcagcggtaactatagcttcatccccgatgccatgacagctacggaaaagatcctgtttctttcctctattattccctttgattgtctgctgacaccacccggtgacctgcggtttaccccaattccactgctgatcccatcacaggtaagggcccttggtgggctccttaaattcctaggcaggcgtagaataggtgttgaattggaggactacaacgtgagcgtgcctatcctgggattcaagaagttcatgctcacccatctcgtaaacattgaccaggacacatatagcgtgctgcagattttcaagtctgagagccatccttccgtgtataaagtagcttccggattgaaggagggtctgagtttattcggtatcttgaatcgctgtcactgcaagtggggcgagaaactgctccgactttggttcactagacccactcacgatctgggagagctttctagccggctcgatgtgatacagttctttttactgccacagaatttggatatggcacagatgcttcaccggttgcttggccacatcaagaatgtgcccctgattttgaaaagaatgaaattgtcacatactaaagtgtcggactggcaggtcctctataagacagtgtactcggccttaggcctcagggatgcctgcaggtcactgcctcagtccatccagctgttcagagacatagcacaggaattttctgatgacctgcaccatatcgctagcctgatcggcaaggtcgttgatttcgaaggctctctcgctgaaaacaggtttactgtgcttcccaatatcgatcctgagatcgacgaaaagaagcgtaggctcatgggcttgcccagttttctaactgaggtggccaggaaggagcttgagaacttagacagcaggatcccgagttgctctgtcatttatatccccctgatcggcttccttctgagtatccctcggttgcccagcatggtggaagccagcgattttgagatcaacgggctggatttcatgttcttaagcgaagaaaaacttcactacaggagcgccaggactaaggaactggacgctcttctgggagacctccactgcgaaattcgggatcaggaaacacttctgatgtaccagttgcagtgtcaggtgctggcacgtgccgctgtgttaacgcgggttctggatttagcaagcaggcttgatgttctccttgccttagcctctgcagcgcgagactatggttacagtagacccagatattctccacaggtacttggcgttagaattcagaatggaagacatcccctgatggaattgtgcgcaaggacctttgttcccaatagcacagaatgcggtggggataaggggagggtgaaagtaattaccggccctaacagctccgggaagtcaatttatttgaaacaggtcggactgatcacgttcatggccctcgtaggctcctttgtccccgctgaagaagcagagatcggggctgtggacgcgatcttcactagaatccatagctgtgaatctatttccctgggactcagtactttcatgattgacttgaaccagcaggtggcaaaggccgttaataatgccactgcccagtccctggttcttattgacgaatttggcaaagggactaacaccgtcgacgggctcgctctgctggccgctgtacttaggcactggcttgcgcgaggcccaacttgcccccacattttcgttgcgacaaacttcctaagccttgtccaactgcaactcctccctcagggacccctcgtccagtatctcacaatggagacttgcgaagatggcaatgatctggtcttcttctatcaggtttcagacctgattagatctggtaaacccattaagcccgtgaaggatttgctcaaaaagaaccagatggagaattgtcagacactggtggataagtttatgaaattagatttggaggacccaaatttggacttaaatgtcttcatgagtcaagaggtactgcccgctgccacatctattctgtag

SEQ ID NO: 218822 - DNA, 2466 bp, Artificial Sequence
  derived and/or modified sequence
atggcttctctgggcgctaacccaagacggactcctcagggccctcgcccaggagcagcaagctcaggatttccatctcccgcacctgtccctggaccacgcgaagcagaggaggaggaagtggaagaagaagaggaactggccgagatccacttgtgcgtgttgtggaattctggctatctagggatcgcatattatgacaccagcgactccaccatccacttcatgccagacgcaccggatcacgaatctctaaagttgctgcagcgcgtcctcgatgagattaacccacagtcggttgtgactagcgccaaacaggatgaaaatatgactcggtttctgggcaaactagccagccaggagcatcgagagcctaagagacccgaaatcattttcttaccctcagttgacttcgggttggagatttccaaacagagactcctaagcggaaactacagtttcatcccagacgcaatgacggctaccgaaaagatcctctttcttagctccattatcccatttgattgcttacttacaccccctggagatctacgctttacccccataccgcttctgattccgagtcaggtgagagccctgggaggactgttgaagtttttaggcaggagaaggattggggtggagctcgaggactataatgtgagtgtcccaattctgggtttcaagaagttcatgctgacacacttggtgaatattgaccaagacacatatagtgtgctgcagatatttaagtcagaatcccaccctagcgtgtataaagtggctagtggccttaaagaaggcctgagtctcttcggcatcctgaaccgctgccattgcaaatggggcgaaaagctgctgagactgtggttcacgcggcctactcacgatctaggggagttatctagtagactcgacgtgatccagttcttccttttgcctcaaaacctggatatggctcaaatgctgcaccgcttattagggcacatcaagaacgtaccactgattcttaagcgtatgaaactgtctcacacaaaggtttcagattggcaggtcctttataaaacagtgtattctgcccttgggctaagagatgcatgcaggtccctaccacaatctatacagctgttccgagacatcgctcaagagttttcagatgatctgcatcatatcgcctcgctgatcggtaaggtggtcgactttgagggctccttggcagaaaatcgattcaccgtgctccctaacattgatcccgagatcgatgaaaaaaaacgaaggttgatgggtcttccctcttttctgaccgaggtagctcgcaaggaattagagaacctcgactctcgcattcccagctgcagcgtgatttatattcccctgatcggcttcctactttccatcccacgcctcccatccatggtggaagcgagcgatttcgagataaacggacttgacttcatgttcctcagtgaggaaaagctgcattatcggtcagctcgtactaaagagctggatgcgttgttaggcgatctgcactgcgagattagagatcaggagacactgctgatgtaccagctgcagtgccaggtgctggcacgcgcagccgtccttacgcgcgtactggaccttgctagtcgcttggatgtgcttctggctctcgcatcagcagctagggactatggctattctaggcctaggtattccccgcaggttctgggggtgagaatccagaatggcaggcaccctcttatggaattgtgcgcccgtacgttcgtgcccaattcaactgagtgcgggggtgacaaagggcgtgttaaggttatcaccggacccaattcttccgggaagtctatttacttgaagcaagttggattaatcacgttcatggcactggtggggtcatttgtgccagctgaggaggccgaaattggtgcggtggacgcaatcttcacgcggatacatagttgcgaaagcatcagtctggggttgagtacattcatgatcgacctgaaccaggttgctaaagccgtgaacaacgccacggcccagagtctggttctcatagacgaattcgggaaaggaaccaacacggttgacggtctggcattgctggcagccgtgttgaggcattggttagcgagagggccaacttgtccccatatctttgtcgccacaaacttcctctcattggttcagctgcaacttttaccccaggggcctcttgtccagtatctgaccatggaaacatgcgaggatggcaacgacctcgtgttcttttatcaagtttctgacctcatacggtctggaaagcccatcaaaccagttaaggatctgctgaaaaaaaaccaaatggagaactgccagacgctagttgacaagttcatgaaactggatctcgaggaccctaacttggatttgaatgtgttcatgagtcaagaagtcctgcctgcggcaactagcatcctttag

SEQ ID NO: 218823 - DNA, 2469 bp, Artificial Sequence
  derived and/or modified sequence
atggcctcactaggggctaacccaagacggaccccacaggggcctaggccgggtgccgcaagctcaggttttccgtctcccgcacccgttcccggaccccgagaggctgaggaggaggaagtggaagaagaggaggaactagcggagatacatttgtgcgtgctctggaacagcgggtacctgggaatcgcttattacgacacttcggattctacgattcacttcatgcccgatgcccctgaccacgaatctcttaagttgcttcagagggtgttggacgaaatcaatcctcagagtgtggtcacttccgcaaagcaggacgaaaacatgactaggtttctaggcaagctggcttctcaagagcaccgagaacccaaaagacctgagattattttccttccatcagtggattttggcttagagatcagtaagcaacgacttctgagtggcaactattcctttatcccagatgccatgacagctactgagaagatcctcttcctttctagtatcatcccatttgactgtttgctgaccccccctggggaccttcgcttcacccccatcccactgctgatcccatcccaggtacgggcattaggaggcctgctgaaattccttggcaggagaagaatcggagtcgaactggaagactataatgtctccgtccctattttaggctttaagaaattcatgctcacccacctggtgaacattgatcaggacacttattctgtgctgcagatatttaagagcgaaagtcacccttccgtgtacaaagtagcatctggcctaaaagaggggctaagtctattcggcatcttaaaccgatgtcattgtaagtggggggagaaacttctgcggctttggttcacccggcctactcacgatctgggagagcttagcagccgtctggacgtcatccagtttttcttactcccacaaaatctcgacatggctcagatgctccacagactccttggtcatataaaaaacgtgccgctgatcctgaagcggatgaagctgtcacataccaaagtttctgattggcaggtgctgtataagacagtctattcagcactgggtctgagggatgcttgccggagcctgccacaaagtatccagctattccgagatatcgctcaggagtttagcgacgatctccaccacatagcctctctgattgggaaagtggtggactttgaaggctctctggcggagaacaggtttaccgtgctccccaacattgatccagaaattgacgagaaaaagagaagactgatgggcctgcctagttttttaacagaggtggctagaaaagagctggaaaacctggactcccgcattccttcttgcagcgtgatctacatacctctgattggatttttgttgtctattcctcgtctgccctcaatggtcgaggcctcggactttgaaatcaatggactagactttatgtttcttagcgaagaaaagctccactaccgcagtgccagaaccaaggagctcgatgcactgttgggggacctccattgcgaaatccgggaccaggaaaccctgctcatgtaccagttgcagtgtcaagtgcttgcgagggccgcagtccttacgagagtgttggatctcgcaagcaggttagacgttctcctggccctcgcttccgccgctcgagattacggttactctcggcctcgttattcgccgcaggtgctgggagtgagaattcagaacggcagacaccccctgatggaactgtgtgcgcgaacctttgtgccgaactcaaccgagtgcggaggagacaagggtcgtgttaaagtgataaccggtcccaactcatccggaaagtctatctatctgaagcaggtggggcttataacctttatggctttggtgggttctttcgttccggctgaggaggccgagattggggcagttgatgccatattcaccagaatccactcctgcgaaagtatttctctcggactgagcacatttatgattgacttgaaccagcaggtggcaaaagcagtgaacaacgccacagctcagtcactggttttaatcgacgaattcggtaagggcactaacaccgtcgacgggctggccctccttgccgctgttctgcggcattggttagcacgcggtcctacgtgtcctcatattttcgtggccactaattttctatcactggtacagctgcaattactgccccagggacctctagtgcaataccttactatggagacatgcgaggacggcaacgacctggtcttcttttaccaggtgtccgaccttatccgttcgggtaagcccatcaagccagtaaaagaccttcttaagaagaatcagatggagaattgccagactctcgtggataaatttatgaagttggaccttgaggatcccaacctggacttgaacgtatttatgagtcaggaggtccttcccgctgctaccagcattctttag

SEQ ID NO: 218824 - DNA, 2466 bp, Artificial Sequence
  derived and/or modified sequence
atggccagccttggcgctaatccacgccgtacacctcagggcccaagaccaggcgcagcgtcctctggcttcccttctcccgctccggtgcctgggcctcgcgaggccgaggaggaagaagtggaggaagaggaggaactggctgagattcacctatgtgtgctctggaattctggctacttaggtattgcgtactatgatacttctgattctacaatccatttcatgcccgacgcccctgaccacgagtccctgaagctgctgcaaagagttctcgatgagattaaccctcagtccgtggtgacttctgctaagcaggatgaaaatatgaccagatttttaggtaagcttgcctcccaggagcatagagagcccaagcgcccagaaatcatttttctcccatcagtggactttggcctggagatctcaaagcagagactactgtcagggaattattcttttattccagacgctatgacagctaccgaaaaaatactatttttaagctccattatcccatttgactgtcttttaactcctcctggcgatctccggtttacacctatcccacttcttattcccagccaggttagagccctagggggactgctaaagttcctgggtcgtcggcgtattggtgttgagctggaagactacaacgtcagtgtgcccatattggggttcaaaaagttcatgcttactcacctcgttaacattgaccaggatacttactctgtccttcaaatcttcaaaagtgaatcacatccttccgtgtacaaggtggcaagcggtttaaaggaaggactgtcacttttcgggatcttgaaccgatgtcactgcaaatggggagaaaagctactgaggctctggtttacaaggcccacccatgacctgggggagctgtcttcacggctcgacgtgatacagttctttctgctgcctcagaacctggacatggcgcaaatgctccacagattactgggccacattaaaaatgtcccgctgattcttaagaggatgaagcttagtcacactaaggtgtctgattggcaggtgctctacaagaccgtctacagcgccctgggtctcagagacgcctgtcggtctctgcctcagtcaatccaactgtttcgagacattgcccaggaattcagcgacgacctacaccatattgcctccctgatagggaaggtagtagattttgaggggtctctcgctgagaataggttcacagtgctcccaaatattgaccccgagattgatgagaaaaagcggagattgatggggctgccttccttccttactgaagtggcccgaaaggagctcgagaacttagatagtcggatcccctcatgttccgtcatttacatcccactcattggatttctcctgtctatccctcgcctgccgagtatggtggaagctagcgatttcgaaatcaacggactcgacttcatgttcctatcagaagagaaactgcattataggtctgctagaactaaggagctagacgctctcttgggtgatctgcactgcgagatccgggaccaggagaccctactgatgtaccaattacagtgccaggttcttgctagagctgcagtgctaacgcgggtcctcgacctcgcatccagactcgatgtgttgctggccctggcatctgccgctcgcgattatgggtatagccggcctaggtactccccgcaggtcctgggagttagaatccagaacgggagacacccactgatggagctgtgcgcaaggactttcgtcccgaactcgaccgagtgtggcggagacaaggggagagttaaggtaattactgggccaaacagtagcgggaagagtatctacctcaagcaggtgggtctaattacttttatggctcttgtgggctcatttgtccccgcagaagaagccgaaatcggcgcagttgacgccatatttaccaggatccacagctgcgaaagtatctccctcgggctgtccaccttcatgattgatctgaaccaggtagcaaaggctgtgaataacgccacagcccagagtttagttctaattgacgaatttggaaaaggaacaaacaccgtggacggcctcgctctcctggccgcagtgctcagacactggttagctcgtggccctacttgccctcatatttttgtggctacgaactttctttcgctggttcagctccagctgctgcctcagggcccactggtgcagtacctgaccatggagacctgcgaagatggtaatgacctggtctttttttaccaggtgtcggacctgatccggtcaggcaaacctatcaaaccagttaaggatctactcaaaaaaaaccagatggagaattgtcagaccctggttgataagttcatgaaattagatttggaggatcctaatctggatctgaatgttttcatgtcccaggaggtgcttcctgccgctacatccattctttag

SEQ ID NO: 218825 - DNA, 2469 bp, Artificial Sequence
  derived and/or modified sequence
atggccagcctgggcgccaaccccagaagaaccccccagggccccagacccggcgccgccagcagcggcttccccagccccgcccccgtgcccggccccagagaggccgaggaggaggaggtggaggaggaggaggagctggccgagatccacctgtgcgtgctgtggaacagcggctacctgggcatcgcctactacgacaccagcgacagcaccatccacttcatgcccgacgcccccgaccacgagagcctgaagctgctgcagagagtgctggacgagatcaacccccagagcgtggtgaccagcgccaagcaggacgagaacatgaccagattcctgggcaagctggccagccaggagcacagagagcccaagagacccgagatcatcttcctgcccagcgtggacttcggcctggagatcagcaagcagagactgctgagcggcaactacagcttcatccccgacgccatgaccgccaccgagaagatcctgttcctgagcagcatcatccccttcgactgcctgctgaccccccccggcgacctgagattcacccccatccccctgctgatccccagccaggtgagagccctgggcggcctgctgaagttcctgggcagaagaagaatcggcgtggagctggaggactacaacgtgagcgtgcccatcctgggcttcaagaagttcatgctgacccacctggtgaacatcgaccaggacacctacagcgtgctgcagatcttcaagagcgagagccaccccagcgtgtacaaggtggccagcggcctgaaggagggcctgagcctgttcggcatcctgaacagatgccactgcaagtggggcgagaagctgctgagactgtggttcaccagacccacccacgacctgggcgagctgagcagcagactggacgtgatccagttcttcctgctgccccagaacctggacatggcccagatgctgcacagactgctgggccacatcaagaacgtgcccctgatcctgaagagaatgaagctgagccacaccaaggtgagcgactggcaggtgctgtacaagaccgtgtacagcgccctgggcctgagagacgcctgcagaagcctgccccagagcatccagctgttcagagacatcgcccaggagttcagcgacgacctgcaccacatcgccagcctgatcggcaaggtggtggacttcgagggcagcctggccgagaacagattcaccgtgctgcccaacatcgaccccgagatcgacgagaagaagagaagactgatgggcctgcccagcttcctgaccgaggtggccagaaaggagctggagaacctggacagcagaatccccagctgcagcgtgatctacatccccctgatcggcttcctgctgagcatccccagactgcccagcatggtggaggccagcgacttcgagatcaacggcctggacttcatgttcctgagcgaggagaagctgcactacagaagcgccagaaccaaggagctggacgccctgctgggcgacctgcactgcgagatcagagaccaggagaccctgctgatgtaccagctgcagtgccaggtgctggccagagccgccgtgctgaccagagtgctggacctggccagcagactggacgtgctgctggccctggccagcgccgccagagactacggctacagcagacccagatacagcccccaggtgctgggcgtgagaatccagaacggcagacaccccctgatggagctgtgcgccagaaccttcgtgcccaacagcaccgagtgcggcggcgacaagggcagagtgaaggtgatcaccggccccaacagcagcggcaagagcatctacctgaagcaggtgggcctgatcaccttcatggccctggtgggcagcttcgtgcccgccgaggaggccgagatcggcgccgtggacgccatcttcaccagaatccacagctgcgagagcatcagcctgggcctgagcaccttcatgatcgacctgaaccagcaggtggccaaggccgtgaacaacgccaccgcccagagcctggtgctgatcgacgagttcggcaagggcaccaacaccgtggacggcctggccctgctggccgccgtgctgagacactggctggccagaggccccacctgcccccacatcttcgtggccaccaacttcctgagcctggtgcagctgcagctgctgccccagggccccctggtgcagtacctgaccatggagacctgcgaggacggcaacgacctggtgttcttctaccaggtgagcgacctgatcagaagcggcaagcccatcaagcccgtgaaggacctgctgaagaagaaccagatggagaactgccagaccctggtggacaagttcatgaagctggacctggaggaccccaacctggacctgaacgtgttcatgagccaggaggtgctgcccgccgccaccagcatcctgtag

SEQ ID NO: 218826 - DNA, 2466 bp, Artificial Sequence
  derived and/or modified sequence
atggccagcctgggcgccaaccccagaagaaccccccagggccccagacccggcgccgccagcagcggcttccccagccccgcccccgtgcccggccccagagaggccgaggaggaggaggtggaggaggaggaggagctggccgagatccacctgtgcgtgctgtggaacagcggctacctgggcatcgcctactacgacaccagcgacagcaccatccacttcatgcccgacgcccccgaccacgagagcctgaagctgctgcagagagtgctggacgagatcaacccccagagcgtggtgaccagcgccaagcaggacgagaacatgaccagattcctgggcaagctggccagccaggagcacagagagcccaagagacccgagatcatcttcctgcccagcgtggacttcggcctggagatcagcaagcagagactgctgagcggcaactacagcttcatccccgacgccatgaccgccaccgagaagatcctgttcctgagcagcatcatccccttcgactgcctgctgaccccccccggcgacctgagattcacccccatccccctgctgatccccagccaggtgagagccctgggcggcctgctgaagttcctgggcagaagaagaatcggcgtggagctggaggactacaacgtgagcgtgcccatcctgggcttcaagaagttcatgctgacccacctggtgaacatcgaccaggacacctacagcgtgctgcagatcttcaagagcgagagccaccccagcgtgtacaaggtggccagcggcctgaaggagggcctgagcctgttcggcatcctgaacagatgccactgcaagtggggcgagaagctgctgagactgtggttcaccagacccacccacgacctgggcgagctgagcagcagactggacgtgatccagttcttcctgctgccccagaacctggacatggcccagatgctgcacagactgctgggccacatcaagaacgtgcccctgatcctgaagagaatgaagctgagccacaccaaggtgagcgactggcaggtgctgtacaagaccgtgtacagcgccctgggcctgagagacgcctgcagaagcctgccccagagcatccagctgttcagagacatcgcccaggagttcagcgacgacctgcaccacatcgccagcctgatcggcaaggtggtggacttcgagggcagcctggccgagaacagattcaccgtgctgcccaacatcgaccccgagatcgacgagaagaagagaagactgatgggcctgcccagcttcctgaccgaggtggccagaaaggagctggagaacctggacagcagaatccccagctgcagcgtgatctacatccccctgatcggcttcctgctgagcatccccagactgcccagcatggtggaggccagcgacttcgagatcaacggcctggacttcatgttcctgagcgaggagaagctgcactacagaagcgccagaaccaaggagctggacgccctgctgggcgacctgcactgcgagatcagagaccaggagaccctgctgatgtaccagctgcagtgccaggtgctggccagagccgccgtgctgaccagagtgctggacctggccagcagactggacgtgctgctggccctggccagcgccgccagagactacggctacagcagacccagatacagcccccaggtgctgggcgtgagaatccagaacggcagacaccccctgatggagctgtgcgccagaaccttcgtgcccaacagcaccgagtgcggcggcgacaagggcagagtgaaggtgatcaccggccccaacagcagcggcaagagcatctacctgaagcaggtgggcctgatcaccttcatggccctggtgggcagcttcgtgcccgccgaggaggccgagatcggcgccgtggacgccatcttcaccagaatccacagctgcgagagcatcagcctgggcctgagcaccttcatgatcgacctgaaccaggtggccaaggccgtgaacaacgccaccgcccagagcctggtgctgatcgacgagttcggcaagggcaccaacaccgtggacggcctggccctgctggccgccgtgctgagacactggctggccagaggccccacctgcccccacatcttcgtggccaccaacttcctgagcctggtgcagctgcagctgctgccccagggccccctggtgcagtacctgaccatggagacctgcgaggacggcaacgacctggtgttcttctaccaggtgagcgacctgatcagaagcggcaagcccatcaagcccgtgaaggacctgctgaagaagaaccagatggagaactgccagaccctggtggacaagttcatgaagctggacctggaggaccccaacctggacctgaacgtgttcatgagccaggaggtgctgcccgccgccaccagcatcctgtag

SEQ ID NO: 218827 - DNA, 573 bp, Artificial Sequence
  derived and/or modified sequence
ggcagcttcgtgcccgccgaggaggccgagatcggcgccgtggacgccatcttcaccagaatccacagctgcgagagcatcagcctgggcctgagcaccttcatgatcgacctgaaccaggtggccaaggccgtgaacaacgccaccgcccagagcctggtgctgatcgacgagttcggcaagggcaccaacaccgtggacggcctggccctgctggccgccgtgctgagacactggctggccagaggccccacctgcccccacatcttcgtggccaccaacttcctgagcctggtgcagctgcagctgctgccccagggccccctggtgcagtacctgaccatggagacctgcgaggacggcaacgacctggtgttcttctaccaggtgagcgacctgatcagaagcggcaagcccatcaagcccgtgaaggacctgctgaagaagaaccagatggagaactgccagaccctggtggacaagttcatgaagctggacctggaggaccccaacctggacctgaacgtgttcatgagccaggaggtgctgcccgccgccaccagcatcctgtag

SEQ ID NO: 218828 - DNA, 1404 bp, Artificial Sequence
  derived and/or modified sequence
accgtgtacagcgccctgggcctgagagacgcctgcagaagcctgccccagagcatccagctgttcagagacatcgcccaggagttcagcgacgacctgcaccacatcgccagcctgatcggcaaggtggtggacttcgagggcagcctggccgagaacagattcaccgtgctgcccaacatcgaccccgagatcgacgagaagaagagaagactgatgggcctgcccagcttcctgaccgaggtggccagaaaggagctggagaacctggacagcagaatccccagctgcagcgtgatctacatccccctgatcggcttcctgctgagcatccccagactgcccagcatggtggaggccagcgacttcgagatcaacggcctggacttcatgttcctgagcgaggagaagctgcactacagaagcgccagaaccaaggagctggacgccctgctgggcgacctgcactgcgagatcagagaccaggagaccctgctgatgtaccagctgcagtgccaggtgctggccagagccgccgtgctgaccagagtgctggacctggccagcagactggacgtgctgctggccctggccagcgccgccagagactacggctacagcagacccagatacagcccccaggtgctgggcgtgagaatccagaacggcagacaccccctgatggagctgtgcgccagaaccttcgtgcccaacagcaccgagtgcggcggcgacaagggcagagtgaaggtgatcaccggccccaacagcagcggcaagagcatctacctgaagcaggtgggcctgatcaccttcatggccctggtgggcagcttcgtgcccgccgaggaggccgagatcggcgccgtggacgccatcttcaccagaatccacagctgcgagagcatcagcctgggcctgagcaccttcatgatcgacctgaaccagcaggtggccaaggccgtgaacaacgccaccgcccagagcctggtgctgatcgacgagttcggcaagggcaccaacaccgtggacggcctggccctgctggccgccgtgctgagacactggctggccagaggccccacctgcccccacatcttcgtggccaccaacttcctgagcctggtgcagctgcagctgctgccccagggccccctggtgcagtacctgaccatggagacctgcgaggacggcaacgacctggtgttcttctaccaggtgagcgacctgatcagaagcggcaagcccatcaagcccgtgaaggacctgctgaagaagaaccagatggagaactgccagaccctggtggacaagttcatgaagctggacctggaggaccccaacctggacctgaacgtgttcatgagccaggaggtgctgcccgccgccaccagcatcctgtag

SEQ ID NO: 218829 - DNA, 198 bp, Artificial Sequence
  derived and/or modified sequence
accgcccagagcctggtgctgatcgacgagttcggcaagggcaccaacaccgtggacggcctggccctgctggccgccgtgctgagacactggctggccagaggccccacctgcccccacatcttcgtggccaccaacttcctgagcctggtgcagctgcagctgctgccccagggccccctggtgcagtacctgtag

SEQ ID NO: 218830 - DNA, 348 bp, Artificial Sequence
  derived and/or modified sequence
atcgcccaggagttcagcgacgacctgcaccacatcgccagcctgatcggcaaggtggtggacttcgagggcagcctggccgagaacagattcaccgtgctgcccaacatcgaccccgagatcgacgagaagaagagaagactgatgggcctgcccagcttcctgaccgaggtggccagaaaggagctggagaacctggacagcagaatccccagctgcagcgtgatctacatccccctgatcggcttcctgctgagcatccccagactgcccagcatggtggaggccagcgacttcgagatcaacggcctggacttcatggtgagacccagcaccagcgtgagatag

SEQ ID NO: 218831 - DNA, 477 bp, Artificial Sequence
  derived and/or modified sequence
cacgagagcctgaagctgctgcagagagtgctggacgagatcaacccccagagcgtggtgaccagcgccaagcaggacgagaacatgaccagattcctgggcaagctggccagccaggagcacagagagcccaagagacccgagatcatcttcctgcccagcgtggacttcggcctggagatcagcaagcagagactgctgagcggcaactacagcttcatccccgacgccatgaccgccaccgagaagatcctgttcctgagcagcatcatccccttcgactgcctgctgaccatccccagccaggtgagagccctgggcggcctgctgaagttcctgggcagaagaagaatcggcgtggagctggaggactacaacgtgagcgtgcccatcctgggcttcaagaagttcatgctgacccacctggtgaacatcgaccaggacacctacagaaacccccagcagatgcccctgtag

SEQ ID NO: 218832 - DNA, 477 bp, Artificial Sequence
  derived and/or modified sequence
accgtgtacagcgccctgggcctgagagacgcctgcagaagcctgccccagagcatccagctgttcagagacatcgcccaggagttcagcgacgacctgcaccacatcgccagcctgatcggcaaggtgtacctgagcccccaggtggacttcgagggcagcctggccgagaacagattcaccgtgctgcccaacatcgaccccgagatcgacgagaagaagagaagactgatgggcctgcccagcttcctgaccgaggtggccagaaaggagctggagaacctggacagcagaatccccagctgcagcgtgatctacatccccctgatcggcttcctgctgagcatccccagactgcccagcatggtggaggccagcgacttcgagatcaacggcctggacttcatgttcctgagcgaggagaagctgcactacagaagcgccagaaccaaggagctggacgccctgctgggctag

SEQ ID NO: 218833 - DNA, 2238 bp, Artificial Sequence
  derived and/or modified sequence
atggccagcctgggcgccaaccccagaagaaccccccagggccccagacccggcgccgccagcagcggcttccccagccccgcccccgtgcccggccccagagaggccgaggaggaggaggtggaggaggaggaggagctggccgagatccacctgtgcgtgctgtggaacagcggctacctgggcatcgcctactacgacaccagcgacagcaccatccacttcatgcccgacgcccccgaccacgagagcctgaagctgctgcagagagtgctggacgagatcaacccccagagcgtggtgaccagcgccaagcaggacgagaacatgaccagattcctgggcaagctggccagccaggagcacagagagcccaagagacccgagatcatcttcctgcccagcgtggacttcggcctggagatcagcaagcagagactgctgagcggcaactacagcttcatccccgacgccatgaccgccaccgagaagatcctgttcctgagcagcatcatccccttcgactgcctgctgaccccccccggcgacctgagattcacccccatccccctgctgatccccagccaggtgagagccctgggcggcctgctgaagttcctgggcagaagaagaatcggcgtggagctggaggactacaacgtgagcgtgcccatcctgggcttcaagaagttcatgctgacccacctggtgaacatcgaccaggacacctacagcgtgctgcagatcttcaagagcgagagccaccccagcgtgtacaaggtggccagcggcctgaaggagggcctgagcctgttcggcatcctgaacagatgccactgcaagtggggcgagaagctgctgagactgtggttcaccagacccacccacgacctgggcgagctgagcagcagactggacgtgatccagttcttcctgctgccccagaacctggacatggcccagatgctgcacagactgctgggccacatcaagaacgtgcccctgatcctgaagagaatgaagctgagccacaccaaggtgagcgactggcaggtgctgtacaagaccgtgtacagcgccctgggcctgagagacgcctgcagaagcctgccccagagcatccagctgttcagagacatcgcccaggagttcagcgacgacctgcaccacatcgccagcctgatcggcaaggtggtggacttcgagggcagcctggccgagaacagattcaccgtgctgcccaacatcgaccccgagatcgacgagaagaagagaagactgatgggcctgcccagcttcctgaccgaggtggccagaaaggagctggagaacctggacagcagaatccccagctgcagcgtgatctacatccccctgatcggcttcctgctgagcatccccagactgcccagcatggtggaggccagcgacttcgagatcaacggcctggacttcatgttcctgagcgaggagaagctgcactacagaagcgccagaaccaaggagctggacgccctgctgggcgacctgcactgcgagatcagagaccaggagaccctgctgatgtaccagctgcagtgccaggtgctggccagagccgccgtgctgaccagagtgctggacctggccagcagactggacgtgctgctggccctggccagcgccgccagagactacggctacagcagacccagatacagcccccaggtgctgggcgtgagaatccagaacggcagacaccccctgatggagctgtgcgccagaaccttcgtgcccaacagcaccgagtgcggcggcgacaagggcagagtgaaggtgatcaccggccccaacagcagcggcaagagcatctacctgaagcaggtgggcctgatcaccttcatggccctggtgggcagcttcgtgcccgccgaggaggccgagatcggcgccgtggacgccatcttcaccagaatccacagctgcgagagcatcagcctgggcctgagcaccttcatgatcgacctgaaccagcaggtggccaaggccgtgaacaacgccaccgcccagagcctggtgctgatcgacgagttcggcaagggcaccaacaccgtggacggcctggccctgctggccgccgtgctgagacactggctggccagaggccccacctgcccccacatcttcgtggccaccaacttcctgagcctggtgcagctgcagctgctgccccagggccccctggtgcagtacctgtag

SEQ ID NO: 218834 - DNA, 1401 bp, Artificial Sequence
  derived and/or modified sequence
accgtgtacagcgccctgggcctgagagacgcctgcagaagcctgccccagagcatccagctgttcagagacatcgcccaggagttcagcgacgacctgcaccacatcgccagcctgatcggcaaggtggtggacttcgagggcagcctggccgagaacagattcaccgtgctgcccaacatcgaccccgagatcgacgagaagaagagaagactgatgggcctgcccagcttcctgaccgaggtggccagaaaggagctggagaacctggacagcagaatccccagctgcagcgtgatctacatccccctgatcggcttcctgctgagcatccccagactgcccagcatggtggaggccagcgacttcgagatcaacggcctggacttcatgttcctgagcgaggagaagctgcactacagaagcgccagaaccaaggagctggacgccctgctgggcgacctgcactgcgagatcagagaccaggagaccctgctgatgtaccagctgcagtgccaggtgctggccagagccgccgtgctgaccagagtgctggacctggccagcagactggacgtgctgctggccctggccagcgccgccagagactacggctacagcagacccagatacagcccccaggtgctgggcgtgagaatccagaacggcagacaccccctgatggagctgtgcgccagaaccttcgtgcccaacagcaccgagtgcggcggcgacaagggcagagtgaaggtgatcaccggccccaacagcagcggcaagagcatctacctgaagcaggtgggcctgatcaccttcatggccctggtgggcagcttcgtgcccgccgaggaggccgagatcggcgccgtggacgccatcttcaccagaatccacagctgcgagagcatcagcctgggcctgagcaccttcatgatcgacctgaaccaggtggccaaggccgtgaacaacgccaccgcccagagcctggtgctgatcgacgagttcggcaagggcaccaacaccgtggacggcctggccctgctggccgccgtgctgagacactggctggccagaggccccacctgcccccacatcttcgtggccaccaacttcctgagcctggtgcagctgcagctgctgccccagggccccctggtgcagtacctgaccatggagacctgcgaggacggcaacgacctggtgttcttctaccaggtgagcgacctgatcagaagcggcaagcccatcaagcccgtgaaggacctgctgaagaagaaccagatggagaactgccagaccctggtggacaagttcatgaagctggacctggaggaccccaacctggacctgaacgtgttcatgagccaggaggtgctgcccgccgccaccagcatcctgtag

SEQ ID NO: 218835 - DNA, 573 bp, Artificial Sequence
  derived and/or modified sequence
ggcagtttcgtgccagccgaagaggctgaaatcggggcagttgacgccatattcactcggatccatagctgtgagagcatttccctaggcctcagtaccttcatgatagacctgaatcaggtggcaaaagccgtgaacaatgctacggcccaatccctcgtacttatcgatgagttcggcaagggcactaatacagttgacggcctggctctgctggctgcagttctgagacactggttagctagaggccctacctgccctcacattttcgtagccactaactttctgagtctggttcagctgcagcttctgcctcagggtccccttgtccagtatctgacaatggagacatgcgaggacggcaatgatctcgtctttttctatcaggtaagcgacctaatccgctccggcaagcctatcaaaccagtgaaggacctcttgaagaagaatcagatggagaattgtcaaacactggtggataagttcatgaaactcgacttggaagatcccaacctcgatcttaatgtgttcatgtcgcaggaggttttgccagctgccacctctatcctgtag

SEQ ID NO: 218836 - DNA, 1404 bp, Artificial Sequence
  derived and/or modified sequence
acagtctattccgcacttggcttgcgtgacgcatgccgctcgctgcctcagtctatccagttgtttagagacattgcccaggagttctccgatgacctgcaccatatagcctcccttattggtaaagtggtcgatttcgagggtagcctcgctgaaaatcgattcactgtcctgcctaacatcgaccccgagattgacgagaaaaagaggagacttatgggcctgcctagtttcttgaccgaggtggcccggaaggagcttgagaatcttgatagtcgaattccctcgtgtagtgtgatttacattcccttgataggcttcctcttgtctatacctcgcctgccctctatggtagaggcatccgatttcgagatcaatggcctcgactttatgttcctgagtgaggaaaagctacactatagatccgcccgaacaaaggagctggatgccctgctgggcgacttgcactgcgagatccgcgaccaagagaccctgctgatgtatcagctgcagtgccaagttctcgccagagccgccgtgctgacccgcgtgctggacctggctagcagattggatgtgctgctggctctagcctcagctgcccgagattatggatatagccggccaaggtacagtcctcaagtactaggggtgcgcatccagaacggccggcatcctctgatggagctgtgcgccaggaccttcgtaccaaactctacggagtgcggcggcgacaaaggcagagtgaaggtgattacaggccccaactcctccggtaagagtatctatctcaagcaagtgggtcttattacctttatggcgctcgtcggatctttcgtgcccgccgaggaggcagagataggcgctgttgacgcaatctttacccgcatccattcatgcgaatcaatttctctcgggctctccacattcatgatcgacctaaaccagcaagttgccaaagctgtgaacaatgccactgcacagtcccttgtcctgatcgatgaattcggaaaggggacaaacactgtcgacggcttggctcttctggctgccgtgctcagacattggctggccaggggccctacatgcccccacatcttcgtggcaacaaacttcttaagcctagtccagctacaactgttgccccaaggcccattagtgcagtacctgacgatggaaacttgcgaagacggcaacgatttggtcttcttttaccaggtttcagacctgatccgctcgggcaaacccattaagcctgttaaagatttgctcaaaaagaatcagatggagaattgtcagaccctcgtggataaattcatgaaactggacctggaggatcccaatctggatctgaatgtgttcatgagtcaagaagttctgcccgcagcaacctcaattctatag

SEQ ID NO: 218837 - DNA, 198 bp, Artificial Sequence
  derived and/or modified sequence
accgctcagtcactcgtcctcatagacgaattcggcaagggtaccaataccgtagatggattggctcttttggcagctgtgctgaggcactggctcgcccggggacctacttgcccccacatctttgtcgcgacgaacttcctgagtcttgtgcagctgcagctactgccacaggggcctctggttcagtacctgtag

SEQ ID NO: 218838 - DNA, 348 bp, Artificial Sequence
  derived and/or modified sequence
attgctcaggaatttagtgatgacctgcaccatattgcttctttaattggcaaggtcgtcgatttcgaaggatctctggctgaaaataggttcacagtgttacctaacattgaccctgaaatagatgaaaaaaagcgccgcttgatggggctcccatctttccttaccgaagtggccagaaaggagctggaaaatctcgactcaaggatcccctcttgctctgttatttatatacccctcattggctttttgttgtccatccccaggttgcccagcatggttgaagcatctgatttcgagatcaacggtttggacttcatggtccggccatctacgtctgtgcgctag

SEQ ID NO: 218839 - DNA, 477 bp, Artificial Sequence
  derived and/or modified sequence
catgaatctctcaagctgctccaacgcgtgctggacgagatcaaccctcagagcgtcgtaacaagcgcaaaacaggatgagaacatgacacggttccttgggaagctggcatcccaggagcaccgcgaaccgaaacgccctgaaataatattccttccctccgtagactttggcctggaaatttcaaaacagagacttctcagcggcaactacagcttcattcctgacgctatgacagctaccgaaaagatactgtttctgtccagcatcattccatttgactgtctcctcacgatcccaagccaggtgcgagctttgggaggtcttctgaaatttctggggaggcgaaggataggggtagaattggaggattataatgtatctgtacccatcctgggtttcaaaaagttcatgctgacgcatctcgtgaacatcgaccaggacacatatagaaaccctcagcagatgcccctgtag

SEQ ID NO: 218840 - DNA, 477 bp, Artificial Sequence
  derived and/or modified sequence
acggtgtattccgctctaggtttgcgcgatgcctgtagatcgctcccgcagtccatacaactcttcagggatattgctcaggaattttctgatgacttgcatcacattgcctcccttattgggaaggtatacctgagtccacaggtggatttcgaaggctccttagccgagaaccggtttaccgtgctgccaaacatagaccctgagattgacgaaaagaaaaggcgactgatgggtcttccaagctttctgaccgaagtggcccggaaggaactggagaaccttgattctcgaatcccatcctgcagtgttatctatatccccttaatcggcttcctgctctctataccaaggctcccttctatggtagaagcctctgacttcgagattaatgggttggatttcatgttcctcagcgaagagaagttacattacaggtccgcccggactaaagaactggatgccctcctgggctag

SEQ ID NO: 218841 - DNA, 2238 bp, Artificial Sequence
  derived and/or modified sequence
atggcatctctaggcgccaaccctcgacggactccacaaggacctcgaccaggtgcagcctctagtggctttccctcccctgcccccgtacccggtcctcgggaggctgaagaggaggaagtcgaagaagaggaagaactggccgagatacacctgtgtgtgctgtggaattccggctatctgggcatcgcatattacgacacgagcgactccacgatccactttatgcctgacgcacccgatcacgagagcttaaaactgcttcaaagggtattagacgaaatcaacccacagagcgtagtaacctctgccaagcaagatgagaatatgacgaggtttctcggcaagttagctagtcaggagcaccgcgagcccaaacgcccagaaatcatctttcttccatcagtggattttggcttagaaatatcgaagcagcggctcctctccggaaattattcttttatccctgacgctatgaccgccacggagaaaatcctgtttctttcatccataataccttttgactgtttgctgacaccccctggtgatctgcgctttacacctatcccactgctgattccctcacaagttagagccctgggtgggctcctcaagttcctcggaaggaggaggataggcgtcgagctagaggactacaacgtgagtgtgccgattcttggattcaaaaaatttatgttgacccatctcgtgaacattgatcaagatacctactcggtgctgcagatcttcaagagtgaatcccacccaagcgtgtacaaagtagccagtggactaaaggagggcctgtccctgtttgggattctgaatagatgtcattgcaagtggggcgaaaaactcctgcgcctgtggttcacgcgaccgacccatgacttgggtgagctctccagcagactagatgttatccaattcttcctgctcccacagaatttggatatggctcagatgcttcatcgcctgctcgggcatatcaaaaatgtgcccctgattttaaagcggatgaagctttcacatacaaaggtttcagattggcaggttctctacaagactgtgtattcagccctcggtcttagggatgcgtgcaggagtcttccccagagcatccagttgttcagggacattgcccaggaattttcagacgacctacatcacatcgcttcgctgattgggaaagtggtggatttcgagggctctctcgctgaaaaccgtttcactgtcctcccaaacattgatcccgaaatcgacgagaagaagagacgtctgatgggtctgccctcgtttcttaccgaagtcgcgcgaaaagaattggaaaatctcgactctagaatcccatcctgctccgtcatctatatccccctgatcggatttctgctgagcatccccaggttaccatcaatggtagaggcttccgatttcgaaattaatggcctggacttcatgttcttgtccgaagagaagctacactatcggtctgccagaacgaaggagctggatgcgttgctgggggatctccactgcgaaatcagggatcaggagacactgctgatgtaccagctgcagtgtcaagtccttgcgcgtgccgcggtgttaacgcgcgtccttgatctggcatcacggctggacgtgctgctcgccttggcttccgctgcacgtgactatggttacagtcggccccgatatagcccgcaagtgctgggcgtccgtattcagaatggtcgccatcccctgatggaattatgcgcacgcacctttgtgccaaattcaaccgaatgtggtggggacaagggtcgcgttaaagttataacaggccctaattcatccggcaaaagtatttacctgaaacaggtcggcctcatcacctttatggccttagttgggagttttgttcctgccgaagaagccgagattggcgcagtcgatgcgatctttacacggattcactcttgcgaatcaatttctctggggctctccacctttatgatcgacctgaaccagcaggtagctaaggccgtcaataacgcgaccgcacagagcctggtcttgatagatgaattcggtaaggggacaaatacggtggatgggctagctctgctggccgcggtcctgagacattggttggcaagaggacccacttgcccgcatatctttgtggcaacgaatttcttatctctggtccagttgcaactgcttccccagggcccactggtgcaatatctgtag

SEQ ID NO: 218842 - DNA, 1401 bp, Artificial Sequence
  derived and/or modified sequence
actgtctattcagcccttggactgagagatgcttgcagaagcctgccgcagagcattcaattgtttcgcgacattgctcaagaatttagcgacgacctgcatcacatcgccagtctgatagggaaagtggttgattttgaagggtcactcgccgaaaataggttcacagttctgccaaatatagatccggagattgatgagaagaagcgacgcctgatgggtttgccttcattcctgaccgaagtggcacgcaaggagcttgagaatcttgattccagaattccgtcttgttccgtaatttatatcccacttatcggcttcctgttgtccataccacgacttccatcaatggtggaagctagcgactttgagataaacggcctggactttatgttcctatctgaggagaagctgcactaccgttctgctcggaccaaggagctggacgctctgctaggagatttacactgcgagattagagaccaagaaacactgttaatgtaccagctacagtgccaagtcttggctagagccgctgttctaacacgggtgcttgacctggcctcacggctggacgtgctgttggccttagcatccgctgcccgtgactacgggtactcaagacccaggtattcacctcaggtcctaggggtgcgaattcagaacggacgccaccctctaatggaattgtgcgccaggacatttgttccaaattctactgagtgtgggggtgacaaaggcagagtcaaagtgataaccggacctaatagctccggtaaatctatttacttgaagcaggtcggactgattactttcatggcactggtgggttctttcgttcctgccgaagaggccgagataggagcagtggacgctatctttacccgcatccactcctgcgaaagcattagcctcgggctgagcaccttcatgatcgatctgaaccaagtggctaaagccgttaataatgcaactgcccagtctctggtgctgatagatgagtttggcaagggaactaacactgttgatggcctggcactgttggcagctgttctcagacattggctagccagaggccccacttgtcctcacattttcgtagccactaacttcctcagccttgtccaactccagctcctgccccaggggcccctggtccagtatctgaccatggagacctgcgaggatgggaatgatctggtgttcttttaccaggtgagcgatctcattcggtcgggaaagccaattaaaccagtcaaagatctattaaagaaaaaccagatggaaaattgccagaccttggtcgacaaattcatgaagctagaccttgaagaccctaatcttgacctgaatgtgttcatgagccaggaggtgcttcctgctgccacaagcatcctatag

SEQ ID NO: 218843 - DNA, 573 bp, Artificial Sequence
  derived and/or modified sequence
ggcagctttgtgcctgctgaggaggccgagattggagctgtggatgccatcttcacccgcatccacagctgtgagagcatcagcctgggcctgagcaccttcatgattgacctgaaccaggtggccaaggctgtgaacaatgccacagcccagagcctggtgctgattgatgaatttgggaagggcaccaacacagtggatggcctggccctgctggccgctgtgctgcggcactggctggcccggggccccacctgcccccacatctttgtggccaccaacttcctgagcctggtgcagctgcagctgctgccccagggccccctggtgcagtacctgaccatggagacctgtgaagatggaaatgacctggtgttcttctaccaggtgtctgacctgatccgcagcggcaagcccatcaagcctgtgaaggacctgctgaagaagaaccagatggagaactgccagaccctggtggacaagttcatgaagctggacctggaggaccccaacctggacctgaatgtgttcatgagccaggaggtgctgcctgctgccaccagcatcctgtag

SEQ ID NO: 218844 - DNA, 1404 bp, Artificial Sequence
  derived and/or modified sequence
actgtgtacagcgccctgggcctgagagatgcctgccgcagcctgccccagagcatccagctgttccgggacatcgcccaggagttcagtgatgacctgcaccacatcgccagcctcatcggcaaggtggtggactttgagggcagcctggccgagaaccgcttcaccgtgctgcccaacattgatcctgagattgatgagaagaagaggcggctgatgggcctgcccagcttcctgacagaggtggccaggaaggagctggagaacctggacagccgcatccccagctgcagcgtcatctacatccccctgattggcttcctgctgagcatcccccggctgcccagcatggtggaggccagtgactttgagatcaatggcctggacttcatgttcctgtctgaggagaagctgcactaccgcagcgcccggaccaaggagctggatgccctgctgggggacctgcactgtgagatccgggaccaggagaccctgctgatgtaccagctgcagtgccaggtgctggcccgggctgctgtgctgaccagggtgctggacctggccagccggctggatgtgctgctggccctggccagcgctgcccgggactatggctacagccggccccgctacagcccccaggtgctgggcgtgcgcatccagaatggccgccaccccctgatggagctgtgtgcccggacctttgtgcccaacagcacagaatgtggcggggacaagggccgggtgaaggtgatcaccggccccaacagcagcggcaagagcatctacctgaagcaggtgggcctcatcaccttcatggccctggtgggcagctttgtgcctgctgaggaggccgagattggagctgtggatgccatcttcacccgcatccacagctgtgagagcatcagcctgggcctgagcaccttcatgattgacctgaaccagcaggtggccaaggctgtgaacaatgccacagcccagagcctggtgctgattgatgaatttgggaagggcaccaacacagtggatggcctggccctgctggccgctgtgctgcggcactggctggcccggggccccacctgcccccacatctttgtggccaccaacttcctgagcctggtgcagctgcagctgctgccccagggccccctggtgcagtacctgaccatggagacctgtgaagatggaaatgacctggtgttcttctaccaggtgtctgacctgatccgcagcggcaagcccatcaagcctgtgaaggacctgctgaagaagaaccagatggagaactgccagaccctggtggacaagttcatgaagctggacctggaggaccccaacctggacctgaatgtgttcatgagccaggaggtgctgcctgctgccaccagcatcctgtag

SEQ ID NO: 218845 - DNA, 198 bp, Artificial Sequence
  derived and/or modified sequence
acagcccagagcctggtgctgattgatgaatttgggaagggcaccaacacagtggatggcctggccctgctggccgctgtgctgcggcactggctggcccggggccccacctgcccccacatctttgtggccaccaacttcctgagcctggtgcagctgcagctgctgccccagggccccctggtgcagtacctgtag

SEQ ID NO: 218846 - DNA, 348 bp, Artificial Sequence
  derived and/or modified sequence
attgcccaggagttcagtgatgacctgcaccacatcgccagcctcatcggcaaggtggtggactttgagggcagcctggccgagaaccgcttcaccgtgctgcccaacattgatcctgagattgatgagaagaagaggcggctgatgggcctgcccagcttcctgacagaggtggccaggaaggagctggagaacctggacagccgcatccccagctgcagcgtcatctacatccccctgattggcttcctgctgagcatcccccggctgcccagcatggtggaggccagtgactttgagatcaatggcctggacttcatggtgcggcccagcacctctgtgaggtag

SEQ ID NO: 218847 - DNA, 477 bp, Artificial Sequence
  derived and/or modified sequence
catgagagcctgaagctgctgcagagggtgctggatgagatcaacccccagagcgtggtgaccagcgccaagcaggatgagaacatgacccgcttcctgggcaagctggccagccaggagcaccgggagcccaagaggcctgagatcatcttcctgcccagcgtggactttggcctggagatcagcaagcagaggctgctgagcggcaactacagcttcatcccagatgccatgacagccacagagaagatcctcttcctgagcagcatcatcccctttgactgcctgctgaccatccccagccaggtgcgggccctgggcggcctgctgaagttcctgggcagaagacgcatcggcgtggagctggaggactacaacgtgtctgtgcccatcctgggcttcaagaagttcatgctgacccacctggtgaacatcgaccaggacacctacagaaacccccagcagatgcccctgtag

SEQ ID NO: 218848 - DNA, 477 bp, Artificial Sequence
  derived and/or modified sequence
actgtgtacagcgccctgggcctgagagatgcctgccgcagcctgccccagagcatccagctgttccgggacatcgcccaggagttcagtgatgacctgcaccacatcgccagcctcatcggcaaggtgtacctgagcccccaggtggactttgagggcagcctggctgaaaatcgcttcaccgtgctgcccaacatcgaccctgagattgatgagaagaagaggcggctgatgggcctgcccagcttcctgacagaggtggccaggaaggagctggagaacctggacagccgcatccccagctgcagcgtcatctacatccccctcatcggcttcctgctgagcatcccccggctgcccagcatggtggaggccagtgactttgagatcaatggcctggacttcatgttcctgtctgaggagaagctgcactacagaagtgcccggaccaaggagctggatgccctgctgggctag

SEQ ID NO: 218849 - DNA, 2238 bp, Artificial Sequence
  derived and/or modified sequence
atggccagcctgggcgccaaccccaggaggaccccccagggccccaggcctggagctgccagcagcggcttccccagccctgcccctgtgcccggcccccgggaggccgaggaggaggaggtggaggaggaggaggagctggccgagatccacctgtgtgtgctgtggaacagcggctacctgggcatcgcctactatgacaccagtgacagcaccatccacttcatgccagatgccccagaccacgagagcctgaagctgctgcagagggtgctggatgagatcaacccccagagcgtggtgaccagcgccaagcaggatgagaacatgacccgcttcctgggcaagctggccagccaggagcaccgggagcccaagaggcctgagatcatcttcctgcccagcgtggactttggcctggagatcagcaagcagaggctgctgagcggcaactacagcttcatcccagatgccatgacagccacagagaagatcctcttcctgagcagcatcatcccctttgactgcctgctgaccccacctggggacctgcgcttcacccccatccccctgctgatccccagccaggtgcgggccctgggcggcctgctgaagttcctgggcagaagacgcatcggcgtggagctggaggactacaacgtgtctgtgcccatcctgggcttcaagaagttcatgctgacccacctggtgaacatcgaccaggacacctacagcgtgctgcagatcttcaagtctgagagccaccccagcgtgtacaaggtggccagcggcctgaaggagggcctgagcctgtttggcatcctgaaccgctgccactgcaagtggggcgagaagctgctgcggctgtggttcacccggcccacccatgacctgggggagctgagcagccggctggatgtgatccagttcttcctgctgccccagaacctggacatggcccagatgctgcaccggctgctgggccacatcaagaatgtgcccctcatcctgaagaggatgaagctgagccacaccaaggtgtctgactggcaggtgctgtacaagacagtgtacagcgccctgggcctgagagatgcctgccgcagcctgccccagagcatccagctgttccgggacatcgcccaggagttcagtgatgacctgcaccacatcgccagcctgattggcaaggtggtggactttgagggcagcctggctgaaaatcgcttcaccgtgctgcccaacatcgaccctgagattgatgagaagaagaggcggctgatgggcctgcccagcttcctgacagaggtggccaggaaggagctggagaacctggacagccgcatccccagctgcagcgtcatctacatccccctcatcggcttcctgctgagcatcccccggctgcccagcatggtggaggccagtgactttgagatcaatggcctggacttcatgttcctgtctgaggagaagctgcactacagaagtgcccggaccaaggagctggatgccctgctgggggacctgcactgtgagatccgggaccaggagaccctgctgatgtaccagctgcagtgccaggtgctggcccgggctgctgtgctgaccagggtgctggacctggccagccggctggatgtgctgctggccctggccagcgctgcccgggactatggctacagccggccccgctacagcccccaggtgctgggcgtgcgcatccagaatggccgccaccccctgatggagctgtgtgcccggacctttgtgcccaacagcacagaatgtggcggggacaagggccgggtgaaggtgatcaccggccccaacagcagcggcaagagcatctacctgaagcaggtgggcctcatcaccttcatggccctggtgggcagctttgtgcctgctgaggaggccgagatcggggctgtggatgccatcttcacccgcatccacagctgtgagagcatcagcctgggcctgagcaccttcatgattgacctgaaccagcaggtggccaaggctgtgaacaatgccacagcccagagcctggtgctgattgatgaatttgggaagggcaccaacacagtggatggcctggccctgctggccgctgtgctgcggcactggctggcccggggccccacctgcccccacatctttgtggccaccaacttcctgagcctggtgcagctgcagctgctgccccagggccccctggtgcagtacctgtag

SEQ ID NO: 218850 - DNA, 1401 bp, Artificial Sequence
  derived and/or modified sequence
actgtgtacagcgccctgggcctgagagatgcctgccgcagcctgccccagagcatccagctgttccgggacatcgcccaggagttcagtgatgacctgcaccacatcgccagcctcatcggcaaggtggtggactttgagggcagcctggccgagaaccgcttcaccgtgctgcccaacattgatcctgagattgatgagaagaagaggcggctgatgggcctgcccagcttcctgacagaggtggccaggaaggagctggagaacctggacagccgcatccccagctgcagcgtcatctacatccccctgattggcttcctgctgagcatcccccggctgcccagcatggtggaggccagtgactttgagatcaatggcctggacttcatgttcctgtctgaggagaagctgcactaccgcagcgcccggaccaaggagctggatgccctgctgggggacctgcactgtgagatccgggaccaggagaccctgctgatgtaccagctgcagtgccaggtgctggcccgggctgctgtgctgaccagggtgctggacctggccagccggctggatgtgctgctggccctggccagcgctgcccgggactatggctacagccggccccgctacagcccccaggtgctgggcgtgcgcatccagaatggccgccaccccctgatggagctgtgtgcccggacctttgtgcccaacagcacagaatgtggcggggacaagggccgggtgaaggtgatcaccggccccaacagcagcggcaagagcatctacctgaagcaggtgggcctcatcaccttcatggccctggtgggcagctttgtgcctgctgaggaggccgagattggagctgtggatgccatcttcacccgcatccacagctgtgagagcatcagcctgggcctgagcaccttcatgattgacctgaaccaggtggccaaggctgtgaacaatgccacagcccagagcctggtgctgattgatgaatttgggaagggcaccaacacagtggatggcctggccctgctggccgctgtgctgcggcactggctggcccggggccccacctgcccccacatctttgtggccaccaacttcctgagcctggtgcagctgcagctgctgccccagggccccctggtgcagtacctgaccatggagacctgtgaagatggaaatgacctggtgttcttctaccaggtgtctgacctgatccgcagcggcaagcccatcaagcctgtgaaggacctgctgaagaagaaccagatggagaactgccagaccctggtggacaagttcatgaagctggacctggaggaccccaacctggacctgaatgtgttcatgagccaggaggtgctgcctgctgccaccagcatcctgtag

SEQ ID NO: 218851 - DNA, 573 bp, Artificial Sequence
  derived and/or modified sequence
ggcagcttcgtgcccgccgaggaggccgagatcggcgccgtggacgctatcttcacccggatccatagctgcgagagtatttcactgggcctaagcactttcatgatagacttgaaccaagtggcaaaggccgttaataacgccactgcccaaagcctggtgctgattgatgagtttggtaaggggaccaataccgttgacggactggcactgctggccgctgttctgcgccactggcttgcaagaggccccacttgcccacatatttttgtggccacaaattttctgagcctagtgcagctgcaactgctgccccagggtcccttggtgcagtatctgaccatggagacatgtgaagatggtaatgatcttgtgtttttctatcaggtcagtgacctgatcagaagtgggaaacccattaaaccagttaaagacttgcttaaaaagaatcaaatggaaaattgccagaccctcgtcgacaagttcatgaagttggatttagaggaccccaacctggatttgaatgtgttcatgtcgcaagaagtgctcccggcagccacttccatactgtag

SEQ ID NO: 218852 - DNA, 1404 bp, Artificial Sequence
  derived and/or modified sequence
accgtgtacagcgccctgggcctgcgggacgcctgccggagcctgccccaatccatccagttattccgtgacattgcgcaggagttctcagatgacctgcaccacattgcatctctgatcggtaaagtcgtggacttcgagggttctttagccgagaaccgatttacagtattgcctaacattgaccctgagatcgacgagaaaaagcgacggctaatgggcctgccctcattcctgacagaagtggcccggaaggagctcgagaacctagattcacgtatcccaagttgcagtgtcatttatatccctctgataggcttccttctgagtataccaagactcccctccatggtggaggcatcagatttcgaaatcaacggtttggactttatgtttctttccgaggaaaaactgcattacagatcagctcggacaaaagaattagatgcactgctcggcgacctgcactgtgagattcgtgatcaggagaccttgctgatgtatcagttgcaatgtcaggtgttagctagggccgccgtattgactagggtactggacctcgcctcgcggctggacgtgttgctggccctggcctcagcggctagggattatgggtattccaggccccgctacagcccacaggtcctgggcgtacggatccagaacggcaggcacccccttatggaattgtgtgcccgtacattcgtgcccaacagcacagagtgcggaggagacaaggggagggtaaaagtgattactggcccgaactcaagcggaaaatccatctacctcaaacaggtaggacttatcacatttatggcgttagttggctcttttgtgcccgccgaggaggccgaaattggggccgttgacgccatctttacaaggatacattcttgtgagtccatctctctcgggctgagcaccttcatgattgacttaaaccagcaggtagcaaaggcggtgaataacgccactgcccagagcctcgtgctgatcgatgagttcggcaaaggaactaataccgtggacgggctcgccctgctggccgccgtgcttcgacactggcttgctagaggcccgacctgtcctcatatcttcgtggctactaatttcctgtctttggtgcagctccagctgctgccccaggggcccttggtccaatacctaaccatggaaacatgtgaagacgggaacgacctcgtgttcttttaccaggtctcagacctcatcaggtccgggaaaccaattaagccagtgaaagatcttcttaagaaaaaccagatggagaattgccagaccctggtggacaagttcatgaagctagacctagaggatccaaaccttgatttgaatgtgtttatgtcccaggaagtcctgcctgcggccacaagtatcttatag

SEQ ID NO: 218853 - DNA, 198 bp, Artificial Sequence
  derived and/or modified sequence
accgcccagagcctggtgctgatcgacgagttcggcaagggcaccaacactgttgacggtttggcattgctcgccgctgtgttgagacactggctggcccgcggcccaacctgtcctcacatttttgtggccaccaattttctatctctcgtgcagctgcagttgctgccccagggacccttagtgcagtatctatag

SEQ ID NO: 218854 - DNA, 348 bp, Artificial Sequence
  derived and/or modified sequence
atcgcccaggagttcagcgacgacctgcaccacatcgccagcctgattgggaaggttgtcgattttgaggggagcctcgctgagaatagatttaccgtcctgccaaatattgaccctgagattgatgaaaagaaaaggaggttgatgggtctgccaagttttctcaccgaagtggcccgaaaggagttggagaacctggactccagaatacctagctgcagtgtgatttatattcccctgattggctttttgctcagtatacctcgacttcccagcatggtagaagccagtgattttgagataaatgggcttgacttcatggttcgcccaagtacttctgtaagatag

SEQ ID NO: 218855 - DNA, 477 bp, Artificial Sequence
  derived and/or modified sequence
cacgagagcctgaagctgctgcagcgggtgctggacgagatcaacccccagtcagttgtcacgtccgccaaacaggacgaaaacatgactcgctttcttggcaaacttgcatcccaggagcacagagagcccaaaaggccagaaattattttccttccctcagtcgactttggtcttgaaatcagcaaacagcgcctcttgtccgggaattactcttttattcctgacgccatgacagctactgagaaaatactttttctgtcttcgattattccatttgactgtctgcttaccattcctagccaggtcagagcactgggtggcctgctcaagtttctggggaggagacgcattggcgtggaacttgaagattataatgttagcgtgcccatcctgggattcaaaaaattcatgttgacacatctcgtaaatattgatcaagacacctatcggaatcctcagcaaatgcctctctag

SEQ ID NO: 218856 - DNA, 477 bp, Artificial Sequence
  derived and/or modified sequence
accgtgtacagcgccctgggcctgcgggacgcctgccggagcctgcctcagagcatccagctgtttcgcgatatcgcacaggaattctctgacgacctgcatcacatagctagtctcattgggaaggtgtacctgtcccctcaggtagattttgaaggtagtctggcagaaaacaggtttaccgttcttcccaacatcgaccccgaaatcgatgaaaaaaagagacggctgatgggtctaccttcctttctgacggaagttgcacggaaggagctcgagaacctggatagtcggattcccagctgtagtgtaatatacatccctctgataggatttctgctgtctatccccaggctccctagcatggtggaggcttctgattttgagattaatggattggactttatgttcttgtccgaagagaaactgcattaccgcagcgctcggactaaagaactggacgcacttctggggtag

SEQ ID NO: 218857 - DNA, 2238 bp, Artificial Sequence
  derived and/or modified sequence
atggccagcctgggcgccaacccccggcggaccccccagggcccccgtcctggcgctgcttcaagtggatttccctcccctgctccagtgcctggcccccgggaggccgaggaagaggaggtcgaggaggaggaagagcttgccgaaatccatctttgtgtgctctggaactcagggtatcttgggatagcctactatgacacatcggacagtactatccattttatgcccgacgcccccgatcatgagtctctcaaactactgcagcgagtacttgatgaaattaatccacagagtgtcgtgaccagcgccaaacaagacgaaaatatgacaagatttctaggtaagctggcctcacaggagcatcgcgagcccaaacgacctgagatcatcttcttgccatccgttgacttcggtcttgagatcagtaaacagcgtctgctcagcggtaactactcatttattcccgacgccatgacagctacagagaagatccttttcctaagttctattatcccattcgattgcttacttacacctcccggtgacctgagatttaccccaattcctctgctgatcccctctcaggtgcgcgctctcggcggtcttctcaagtttttgggacgccgacgcattggcgtggaactggaggactataatgtgtctgtgccgattctgggcttcaaaaagtttatgctgacccatcttgtgaatattgaccaggatacatatagcgtgctccagatctttaagtcagagagtcatccatctgtatacaaagtggcctccgggctcaaagaaggcctgagtttgttcggaatcctgaacagatgtcattgcaaatggggggaaaaactactgaggttgtggttcactagacctactcacgatctgggagaattgagctcccgcttagatgtgattcagttttttcttctgccacagaacctggatatggcacagatgctgcacagattactgggccatatcaaaaatgttcccctgatcctgaaaaggatgaaattatcccacaccaaggtgtcagattggcaggtactatacaagacagtgtacagcgcccttggtctgcgagatgcctgccggagcctcccacaaagcattcagctgttccgcgatatcgctcaggagttctccgatgatttgcatcacatcgcttcactcattggcaaggtcgtggacttcgagggctctctggccgaaaacagatttacagtgctgcccaacatcgacccagaaattgacgaaaagaaacgtcgtctaatggggctgcctagttttctgacagaagtggcccgtaaagaattagagaatcttgattccaggataccatcctgcagcgtcatttacatcccactgattggcttcctgctctccataccacgtctgccgtcaatggtggaagcttcggattttgaaataaacggcctggacttcatgttcctgagcgaagagaaactacattatcgctctgcccgcacaaaagagttggacgctttgttgggtgatcttcactgtgaaataagagaccaagagactttgctgatgtatcagcttcagtgtcaagtattggccagagccgcagtcctgactcgtgtgctggatcttgcctcacgcttggacgtgcttctcgctctggcaagtgctgctcgcgactacgggtacagtcggcctcgatatagcccgcaggttctcggggtgaggattcagaatggaagacatccactcatggagctgtgcgctagaacatttgtaccaaattccacagaatgtggaggcgacaaaggcagagtcaaggtgatcaccgggcccaacagcagcggcaagtctatttacctcaagcaggttggcctgattaccttcatggctcttgttggctcctttgttccagccgaagaagctgagatcggagccgtcgatgctatcttcacccgtattcacagctgcgagagcattagcttagggctcagcaccttcatgattgatctgaatcagcaagttgctaaggccgtgaataatgcaactgcccaatcactggttctgatcgacgaattcgggaagggtacaaataccgtcgatggcctggctttgctggcagctgtgctgcggcactggctggctagaggccctacgtgccctcacattttcgtggctactaactttttgtcactagtgcagctgcagctcctgccccaaggacccctggtccagtacctgtag

SEQ ID NO: 218858 - DNA, 1401 bp, Artificial Sequence
  derived and/or modified sequence
accgtgtacagcgccctgggcctgcgggacgcctgccggagcctgccacagagcattcagctgtttagggatatcgcgcaggaattctccgatgatctacaccacattgcctccctcataggcaaagtcgttgattttgaagggagcttagccgagaaccggttcacagttttgcccaacatcgaccctgaaatagacgagaagaagagacgcctgatgggccttccgtcatttttaacggaggtagcacggaaggagcttgaaaatctggacagtaggattccctcctgttccgtgatctatatacctctgattggctttctgttgtcaatcccacggctgccgagtatggtggaggcctctgatttcgaaataaatggactcgacttcatgtttctttctgaggaaaagctgcattaccgctccgccagaaccaaggagcttgacgctctgctaggagacctccactgtgagattcgggaccaagagacccttctgatgtaccagctccagtgtcaagtgttggcgagagctgctgtgctgacccgggtgctagacctggcttcccggctggatgttttgctcgctttggcatcggctgctagggactatggatatagccggcctcgatattctccacaagttcttggagtacgaattcagaacggccgccaccctctgatggaactgtgtgctcgcaccttcgttccgaactcaaccgaatgtggaggcgacaagggcagagtgaaagtgatcaccggacccaattcttctggaaagtccatctatctgaagcaggtgggactcatcacctttatggctctggtggggagtttcgtaccagccgaggaggcagagattggtgccgtggacgcaatattcacacggatccacagttgcgagtcaatcagcctcggcctctctacatttatgatagatctcaaccaggtggccaaggccgtgaacaacgccaccgctcaatccctagtgctcatcgacgagtttggtaagggaactaatacagtggacggcctagccttgctagccgccgtgctgagacactggttggctcggggcccaacgtgcccacatatatttgtggccaccaatttcctttctcttgttcagctccagttgctgccacagggacccctcgtccagtatctgacaatggaaacatgcgaggacgggaacgatctggtgttcttttatcaggtcagcgacctcatacgcagtggtaaacccataaagcccgttaaagatctcctgaaaaagaaccagatggagaattgccaaacactcgtcgacaagtttatgaaattagacctggaagaccctaatctcgacctgaatgtgtttatgtcacaggaggtgttgcccgccgccacaagtatactgtag

SEQ ID NO: 218859 - DNA, 706 bp, Artificial Sequence
  derived and/or modified sequence
ggcagctttgtgccagcagaggaggccgaaattggggcagtagacgccatcttcacacgaattcatagctgcgaatccatctcccttggcctctccaccttcatgatcgacctcaaccaggtggcgaaagcagtgaacaatgccactgcacagtcgctggtccttattgatgaatttggaaagggaaccaacacggtggatgggctcgcgcttctggccgctgtgctccgacactggctggcacgtggacccacatgcccccacatctttgtggccaccaactttctgagccttgttcagctacaactgctgccacaagggcccctggtgcagtatttgaccatggagacctgtgaggatggcaacgatcttgtcttcttctatcaggtctcagacttgatccgcagtggaaaacccatcaagcctgtcaaggatttgctaaagaagaaccaaatggaaaattgccagacattagtggataagtttatgaaactggatttggaagatcctaacctggacttgaacgttttcatgagccaggaagtgctgcctgctgccaccagcatcctctgagagtccttccagtgtcctccccagcctcctgagactccgagccatggggagccagggctctggcggggtgcccttggtgcaggctccctacacagtcctgctgctgccgctggggacaagccgccaagaccca

SEQ ID NO: 218860 - DNA, 1549 bp, Artificial Sequence
  derived and/or modified sequence
actgtgtacagtgccctgggcctgagggatgcctgccgctccctgccgcagtccatccagctctttcgggacattgcccaagagttctctgatgacctgcaccatatcgccagcctcattgggaaagtagtggactttgagggcagccttgctgaaaatcgcttcacagtcctccccaacatagatcctgaaattgatgagaaaaagcgaagactgatgggacttcccagtttccttactgaggttgcccgcaaggagctggagaatctggactcccgtattccttcatgcagtgtcatctacatccctctgattggcttccttctttctattccccgcctgccttccatggtagaggccagtgactttgagattaatggactggacttcatgtttctctcagaggagaagctgcactatcgtagtgcccgaaccaaggagctggatgcattgctgggggacctgcactgcgagatccgggaccaggagacgctgctgatgtaccagctacagtgccaggtgctggcacgagcagctgtcttaacccgagtattggaccttgcctcccgcctggacgtcctgctggctcttgccagtgctgcccgggactatggctactcaaggccgcgttactccccacaagtccttggggtacgaatccagaatggcagacatcctctgatggaactctgtgcccgaacctttgtgcccaactccacagaatgtggtggggacaaagggagggtcaaagtcatcactggacccaactcatcagggaagagcatatacctcaaacaggtaggcttgatcacattcatggccctggtaggcagctttgtgccagcagaggaggccgaaattggggcagtagacgccatcttcacacgaattcatagctgcgaatccatctcccttggcctctccaccttcatgatcgacctcaaccagcaggtggcgaaagcagtgaacaatgccactgcacagtcgctggtccttattgatgaatttggaaagggaaccaacacggtggatgggctcgcgcttctggccgctgtgctccgacactggctggcacgtggacccacatgcccccacatctttgtggccaccaactttctgagccttgttcagctacaactgctgccacaagggcccctggtgcagtatttgaccatggagacctgtgaggatggcaacgatcttgtcttcttctatcaggtctcagacttgatccgcagtggaaaacccatcaagcctgtcaaggatttgctaaagaagaaccaaatggaaaattgccagacattagtggataagtttatgaaactggatttggaagatcctaacctggacttgaacgttttcatgagccaggaagtgctgcctgctgccaccagcatcctctgagagtccttccagtgtcctccccagcctcctgagactccggtgggctgccatgccctctttgtttccttatctccctcagacgcagagtttttagtttctctagaaattttgtttcatattaggaataaagtttattttgaagaaa

SEQ ID NO: 218861 - DNA, 195 bp, Artificial Sequence
  derived and/or modified sequence
actgcacagtcgctggtccttattgatgaatttggaaagggaaccaacacggtggatgggctcgcgcttctggccgctgtgctccgacactggctggcacgtggacccacatgcccccacatctttgtggccaccaactttctgagccttgttcagctacaactgctgccacaagggcccctggtgcagtatttg

SEQ ID NO: 218862 - DNA, 575 bp, Artificial Sequence
  derived and/or modified sequence
attgcccaagagttctctgatgacctgcaccatatcgccagcctcattgggaaagtagtggactttgagggcagccttgctgaaaatcgcttcacagtcctccccaacatagatcctgaaattgatgagaaaaagcgaagactgatgggacttcccagtttccttactgaggttgcccgcaaggagctggagaatctggactcccgtattccttcatgcagtgtcatctacatccctctgattggcttccttctttctattccccgcctgccttccatggtagaggccagtgactttgagattaatggactggacttcatggtaagaccctcaacctctgtaaggtgagtgatgaggaaaatgagtcagcagctgaggaagagcgttactctacagcagcactgcccaatatgggatctctcctctgtagttttactctgagctttaccagcactgagacaaaggaaagagaagtcagagttaggggctggaggtggggttagaaagatggggaaggagaggaggaccaagagatgcaaagtccacagctttgaacccctgtacccagtttctct

SEQ ID NO: 218863 - DNA, 545 bp, Artificial Sequence
  derived and/or modified sequence
cacgagagcctcaagcttctccagagagttctggatgagatcaatccccagtctgttgttacgagtgccaaacaggatgagaatatgactcgatttctgggaaagcttgcctcccaggagcacagagagcctaaaagacctgaaatcatatttttgccaagtgtggattttggtctggagataagcaaacaacgcctcctttctggaaactactccttcatcccagacgccatgactgccactgagaaaatcctcttcctctcttccattattccctttgactgcctcctcacaatcccctcccaggttcgagcacttggagggctgctgaagttcctgggtcgaagaagaatcggggttgaactggaagactataatgtcagcgtccccatcctgggctttaagaaatttatgttgactcatctggtgaacatagatcaagacacttacaggaatcctcaacagatgccactgtaagtggggagagaagctgctcaggctatggttcacacgtccgactcatgacctgggggagctcagttctc

SEQ ID NO: 218864 - DNA, 475 bp, Artificial Sequence
  derived and/or modified sequence
actgtgtacagtgccctgggcctgagggatgcctgccgctccctgccgcagtccatccagctctttcgggacattgcccaagagttctctgatgacctgcaccatatcgccagcctcattgggaaagtatacttatctcctcaggtggactttgagggcagccttgctgaaaatcgcttcacagtcctccccaacatagatcctgaaattgatgagaaaaagcgaagactgatgggacttcccagtttccttactgaggttgcccgcaaggagctggagaatctggactcccgtattccttcatgcagtgtcatctacatccctctgattggcttccttctttctattccccgcctgccttccatggtagaggccagtgactttgagattaatggactggacttcatgtttctctcagaggagaagctgcactatcgtagtgcccgaaccaaggagctggatgcattgctggggg

SEQ ID NO: 218865 - DNA, 2290 bp, Artificial Sequence
  derived and/or modified sequence
gcggtcggtcagcggggcgttctcccacctgtagcgactcagagcctccaagctcatggcctccttaggagcgaacccaaggaggacaccgcagggaccgagacctggggcggcctcctccggcttccccagcccggccccagtgccgggccccagggaggccgaggaggaggaagtcgaggaggaggaggagctggccgagatccatctgtgtgtgctgtggaattcaggatacttgggcattgcctactatgatactagtgactccactatccacttcatgccagatgccccagaccacgagagcctcaagcttctccagagagttctggatgagatcaatccccagtctgttgttacgagtgccaaacaggatgagaatatgactcgatttctgggaaagcttgcctcccaggagcacagagagcctaaaagacctgaaatcatatttttgccaagtgtggattttggtctggagataagcaaacaacgcctcctttctggaaactactccttcatcccagacgccatgactgccactgagaaaatcctcttcctctcttccattattccctttgactgcctcctcacacccccaggagatttaagatttaccccgattccactgctgatcccctcccaggttcgagcacttggagggctgctgaagttcctgggtcgaagaagaatcggggttgaactggaagactataatgtcagcgtccccatcctgggctttaagaaatttatgttgactcatctggtgaacatagatcaagacacttacagtgttctacagatttttaagagtgagtctcacccctcagtgtacaaagtggccagtggactgaaggaggggctcagcctctttggaatcctcaacagatgccactgtaagtggggagagaagctgctcaggctatggttcacacgtccgactcatgacctgggggagctcagttctcgtctggacgtcattcagttttttctgctgccccagaatctggacatggctcagatgctgcatcggctcctgggtcacatcaagaacgtgcctctgattctgaaacgcatgaagttgtcccacaccaaggtcagcgactggcaggttctctacaagactgtgtacagtgccctgggcctgagggatgcctgccgctccctgccgcagtccatccagctctttcgggacattgcccaagagttctctgatgacctgcaccatatcgccagcctcattgggaaagtagtggactttgagggcagccttgctgaaaatcgcttcacagtcctccccaacatagatcctgaaattgatgagaaaaagcgaagactgatgggacttcccagtttccttactgaggttgcccgcaaggagctggagaatctggactcccgtattccttcatgcagtgtcatctacatccctctgattggcttccttctttctattccccgcctgccttccatggtagaggccagtgactttgagattaatggactggacttcatgtttctctcagaggagaagctgcactatcgtagtgcccgaaccaaggagctggatgcattgctgggggacctgcactgcgagatccgggaccaggagacgctgctgatgtaccagctacagtgccaggtgctggcacgagcagctgtcttaacccgagtattggaccttgcctcccgcctggacgtcctgctggctcttgccagtgctgcccgggactatggctactcaaggccgcgttactccccacaagtccttggggtacgaatccagaatggcagacatcctctgatggaactctgtgcccgaacctttgtgcccaactccacagaatgtggtggggacaaagggagggtcaaagtcatcactggacccaactcatcagggaagagcatatacctcaaacaggtaggcttgatcacattcatggccctggtaggcagctttgtgccagcagaggaggccgaaattggggcagtagacgccatcttcacacgaattcatagctgcgaatccatctcccttggcctctccaccttcatgatcgacctcaaccagcaggtggcgaaagcagtgaacaatgccactgcacagtcgctggtccttattgatgaatttggaaagggaaccaacacggtggatgggctcgcgcttctggccgctgtgctccgacactggctggcacgtggacccacatgcccccacatctttgtggccaccaactttctgagccttgttcagctacaactgctgccacaagggcccctggtgcagtatttg

SEQ ID NO: 218866 - DNA, 1546 bp, Artificial Sequence
  derived and/or modified sequence
actgtgtacagtgccctgggcctgagggatgcctgccgctccctgccgcagtccatccagctctttcgggacattgcccaagagttctctgatgacctgcaccatatcgccagcctcattgggaaagtagtggactttgagggcagccttgctgaaaatcgcttcacagtcctccccaacatagatcctgaaattgatgagaaaaagcgaagactgatgggacttcccagtttccttactgaggttgcccgcaaggagctggagaatctggactcccgtattccttcatgcagtgtcatctacatccctctgattggcttccttctttctattccccgcctgccttccatggtagaggccagtgactttgagattaatggactggacttcatgtttctctcagaggagaagctgcactatcgtagtgcccgaaccaaggagctggatgcattgctgggggacctgcactgcgagatccgggaccaggagacgctgctgatgtaccagctacagtgccaggtgctggcacgagcagctgtcttaacccgagtattggaccttgcctcccgcctggacgtcctgctggctcttgccagtgctgcccgggactatggctactcaaggccgcgttactccccacaagtccttggggtacgaatccagaatggcagacatcctctgatggaactctgtgcccgaacctttgtgcccaactccacagaatgtggtggggacaaagggagggtcaaagtcatcactggacccaactcatcagggaagagcatatacctcaaacaggtaggcttgatcacattcatggccctggtaggcagctttgtgccagcagaggaggccgaaattggggcagtagacgccatcttcacacgaattcatagctgcgaatccatctcccttggcctctccaccttcatgatcgacctcaaccaggtggcgaaagcagtgaacaatgccactgcacagtcgctggtccttattgatgaatttggaaagggaaccaacacggtggatgggctcgcgcttctggccgctgtgctccgacactggctggcacgtggacccacatgcccccacatctttgtggccaccaactttctgagccttgttcagctacaactgctgccacaagggcccctggtgcagtatttgaccatggagacctgtgaggatggcaacgatcttgtcttcttctatcaggtctcagacttgatccgcagtggaaaacccatcaagcctgtcaaggatttgctaaagaagaaccaaatggaaaattgccagacattagtggataagtttatgaaactggatttggaagatcctaacctggacttgaacgttttcatgagccaggaagtgctgcctgctgccaccagcatcctctgagagtccttccagtgtcctccccagcctcctgagactccggtgggctgccatgccctctttgtttccttatctccctcagacgcagagtttttagtttctctagaaattttgtttcatattaggaataaagtttattttgaagaaa

SEQ ID NO: 218867 - DNA, 573 bp, Artificial Sequence
  derived and/or modified sequence
ggtagttttgtgccagccgaggaggctgagattggcgcagtcgacgcaatcttcaccagaatccatagctgcgaatcaatcagcttgggcctgtccaccttcatgatcgatctgaaccaggtcgccaaagccgtgaacaacgctaccgcacagtccctggtcctcatcgacgagttcggaaaggggaccaacacagtggacggcctggctctgctggccgctgtactccgccactggctggcaaggggaccaacatgcccgcacatcttcgtagccacaaacttcctctccctggtccagctccagctgttacctcaagggcctcttgtgcagtacctgaccatggaaacctgcgaggatggaaatgatttggtgttcttctatcaggtgtccgatcttatacgctccggcaaacccatcaaacccgttaaagaccttctcaagaagaaccagatggaaaattgccaaactctggtggacaagtttatgaaattggacctcgaggatcccaatctcgacttaaacgtgttcatgtcacaagaagtgttgcccgcagccacttctattctgtag

SEQ ID NO: 218868 - DNA, 1404 bp, Artificial Sequence
  derived and/or modified sequence
acagtgtattctgcactgggactgcgcgatgcctgcaggagcctgccacagtcaatccagctcttccgcgatattgcccaggagtttagcgacgacttgcatcatatcgccagcctaatcggcaaggttgttgatttcgagggttcacttgccgaaaacagattcactgtgttacctaacatcgaccctgagattgacgagaagaaaaggcgcctcatgggtctgccatcctttttgactgaggtagcccgtaaggagttggagaatcttgactcgaggatcccgagttgtagcgttatctacatacctctgatcggatttctgctgtccatcccgcgactcccatccatggtggaagcgtcagactttgaaatcaatggtttagactttatgtttctcagcgaggaaaagctccattatcgatccgccagaacgaaggagctagatgcacttctcggggacctgcactgcgagattagagaccaggagaccttactgatgtaccagctgcagtgccaggtactggcgagagccgctgtcctgactcgcgtccttgacctggccagtcggctcgacgtgctcctcgccctagcaagtgcggctagagattacgggtatagccgacctcggtattcgccccaggtactgggcgtcaggatccaaaacggacggcatcccctgatggagctttgcgccagaacattcgttcccaacagcactgagtgtgggggtgacaaaggacgcgtcaaggtgattacggggccaaacagctcaggtaagagcatctaccttaaacaggtagggttgataacgtttatggcactagttgggagctttgtgcccgctgaggaggctgaaattggagccgtggatgccatttttacgcgcatccacagctgcgagagcatctcactcgggctgagcaccttcatgatcgacttgaaccagcaggtcgccaaggccgtgaataacgcaaccgctcaaagtctagtcttgattgacgaattcgggaagggaacaaacactgttgatggactcgcactcctagctgccgtcctgcgacactggttagctcgaggcccaacatgcccacatatttttgtagcaacgaatttcttgtccctcgtgcagctccagctgctccctcaaggtcctctagttcagtatctgacaatggaaacctgcgaggacgggaacgacttagttttcttctatcaggtgtcggaccttattcgcagcggcaagcccatcaagccagtgaaggacttgctaaagaagaatcagatggagaactgccagaccctggtggataagttcatgaaattggaccttgaggaccccaacctggacttgaacgtattcatgtctcaagaggtacttcctgccgcaacctccatactttag

SEQ ID NO: 218869 - DNA, 198 bp, Artificial Sequence
  derived and/or modified sequence
accgcccagagcctggtgctgatcgacgaattcggcaagggcacaaacaccgtggatggattggctttgcttgccgctgtattaagacactggctggcacggggacctacatgcccacatatcttcgtcgcaacaaacttcctgtctttagtccaattacagctcctcccccaggggccactcgtccagtacctctag

SEQ ID NO: 218870 - DNA, 348 bp, Artificial Sequence
  derived and/or modified sequence
attgcgcaggaatttagtgatgacctccaccacatcgcatcactgattggaaaggtggtcgatttcgaaggctctctggctgaaaaccgttttacagtgctccccaacattgatccagaaatcgatgaaaagaaacggaggctaatggggttaccaagctttcttacagaagtggctcggaaggagctggaaaatctcgattcccgaatccctagctgctctgtaatatacatcccgctgatagggttccttctgagcatccctcgcctgccttcaatggtggaggctagcgatttcgagataaacggcctcgacttcatggtccggccttctacctctgtccgttag

SEQ ID NO: 218871 - DNA, 477 bp, Artificial Sequence
  derived and/or modified sequence
catgagagccttaaattgctgcagagggtgctggatgagataaaccctcagtcggtagtcacaagtgcaaagcaggacgagaacatgaccagatttctgggaaaactcgccagtcaagaacatagagagccgaagaggcctgaaatcatttttctcccttccgtggactttggcctcgagatatccaaacaacgccttttaagtgggaactactcttttatcccggatgctatgacagccactgagaagatattattcctctcttctatcattcccttcgactgcttgctgaccatcccctcacaggtgcgcgctttgggcggactcttgaagttcctgggaaggagacgaatcggggtggagctcgaagattataacgtttcggtgcctatcttagggtttaaaaaatttatgctgactcatctcgttaacatcgatcaagatacttaccgcaatcctcagcaaatgccattgtag

SEQ ID NO: 218872 - DNA, 477 bp, Artificial Sequence
  derived and/or modified sequence
accgtctatagcgccctgggcctcagggacgcctgtagaagtttgccccagtccatccagctgtttcgggatatcgcccaggagttcagcgacgacctgcaccatattgccagcctgataggtaaagtctacctctctcctcaggttgacttcgagggctcactggctgagaatcgatttaccgttttacccaatatcgatcctgagatcgacgagaaaaaaaggcggctgatgggactcccatctttcctcaccgaggtggccaggaaggagctggaaaatctggattcaagaattcccagctgctcagtcatttacatccctttaattggcttcctcctctccatccccagactgcctagcatggtcgaggccagcgattttgaaattaacggactggattttatgtttctgtcagaggaaaagttgcattaccgcagcgctagaactaaagagttagatgccttgttgggatag

SEQ ID NO: 218873 - DNA, 2238 bp, Artificial Sequence
  derived and/or modified sequence
atggcgagcctgggagcaaaccccagacgcacaccccaaggaccccgaccaggagctgccagttctggcttcccctcccccgcacccgtgccaggcccaagagaagctgaggaggaagaagttgaggaggaagaggaactcgcagagatccatctgtgtgtcctctggaactcggggtacctcggcatcgcctattatgacacgagtgattctaccatacattttatgccagatgcaccagatcatgagtcactcaaattgcttcagagagtcctcgacgagattaacccccagtccgtagtgacatcagcaaaacaggatgagaacatgacccgtttcctggggaagcttgcctctcaggaacaccgggaaccaaaaagacctgaaatcattttcctgccgtccgtggatttcggactagagatttctaagcagaggctgctatcaggcaattacagcttcatcccggatgctatgactgcaacggaaaagatcctatttctgtcttctatcatcccattcgattgcctgctgaccccccctggtgatttacggttcactccaattcccctgttaattccctcccaggtgagagcactcggtgggcttttgaaattcctcggcagacgccgaattggcgtcgagctggaggactacaatgtctctgtgcccattctgggatttaaaaaatttatgttgacgcatctcgttaacatagatcaggatacctactctgtcctacagattttcaaaagtgaatctcacccttccgtatataaggttgccagtggcctgaaggagggactgagcctcttcggaatcctgaatcgttgtcattgtaagtggggtgagaaattgctgagactgtggtttaccaggcccacccatgatctgggtgaattgtcgtcccgcctggatgtgattcagtttttcctgttgcctcagaatctggatatggctcagatgctgcaccggctcctagggcacatcaaaaacgtgccactcatccttaagaggatgaaactgagtcacacaaaagtaagcgactggcaggtcctgtataaaaccgtatatagcgctttgggtctccgcgacgcttgtcggagcctgccgcagtccatacagcttttccgcgacattgcccaggagttctccgatgacttgcatcacatcgcgtcgctaatagggaaagtcgtagattttgagggaagccttgccgaaaaccgctttactgtgctgcctaacatcgaccccgaaattgatgaaaaaaaaagacgacttatgggtctgccgagctttctcactgaggtagctcgcaaggaactggaaaacctggacagccgcattccctcttgctcagtaatttatatacctctcatcggctttcttctgtccattccacgactgcccagcatggtagaagcttctgacttcgaaattaacggcctggattttatgtttctgagcgaagagaaactgcattaccggtctgctagaacaaaggagttggatgcacttctcggcgatctgcattgcgagatccgggaccaagagacactgctgatgtaccagcttcaatgccaggttctggctagggccgctgtgctaactcgcgttctagatctggcaagcagactggatgtgctgttggcgttggctagcgcagctcgcgactacgggtattcacggccaagatactccccgcaggtcttgggggtgaggatccaaaacggccgacatccactcatggaattgtgcgctcggacattcgtgcccaacagtacagaatgcggaggggacaaaggacgggtcaaggtgatcaccggaccgaattctagtgggaagagtatctacctgaaacaggtgggactcattacgttcatggctctggttggcagcttcgtccctgccgaggaggcagaaataggagccgtcgatgccatttttactcggatccatagttgtgaatcgatctccttaggcttgagtactttcatgatcgatctgaatcagcaagtagctaaggctgtcaataacgcaaccgcccagagcttggtgctgatcgacgaattcggcaaaggtacaaacacagtcgatggcctggctctgcttgcagccgtgctccgacattggcttgctagaggacccacctgccctcacatctttgtggccaccaacttccttagcctggtccagctgcagcttctgcctcaggggccactggtacagtacctctag

SEQ ID NO: 218874 - DNA, 1401 bp, Artificial Sequence
  derived and/or modified sequence
actgtgtacagtgccctcggattacgagacgcctgccggtcccttcctcagagcatccaactgtttagggacatcgcgcaggagttcagcgacgatctccaccatatagctagccttatcggaaaagtagtcgatttcgaagggagcctggctgaaaaccggttcactgtgttaccaaacatcgatcccgagatcgacgagaagaagcgacgtttgatggggttaccatctttcttaacagaggtggctcgtaaagagcttgagaacctcgactctcgcataccttcctgctccgttatctatatccccctcatcggcttcctgcttagcattcctcgattgcctagcatggtggaggcttcggatttcgaaatcaacggcctggatttcatgtttcttagcgaagagaaactccattatagaagtgctaggaccaaagaactcgatgcgctgctcggagacctccattgtgaaatccgggaccaggagaccctgttaatgtatcagcttcaatgccaagtcttggccagagccgctgttctcaccagagtgctggacctagctagccggctcgatgtgttactggcactggcctctgccgcacgcgactacgggtattccagacctcggtactccccccaggttctaggggtgagaatccagaacggccgacatccactcatggagctgtgcgcacgcacctttgtgcccaattcaacagaatgtggcggagataaagggagagttaaagtcatcacaggtcctaactctagtggaaaaagtatctacctcaagcaagtaggtctgatcaccttcatggccctcgtgggcagtttcgtgcccgcagaagaggccgaaattggggctgtcgatgctatttttacaaggatccacagctgcgagtcaattagtcttggtctgagcacatttatgatcgatttgaaccaggttgccaaagccgttaataatgcaactgcccagtctctagtgctgattgatgaattcggaaagggcaccaatacagtcgatggattggctctgctcgctgccgtgctgagacattggcttgcacgcggaccaacctgtcctcacatatttgtcgcaaccaatttcctctccttagtgcaactccagctcttaccgcaagggcctcttgttcagtacctgaccatggaaacctgcgaggacggcaacgatctcgttttcttctaccaggtcagcgacctaatccgttccgggaagccaatcaagccagtgaaggacctgctgaaaaaaaaccagatggaaaattgtcagacactggttgacaagttcatgaagttggacctggaggacccaaacttggatctgaatgtgttcatgtcacaggaggttctccccgctgcgaccagcattctgtag

SEQ ID NO: 218875 - protein, 237 aa, Artificial Sequence
  derived and/or modified sequence
MAVFLQLLPLLLSRAQGNPGASLDGRPGDRVNLSCGGVSHPIRWVWAPSFPACKGLSKGRRPILWASSSGTPTVPPLQPFVGRLRSLDSGIRRLELLLSAGDSGTFFCKGRHEDESRTVLHVLGDRTYCKAPGPTHGSVYPQLLIPLLGAGLVLGLGALGLVWWLHRRLPPQPIRPLPRFALSPPHSSTCENRAPEASKGGRAQDSRGPGPGTEPALCGSGPSSPQQAPPAVHSGPC

SEQ ID NO: 218876 - protein, 237 aa, Artificial Sequence
  derived and/or modified sequence
MAVFLQLLPLLLSRAQGNPGASLDGRPGDRVNLSCGGVSHPIRWVWAPSFPACKGLSKGRRPILWASSSGTPTVPPLQPFVGRLRSLDSGIRRLELLLSAGDSGTFFCKGRHEDESRTVLHVLGDRTYCKAPGPTHGSVYPQLLIPLLGAGLVLGLGALGLVWWLHRRLPPQPIGPLPRFALSPPHSSTCENRAPEASKGGRAQDSRGPGPGTEPALCGSGPSSPQQAPPAVHSGPC

SEQ ID NO: 218877 - DNA, 2396 bp, Artificial Sequence
  derived and/or modified sequence
acatcctaaccatggctgtgtttctgcagctgctaccgctgctgctctcgagggcccaagggaaccctggggcttctctggacggccgccctggggaccgggtgaatctctcctgcggaggagtctctcatcccatccgctgggtctgggcacccagcttcccggcctgcaagggcctgtccaaaggacgccgaccgatcctgtgggcctcttcgagcgggacccccaccgtgcctcccctccagcctttcgtcggccgcctacgctccctggactctggtatccggcggctggagctcctcttgagcgcgggggactcgggcacttttttctgcaagggccgccacgaggacgagagccgtacagtgcttcacgtgctgggggacaggacctattgcaaggcccccgggcctacccatgggtccgtgtatccccagctcctgatcccgctgctgggcgctgggttggtgctcggactgggagctttgggcctggtctggtggctgcacaggcgcctgcccccgcaaccgattcgaccactccctagatttgctctgtcccccccacatagctccacttgtgaaaaccgagccccagaggccagtaaaggaggaagagcccaagattccaggggacctggaccaggaaccgagcctgctctatgcggatctggaccatctagccctcagcaggccccgccggctgtccacagcggaccctgctgatgcctccaccatctatgcagttgtagtttgaagggaagcccttactccaaacctcccaagctaggggatcccagctccccataatccctctcccctccttggttcctcacctggaagaggaaggcaccatggtatagaaataagtgctagactgggagttgggagacctgggttccaggctgtctctgccactggtcttacttctaaacttactcccatctctcctataacctccatgtctccctcaccaccagtgtcctctctatacccaatcaagccctagctccttttttttttttttttgagacggagtctcgctctgttgcccaggctggagtgcagtgacaccatctccctcactgcaagctccgcctgccgggttcacaccattctcctgcctcaggctcctgagtagctgggactacaggcgcccgccaccacgcccagctaattttttgtatttttagtagagacggggtttcactgtgttagccaggatggtcttgatctgctaacctcgtgatccacccgccccggcctcccaaagtgctaggattacaggtgtgagccaccgcgcccggcctgattctttaagctgtttttctttgttgctggtgttttctttttggactcctcttccttgctccatatccctacagtatttcccaccattctaggtttgtccctttctcttcttctgggacactctcatcaacagtcagtcctcagccccctcctctgcaaatgacactcagaactctctctggctcagatctcagatttgggattaacaaacttccacttagacattctgcctgactgacctcaggcatttcgcactctgaatgtcaaacccaactcattgtcatctctgaagctgctcacttaattctcctctgtattctctttaacaacccagttgcccaacccagaaactgggagtcacgcagacctcctttctctcttactcccacacaatgagccatgaagtccagtctttctatcttaacatcactgtcaaacccacactgtattccatgcccagcgctgccacgtgaatgtactctgctcacttccttcctggattacccatagccccacctcatcctcctacccttgctttcctccctgaagtcagagagatcctactcaagagataactgctcctgacagcccttattacagaactgaagtactctccttagcttcagctctgtgcccacgtgccttggctttggatacaaggtactacagcactttgtccactctccaggcttacctgtgtcattccacatgcacatcttagaaaatgccagccttagagaattctccctagccccaaaatgtctttgcccagtgcaattccttcttcctgtattacccctttccctccttcacactatctgcctggctaattcttatttatccttagttcaagtatggccttttctgggaaggtgaccctccttggccaccccttgcatatactttgatgccctagggcgcaccccctttatttccctcatagaaacagccttctgtaaattgttccatgacaacctgtatttcaatttgtaagaaatttgcatgtactgtgagctccccaacgtcaggagactgacccttttgatatcattgctaagcctcattaaatgaatgaatgaaaatgaa

SEQ ID NO: 218878 - DNA, 2392 bp, Artificial Sequence
  derived and/or modified sequence
acatcctaaccatggctgtgtttctgcagctgctaccgctgctgctctcgagggcccaagggaaccctggggcttctctggacggccgccctggggaccgggtgaatctctcctgcggaggagtctctcatcccatccgctgggtctgggcacccagcttcccggcctgcaagggcctgtccaaaggacgccgaccgatcctgtgggcctcttcgagcgggacccccaccgtgcctcccctccagcctttcgtcggccgcctacgctccctggactctggtatccggcggctggagctcctcttgagcgcgggagactcgggcacttttttctgcaagggccgccacgaggacgagagccgtacagtgcttcacgtgctgggggacaggacctattgcaaggcccccgggcctacccatgggtccgtgtatccccagctcctgatcccgctgctgggcgctgggttggtgctcggactgggagctttgggcctggtctggtggctgcacaggcgcctgcccccgcaaccgattcgaccactccctagatttgctctgtcccccccacatagctccacttgtgaaaaccgagccccagaggccagtaaaggaggaagagcccaagattccaggggacctggaccaggaaccgagcctgctctatgcggatctggaccatctagccctcagcaggccccgccggctgtccacagcggaccctgctgatgcctccaccatctatgcagttgtagtttgaagggaagcccttactccaaacctcccaagctaggggatcccagctccccataatccctctcccctccttggttcctcacctggaagaggaaggcaccatggtatagaaataagtgctagactgggagttgggagacctgggttccaggctgtctctgccactggtcttacttctaaacttactcccatctctcctataacctccatgtctccctcaccaccagtgtcctctctatacccaatcaagccctagctccttttttttttttttttgagacggagtctcgctctgttgcccaggctggagtgcagtgacaccatctccctcactgcaagctccgcctgccgggttcacaccattctcctgcctcaggctcctgagtagctgggactacaggcgcccgccaccacgcccagctaattttttgtatttttagtagagacggggtttcactgtgttagccaggatggtcttgatctgctaacctcgtgatccacccgccccggcctcccaaagtgctaggattacaggtgtgagccaccgcgcccggcctgattctttaagctgtttttctttgttgctggtgttttctttttggactcctcttccttgctccatatccctacagtatttcccaccattctaggtttgtccctttctcttcttctgggacactctcatcaacagtcagtcctcagccccctcctctgcaaatgacactcagaactctctctggctcagatctcagatttgggattaacaaacttccacttagacattctgcctgactgacctcaggcatttcgcactctgaatgtcaaacccaactcattgtcatctctgaagctgctcacttaattctcctctgtattctctttaacaacccagttgcccaacccagaaactgggagtcacgcagacctcctttctctcttactcccacacaatgagccatgaagtccagtctttctatcttaacatcactgtcaaacccacactgtattccatgcccagcgctgccacgtgaatgtactctgctcacttccttcctggattacccatagccccacctcatcctcctacccttgctttcctccctgaagtcagagagatcctactcaagagataactgctcctgacagcccttattacagaactgaagtactctccttagcttcagctctgtgcccacgtgccttggctttggatacaaggtactacagcactttgtccactctccaggcttacctgtgtcattccacatgcacatcttagaaaatgccagccttagagaattctccctagccccaaaatgtctttgcccagtgcaattccttcttcctgtattacccctttccctccttcacactatctgcctggctaattcttatttatccttagttcaagtatggccttttctgggaaggtgaccctccttggccaccccttgcatatactttgatgccctagggcacaccccctttatttccctcatagaaacagccttctgtaaattgttccatgacaacctgtatttcaatttgtaagaaatttgcatgtactgtgagctccccaacgtcaggagactgacccttttgatatcattgctaagcctcattaaatgaatgaatgaaaa

SEQ ID NO: 218879 - DNA, 2392 bp, Artificial Sequence
  derived and/or modified sequence
acatcctaaccatggctgtgtttctgcagctgctaccgctgctgctctcgagggcccaagggaaccctggggcttctctggacggccgccctggggaccgggtgaatctctcctgcggaggagtctctcatcccatccgctgggtctgggcacccagcttcccggcctgcaagggcctgtccaaaggacgccgaccgatcctgtgggcctcttcgagcgggacccccaccgtgcctcccctccagcctttcgtcggccgcctacgctccctggactctggtatccggcggctggagctcctcttgagcgcgggggactcgggcacttttttctgcaagggccgccacgaggacgagagccgtacagtgcttcacgtgctgggggacaggacctattgcaaggcccccgggcctacccatgggtccgtgtatccccagctcctgatcccgctgctgggcgctgggttggtgctcggactgggagctttgggcctggtctggtggctgcacaggcgcctgcccccgcaaccgattcgaccactccctagatttgctctgtcccccccacatagctccacttgtgaaaaccgagccccagaggccagtaaaggaggaagagcccaagattccaggggacctggaccaggaaccgagcctgctctatgcggatctggaccatctagccctcagcaggccccgccggctgtccacagcggaccctgctgatgcctccaccatctatgcagttgtagtttgaagggaagcccttactccaaacctcccaagctaggggatcccagctccccataatccctctcccctccttggttcctcacctggaagaggaaggcaccatggtatagaaataagtgctagactgggagttgggagacctgggttccaggctgtctctgccactggtcttacttctaaacttactcccatctctcctataacctccatgtctccctcaccaccagtgtcctctctatacccaatcaagccctagctccttttttttttttttttgagacggagtctcgctctgttgcccaggctggagtgcagtgacaccatctccctcactgcaagctccgcctgccgggttcacaccattctcctgcctcaggctcctgagtagctgggactacaggcgcccgccaccacgcccagctaattttttgtatttttagtagagacggggtttcactgtgttagccaggatggtcttgatctgctaacctcgtgatccacccgccccggcctcccaaagtgctaggattacaggtgtgagccaccgcgcccggcctgattctttaagctgtttttctttgttgctggtgttttctttttggactcctcttccttgctccatatccctacagtatttcccaccattctaggtttgtccctttctcttcttctgggacactctcatcaacagtcagtcctcagccccctcctctgcaaatgacactcagaactctctctggctcagatctcagatttgggattaacaaacttccacttagacattctgcctgactgacctcaggcatttcgcactctgaatgtcaaacccaactcattgtcatctctgaagctgctcacttaattctcctctgtattctctttaacaacccagttgcccaacccagaaactgggagtcacgcagacctcctttctctcttactcccacacaatgagccatgaagtccagtctttctatcttaacatcactgtcaaacccacactgtattccatgcccagcgctgccacgtgaatgtactctgctcacttccttcctggattacccatagccccacctcatcctcctacccttgctttcctccctgaagtcagagagatcctactcaagagataactgctcctgacagcccttattacagaactgaagtactctccttagcttcagctctgtgcccacgtgccttggctttggatacaaggtactacagcactttgtccactctccaggcttacctgtgtcattccacatgcacatcttagaaaatgccagccttagagaattctccctagccccaaaatgtctttgcccagtgcaattccttcttcctgtattacccctttccctccttcacactatctgcctggctaattcttatttatccttagttcaagtatggccttttctgggaaggtgaccctccttggccaccccttgcatatactttgatgccctagggcacaccccctttatttccctcatagaaacagccttctgtaaattgttccatgacaacctgtatttcaatttgtaagaaatttgcatgtactgtgagctccccaacgtcaggagactgacccttttgatatcattgctaagcctcattaaatgaatgaatgaaaa

SEQ ID NO: 218880 - DNA, 714 bp, Artificial Sequence
  derived and/or modified sequence
atggccgtgttcctgcagctgctgcccctgctgctgagcagagcccagggcaaccccggcgccagcctggacggcagacccggcgacagagtgaacctgagctgcggcggcgtgagccaccccatcagatgggtgtgggcccccagcttccccgcctgcaagggcctgagcaagggcagaagacccatcctgtgggccagcagcagcggcacccccaccgtgccccccctgcagcccttcgtgggcagactgagaagcctggacagcggcatcagaagactggagctgctgctgagcgccggcgacagcggcaccttcttctgcaagggcagacacgaggacgagagcagaaccgtgctgcacgtgctgggcgacagaacctactgcaaggcccccggccccacccacggcagcgtgtacccccagctgctgatccccctgctgggcgccggcctggtgctgggcctgggcgccctgggcctggtgtggtggctgcacagaagactgcccccccagcccatcagacccctgcccagattcgccctgagccccccccacagcagcacctgcgagaacagagcccccgaggccagcaagggcggcagagcccaggacagcagaggccccggccccggcaccgagcccgccctgtgcggcagcggccccagcagcccccagcaggccccccccgccgtgcacagcggcccctgctag

SEQ ID NO: 218881 - DNA, 714 bp, Artificial Sequence
  derived and/or modified sequence
atggctgtttttttgcagcttctcccattgctcctgagtagggcacagggcaatcctggtgcctctctggacggcaggcccggcgaccgagtcaatctgtcatgcggaggcgtgtcgcacccgattcggtgggtatgggcaccatctttccccgcatgcaaggggctaagtaagggtcgtcgacctattctgtgggcttcctcctccggcacgcctacagtgccaccattacagccatttgtcggacgcttacgatcattggattcaggaataaggagacttgaacttttactgtctgccggtgacagcggcacctttttttgtaagggcaggcacgaggacgagtcccgcaccgtgctccacgtgttgggtgatcggacctattgtaaagccccgggtcccactcacggaagtgtctacccgcagctgctaatccccctgctgggcgccggtctggtcctgggattgggggctctgggcctcgtgtggtggctgcatcggcgactgccgccgcaacctattcggcctttaccccggtttgccctctctcctccacactcaagtacatgcgagaatcgtgctccagaagcatcaaagggcggtcgggcacaggacagccgtgggcccggaccaggaacagaaccggcactgtgcggatccggaccatcttccccacaacaagctccacccgcagttcacagcggaccatgctag

SEQ ID NO: 218882 - DNA, 714 bp, Artificial Sequence
  derived and/or modified sequence
atggccgtgttcctgcagttgctgccgttactcctctcccgcgcccaaggcaacccaggcgcgtcactggatggcaggcccggcgatcgcgtgaatctgtcatgtgggggagtgtcccatcccatccgatgggtatgggccccttccttccctgcctgtaagggactgtccaaaggtaggaggccaattctctgggcttcaagctcaggcacccccactgtgcctccactgcagccatttgtggggcgactgaggtcactcgattcagggattaggcggcttgaattgctgttgagtgcaggcgattcagggacattcttctgcaaaggccgccatgaagacgaaagccgcacagtcttgcatgtcctaggggaccgcacctactgcaaagcacccggccccacccatggcagcgtctaccctcaactcttgatcccactccttggtgcgggcctcgtgcttggcttgggagcgcttggattggtctggtggctgcaccgccgactgcccccgcagcccattcgccctctgcctcggtttgcactctctcctccacattcttccacatgcgagaacagggctcccgaggcctctaaaggaggtcgcgcccaagactcacgcggtccaggcccgggcacggagcccgccttgtgtggttcagggccaagcagccctcagcaggcaccccctgctgtccacagtggaccctgttag

SEQ ID NO: 218883 - DNA, 714 bp, Artificial Sequence
  derived and/or modified sequence
atggcagtgtttctgcagcttttaccactgctgctgtcacgtgcccaagggaaccccggggcttcactggacggccgacctggcgacagagtaaacttatcctgtgggggagtctcccacccaattcgatgggtttgggccccttccttccctgcatgcaaagggctgtcaaagggtcgcagaccaatcttatgggccagttcttccggtaccccaactgtaccccctctgcagcccttcgtcggacgcctccggtctctagatagcggcattcgaagacttgagcttctgcttagcgcgggtgacagtggcaccttcttttgtaaagggagacacgaggacgaatcccggaccgtgctacacgtgctgggtgaccgcacgtattgcaaggccccagggccaactcacgggtccgtgtaccctcagctcttgatcccactgctgggtgccggcttggttttgggtttgggggcccttggccttgtgtggtggctgcatagacggctacccccccagcctataagacctctacctcgctttgccctgtcacctcctcacagtagcacctgtgaaaacagggcacctgaggcatccaagggtggccgagctcaggactccaggggtcccggcccaggcaccgaaccggctctgtgcggtagcgggccttcttctcctcagcaggcgcctccagcagtccatagtggtccctgttag

SEQ ID NO: 218884 - DNA, 714 bp, Artificial Sequence
  derived and/or modified sequence
atggccgtattcctgcagctccttccccttctcctctctcgagcccagggcaacccaggcgcatccttagatggtagacccggcgaccgtgtgaatctgagttgtggtggtgtgagtcatccaatccgatgggtgtgggccccgtctttccctgcctgtaaggggttgagcaagggccggcgtcccattctttgggcgagttcctctggtacacctactgtcccgcctctgcagcccttcgtggggcgcctgaggtcactggacagcggaattcgccgcctcgagctgttgctgtccgccggcgacagcggcacatttttctgcaaagggaggcatgaggatgagagccgtacggttttacacgtcctaggagacagaacttattgtaaagcgccagggccaacgcatggaagtgtctacccccagcttttgattcccctgctgggggcaggcctggtactcggcctcggcgccctgggccttgtgtggtggctgcaccgccggctgcctcctcagcccatcagaccgcttcccaggtttgccctctctccacctcattccagcacttgtgagaacagggcgccagaggcctcgaaagggggtcgggcccaggactcccgaggcccagggcctggtaccgagcccgcactctgcgggtcaggcccgtccagcccacaacaggccccccccgccgtacacagcggaccgtgttag

SEQ ID NO: 218885 - DNA, 714 bp, Artificial Sequence
  derived and/or modified sequence
atggcagtattcctgcagctgctgccactccttctatcgcgggcacaaggcaatcccggagcttctctagacggtcgacctggggatagggtaaacctcagttgcggcggcgtgagccatccaatacggtgggtgtgggctccctcctttccagcttgtaaagggctatctaagggacgtcgcccaatcctctgggcatcatctagtgggacccctaccgtacctccacttcaaccatttgtgggtcggttgcggtctctcgattccggaatccgcagactggagttattgcttagtgcgggggactccggcacctttttctgcaaagggaggcacgaggacgagagccggaccgtcctgcacgtcttgggtgatcggacatattgtaaagcgccaggcccaactcacggcagtgtctatcctcagctgcttatcccactgcttggcgctggtttggtactgggcctgggcgccctgggcctcgtgtggtggctgcaccgaagactgcccccccaacctatcaggcccctgcctagatttgctctgtcacccccccatagcagcacttgcgaaaatagggcaccagaggcatctaaagggggccgggcacaggacagtcgtggaccaggtcctggtaccgagcccgccctttgcggatcggggcctagttcccctcagcaggctccaccagccgtacactccggaccatgctag

SEQ ID NO: 218886 - DNA, 714 bp, Artificial Sequence
  derived and/or modified sequence
atggcggtattccttcagctattgcctctcctgctgtcacgagcccaaggtaaccccggcgcaagcctggacgggaggcccggagatagggtgaacctgtcttgcggcggagtgagccatccaatccgctgggtgtgggctccttcttttcccgcatgcaagggactcagcaagggccgccgcccgatcttatgggctagtagctctggtacccctacggtgccacccttgcaacccttcgtcggccgtttgcgtagcctggacagcggaatcaggcgattagaactgttactatctgccggagatagcggaacctttttttgcaaaggccggcacgaggatgagtcccgaacagtgctgcacgttcttggcgataggacatattgtaaggctcctggaccgacccacggtagtgtctaccctcagttgctgatcccattactaggggccgggttggtcctggggcttggggcactgggcttagtatggtggctgcatcgaaggctcccgccccaaccaattcgtccactccctaggttcgccttgagccccccacacagtagcacctgtgagaacagagctccggaagctagcaagggaggccgcgctcaggactcacgaggacccggtccagggaccgaacccgccctgtgtggttccggaccatccagcccacaacaagcaccccccgcagtgcatagcggtccatgctag

SEQ ID NO: 218887 - DNA, 714 bp, Artificial Sequence
  derived and/or modified sequence
atggctgtgttcctgcagctgctgcccctgctgctgagccgggcccagggcaaccctggggccagcctggatggccggcctggggacagagtgaacctgagctgtggcggcgtgagccaccccatccgctgggtgtgggcccccagcttccctgcctgcaagggcctgagcaagggccggcggcccatcctgtgggccagcagcagcggcacccccaccgtgccccccctgcagccctttgtgggccgcctgcggagcctggacagcggcatccggcggctggagctgctgctgtctgctggggacagcggcaccttcttctgcaagggcagacatgaagatgagagcaggacagtgctgcacgtgctgggggacaggacctactgcaaggcccctggccccacccacggctctgtgtacccccagctgctgatccccctgctgggcgccggcctggtgctgggcctgggcgccctgggcctggtgtggtggctgcaccggcggctgcccccccagcccatccggcccctgcccaggtttgccctgagccccccccacagcagcacctgtgaaaatagagcccctgaggccagcaaaggaggccgggcccaggacagccggggccctggccctggaacagagcccgccctgtgtggcagcggccccagcagcccccagcaggcccctcctgctgtgcacagcggcccctgctag

SEQ ID NO: 218888 - DNA, 714 bp, Artificial Sequence
  derived and/or modified sequence
atggccgtgttcctgcagctgctgcccctgctgctgagccgggcccaggggaatccaggggcctcccttgacggtaggccaggtgatagagtaaacctatcctgcggtggcgtgagccacccaatcaggtgggtctgggcaccatcctttccagcatgcaaaggactatctaagggccgccgccctatcttgtgggcgagttcaagcggaacgcccaccgtccccccgctgcagcctttcgttggtaggctgcggagtctcgactcaggtatccggagactggagcttctgcttagcgcgggtgactctggaacgttcttttgtaaaggccgtcatgaagacgaatcgcgaacggtgttacacgtgttaggtgaccgaacttactgtaaagccccaggaccaactcacggaagtgtatacccccagttgctgattccactcctgggtgccggcttagtgctgggcctaggagctctaggcctggtgtggtggcttcacaggcggttgcctccacagcccattagaccgttgccccgttttgctctttcccccccccactccagcacatgcgaaaatcgggctccagaggccagcaagggtggccgagctcaggattcccgaggccccggtccaggaacagaacccgctttatgtggctctgggccatctagcccacagcaggctccacccgctgtacacagcgggccatgttag

SEQ ID NO: 218889 - DNA, 714 bp, Artificial Sequence
  derived and/or modified sequence
atggccgtgttcctgcagctgctgcccctgctgctgagccgggcccaaggaaaccccggcgcctcactggatgggaggcccggcgatcgtgtaaatctctcatgtggaggagtgagccatccaattagatgggtgtgggcaccttcgtttcccgcctgtaaaggcctgagcaaaggtaggaggccaattctgtgggccagttcttcggggacccctacggtcccccccctgcagccgttcgtgggtcgtctcaggagtctcgattctgggattcggcgactggagctcctcctttctgctggagattccggcacctttttctgtaaaggaaggcatgaagatgagagccggaccgtactgcatgtgctgggtgacagaacttactgcaaagccccaggcccaacccatggctccgtgtacccgcagctcctgattccattgctgggtgccgggcttgtgctgggcctgggggccctcgggcttgtgtggtggctgcatcgccggttaccacctcaaccaatcaggccgctcccacggttcgcattgagccccccccatagttctacttgcgagaatagggcaccagaggcatccaaagggggcagggcccaggactcacggggccctggacctgggacagagcccgccctctgtggcagcggaccatcctcgccccagcaggcgcctcctgccgtccatagcggtccttgctag

SEQ ID NO: 218890 - DNA, 714 bp, Artificial Sequence
  derived and/or modified sequence
atggccgtgttcctgcagctgctgcccctgctgctgagccgggcccaggggaatccgggggcatctctcgacggccggccgggggatcgggtgaatttatcttgcgggggtgtgagtcatccaattcgctgggtgtgggccccttcgttcccagcttgtaagggcctttcgaaagggcgcagacctatcctgtgggcttcctcatcaggtacgccgacagtcccacccctgcagccgttcgtgggtcgcttgcgctccttggattccggaatcagaagactggagctgctcttgtcggcgggcgattccgggaccttcttttgtaaaggacggcatgaggacgaatctaggactgtcctgcacgtgttgggtgaccggacttactgtaaagctccaggacccacgcatggcagtgtgtatcctcagttgctgatccccctgctgggagcaggcctagtgcttggcctgggcgctctcgggctggtctggtggcttcacagaagactgcccccgcagcccatccgtcctctcccaaggttcgccttatcccctcctcatagtagcacctgtgaaaacagagcccccgaagccagtaaagggggcagggcccaggacagccgcggtcctggtcctgggactgagcctgctctctgcggcagtggtccctcatcaccacagcaggccccgcccgccgtacattcaggcccatgctag

SEQ ID NO: 218891 - DNA, 714 bp, Artificial Sequence
  derived and/or modified sequence
atggccgtgttcctgcagctgctgcccctgctgctgagccgggcccagggcaacccgggggcatctcttgacgggagacccggcgacagagtgaatctcagctgtgggggagtctcccacccgatccgatgggtgtgggcccctagttttccagcatgcaaaggcctgtccaaaggacgacggccaattctctgggcgtccagcagcggcacaccaacggtccccccgttgcagccctttgtcggccgcctgcggtctctcgacagtggcattcgaaggctggaactgctgctgtctgcaggcgatagtggcacctttttctgtaaagggcgccacgaggacgagagtcgcacagtgttgcacgtcttaggcgatcgtacatactgcaaggcaccaggcccaacccacggcagtgtatatccccagctgctgattccactgctgggcgctggattagtactgggcctcggcgccctgggccttgtgtggtggttgcatcggcggttgcctccacaacctatcaggccactgcctcgattcgcccttagccctccacactcaagtacatgtgaaaatagagctccagaggccagtaaaggcggtcgagcacaggactcaaggggtcccggtccagggaccgagcccgccctgtgcggcagcggtccctcctctccacagcaagctccccctgcggtgcatagcgggccttgttag

SEQ ID NO: 218892 - DNA, 714 bp, Artificial Sequence
  derived and/or modified sequence
atggccgtgttcctgcagctgctgcccctgctgctgagccgggcccagggcaaccctggcgcaagcctcgatggtcgccccggcgacagggtgaacctgtcttgcgggggcgtctcacatccaatcagatgggtgtgggcaccgtcttttccagcctgcaaggggctctcaaaaggacgacgccccattctttgggcgtcttcaagcggcaccccaaccgtccctccgctccagccatttgtcggccgactccggagtcttgactcgggcatcagacgactcgagttgctgctttcggctggtgacagtggcacctttttctgcaaagggaggcatgaagatgagagtaggacagtcctccacgtgctgggggaccgtacctattgtaaagcccccggcccgacccacggcagcgtttaccctcagctgcttatcccacttctcggcgccggactagtgttgggtctgggtgcattgggtttggtgtggtggctgcatcggcgactgccaccacaaccaattagacctctgccgcggttcgccctaagtccccctcacagttccacatgcgagaatagggcacccgaggcgtctaaaggcgggagagcacaggattcacggggacccggacccggcacagagccggctctgtgtgggtcaggaccgagttccccccaacaggctcctccagcggtccactccgggccttgctag

SEQ ID NO: 218893 - DNA, 714 bp, Artificial Sequence
  derived and/or modified sequence
atggccgtgttcctgcagctgctgcccctgctgctgagccgggcccagggtaatcccggggccagcttggatgggcgaccaggagaccgggtgaatctctcctgcgggggtgtgtctcatcctattcgttgggtctgggctccatcatttcctgcttgtaaaggcctgtccaaaggcaggagaccaatcctgtgggcgagcagcagtgggacccctaccgtacctcctctccagcccttcgtgggccgactgcgatccttggacagcgggatcaggcgcttggagcttcttctgagcgctggtgatagcggcactttcttctgcaaggggcgtcacgaggacgagagtagaaccgtgctccacgtactgggggatcggacatattgcaaggcaccaggccctacccacgggagcgtgtacccacagctgttaatcccccttcttggcgcaggactcgttctgggcctcggagctctgggcctggtgtggtggctgcacagacggctacctcctcaacctatcaggcctctaccgcggtttgcgctcagtccccctcactcttcgacctgcgaaaatagagcacccgaagcctccaagggcggcagggcgcaggattcccgtgggcccgggccagggactgaaccggccctgtgcgggagcggcccctctagcccacagcaggcgcctcccgcagtgcacagtggcccttgttag

SEQ ID NO: 218894 - DNA, 714 bp, Artificial Sequence
  derived and/or modified sequence
atggccgttttcctccaattgctgcccctcttactgtccagggctcagggaaatccaggcgcaagtctggacggcaggcccggagacagagtcaatttgagttgcgggggtgtgtcccatcccatacgctgggtgtgggcaccaagtttcccagcctgtaaggggctgagcaaaggaaggcgccctatactttgggcatccagtagcggaacccctaccgtcccaccactgcagccatttgtaggaaggctacggtcccttgattcaggtattcgccgactagaactactgttatcagctggggatagcgggacatttttctgtaaagggagacacgaggatgagtccagaactgtgctgcacgtacttggcgatagaacttactgtaaagcaccagggcctacgcatggcagcgtatacccgcagttgctcatccccctgctcggagctggcctggtcctgggcctcggagcgctggggctggtgtggtggctgcacaggcggctaccccctcagcctatacggccactcccccgttttgctctttcaccccctcacagctcaacctgtgaaaatagggcccctgaagcaagcaaaggaggcagggcccaggactccagaggaccaggaccagggactgaaccggcactatgcggaagcgggccaagttctccacagcaagcccctccagctgtacactcagggccttgttag

SEQ ID NO: 218895 - DNA, 714 bp, Artificial Sequence
  derived and/or modified sequence
atggcggtattcctgcaacttttgcctctgctgctgtctagagcccagggaaaccctggggctagtcttgatgggagacccggagatcgggtgaatctgtcctgcgggggagtgtctcacccgattcgatgggtgtgggccccatcctttcctgcctgtaaagggctgtccaagggcaggaggccaatactatgggcaagttcaagtggaacacccactgttccacccctgcagcccttcgtcggaaggctgcggtccctggatagcggaatacggcgtcttgaattgctattgtcagcgggtgatagcggcactttcttttgcaagggcagacacgaggacgagtctcgcaccgtgcttcacgtgctaggagaccgtacatattgtaaagcccctggccctacacacggctcagtttatcctcagctattgattcccctgttgggtgctggtctggtgttggggctaggcgctcttggtctggtatggtggctccaccgacgactgccccctcagccaatccggcctttgccacgtttcgctctcagtcctcctcatagctcaacgtgtgagaatagggcccctgaagcttcaaaagggggaagggcccaggattccaggggcccaggtccaggcacagagccagcgctctgtggttcggggccttccagtccacaacaggctccgcctgccgtccacagcggaccctgctag

SEQ ID NO: 218896 - DNA, 714 bp, Artificial Sequence
  derived and/or modified sequence
atggcagtctttctgcagctcctgccactgcttctcagcagagctcagggtaatcccggtgcctcattggatggacggccaggcgatcgtgtaaacctctcatgtggaggggtttcacaccccattcgctgggtctgggccccaagctttccagcttgtaaaggactcagtaagggtcgaagacctattctttgggcatcttcttcaggcacccctactgtaccacccttgcagccatttgtaggtcggctgcggtcactggatagtggcatcagacgccttgagttgctgctgagtgcaggagatagcggcaccttcttttgcaagggccgtcacgaagatgagtcacggacggtgctgcacgtactgggagacagaacctattgtaaggcacccggacctacccatgggtccgtctatcctcagctacttattcctttgctgggtgctgggctggtgttgggtttgggcgcattaggattagtgtggtggctacatcgcaggcttccaccccaaccaatccgaccactgcctcgtttcgcccttagccccccacactcttcaacctgcgaaaacagagcacccgaggcgagtaagggcggaagggcccaggactcgagaggccctgggcctggtacagaacctgcactttgcggttccggccctagcagtcctcaacaggccccacctgccgtccactccggcccttgctag

SEQ ID NO: 218897 - DNA, 714 bp, Artificial Sequence
  derived and/or modified sequence
atggccgtgtttttgcagctcctgcccctcctgctgtcacgagcccagggcaatcccggagcctccttggacggccgacccggagatagagtcaacctaagctgtgggggtgtatcacatccgattcgatgggtttgggctccctctttcccggcttgtaagggtctgtctaaagggagacgccctatactatgggcttcttctagtggcaccccaactgtcccgccactgcagcctttcgtaggacggctacgttcgctggattcagggattcgacgtctcgagttactgctcagcgctggtgactccgggaccttcttctgcaagggacgtcatgaagatgaatctcggacagttttacacgtgcttggagaccgcacgtactgcaaagctccaggtccaacgcatggtagtgtctacccacagctgctcatcccgttgcttggagctggattagttctgggactaggcgctttgggcctggtctggtggctccatcggcgacttcctccccagccaattcgtcctctccccagattcgccctgagtcctccccatagttcaacttgtgagaatcgggctcctgaggcctccaaagggggtagagcgcaagattctcgcggaccgggacccggaacagagcctgccctgtgcgggtccggccctagctcgccacaacaggcccctcccgctgtccatagcgggccatgctag

SEQ ID NO: 218898 - DNA, 714 bp, Artificial Sequence
  derived and/or modified sequence
atggcggtgttcctgcagctgttgcctttactgctctctcgggcacaggggaatcccggtgcatcattggacgggcgaccaggcgatagagttaatttgagttgtgggggagtcagccaccctataagatgggtgtgggctccatcgttcccagcttgcaagggactgtccaaaggacgcaggcctatcctgtgggcctcttccagtggaacccccacagtccccccacttcagccttttgttgggaggttacgaagcctggattctgggattcgcagactggagctgctcctgtccgccggtgattcagggactttcttctgcaagggacgtcatgaggatgaatcacggactgttctgcatgtgttaggcgaccggacttattgtaaggctcccggacccacacacgggtctgtctatccacagctgctgatcccccttttaggggctggcttggtattaggcttgggagccttagggcttgtttggtggctacaccgtcgcctgccccctcagccgatacgcccactgcctcgcttcgctctttcgccaccccatagttctacatgcgagaatagagccccagaggcatctaagggcggtcgcgcacaggattcgcgcggtccagggccaggcacagagcccgctttgtgcggcagcgggccaagttcgccacaacaggctcctccggctgtgcatagtggaccttgctag

SEQ ID NO: 218899 - DNA, 714 bp, Artificial Sequence
  derived and/or modified sequence
atggctgtgttcttgcagctgctgcccctactcctgtctagagcccagggtaatcccggagcgtcactcgatggaagaccaggagaccgagtcaacctctcgtgtgggggagtgtctcaccctattcgctgggtttgggcaccttccttcccagcttgtaagggtctctctaaaggtcgcagaccaattctctgggctagctcgtcaggaacccccaccgtgccaccgctgcaaccttttgtcggacgcctgcgctccctggatagcgggataaggcgactagagctgctactgtctgctggcgatagtgggacttttttctgtaagggtcggcatgaggacgagtcaaggaccgtactgcacgtcctcggagatcggacctactgcaaagctcccggacctactcatggctcagtgtatccccaactcctcatacctctgctgggtgccggactcgtgctcggtcttggggcactgggcctggtgtggtggctacatcgtcgcctaccaccccagcctattcggcctctgcctcgcttcgcacttagcccaccacatagttctacttgtgagaatcgggctccagaggcatctaaggggggtagagcacaggattcccgcggaccaggcccaggcacagagccagccctctgtggcagtggccctagttcaccacagcaggctccaccagcagtgcatagcggtccatgctag

SEQ ID NO: 218900 - DNA, 2392 bp, Artificial Sequence
  derived and/or modified sequence
acatcctaaccatggctgtgtttctgcagctgctaccgctgctgctctcgagggcccaagggaaccctggggcttctctggacggccgccctggggaccgggtgaatctctcctgcggaggagtctctcatcccatccgctgggtctgggcacccagcttcccggcctgcaagggcctgtccaaaggacgccgaccgatcctgtgggcctcttcgagcgggacccccaccgtgcctcccctccagcctttcgtcggccgcctacgctccctggactctggtatccggcggctggagctcctcttgagcgcgggggactcgggcacttttttctgcaagggccgccacgaggacgagagccgtacagtgcttcacgtgctgggggacaggacctattgcaaggcccccgggcctacccatgggtccgtgtatccccagctcctgatcccgctgctgggcgctgggttggtgctcggactgggagctttgggcctggtctggtggctgcacaggcgcctgcccccgcaaccgattggaccactccctagatttgctctgtcccccccacatagctccacttgtgaaaaccgagccccagaggccagtaaaggaggaagagcccaagattccaggggacctggaccaggaaccgagcctgctctatgcggatctggaccatctagccctcagcaggccccgccggctgtccacagcggaccctgctgatgcctccaccatctatgcagttgtagtttgaagggaagcccttactccaaacctcccaagctaggggatcccagctccccataatccctctcccctccttggttcctcacctggaagaggaaggcaccatggtatagaaataagtgctagactgggagttgggagacctgggttccaggctgtctctgccactggtcttacttctaaacttactcccatctctcctataacctccatgtctccctcaccaccagtgtcctctctatacccaatcaagccctagctccttttttttttttttttgagacggagtctcgctctgttgcccaggctggagtgcagtgacaccatctccctcactgcaagctccgcctgccgggttcacaccattctcctgcctcaggctcctgagtagctgggactacaggcgcccgccaccacgcccagctaattttttgtatttttagtagagacggggtttcactgtgttagccaggatggtcttgatctgctaacctcgtgatccacccgccccggcctcccaaagtgctaggattacaggtgtgagccaccgcgcccggcctgattctttaagctgtttttctttgttgctggtgttttctttttggactcctcttccttgctccatatccctacagtatttcccaccattctaggtttgtccctttctcttcttctgggacactctcatcaacagtcagtcctcagccccctcctctgcaaatgacactcagaactctctctggctcagatctcagatttgggattaacaaacttccacttagacattctgcctgactgacctcaggcatttcgcactctgaatgtcaaacccaactcattgtcatctctgaagctgctcacttaattctcctctgtattctctttaacaacccagttgcccaacccagaaactgggagtcacgcagacctcctttctctcttactcccacacaatgagccatgaagtccagtctttctatcttaacatcactgtcaaacccacactgtattccatgcccagcgctgccacgtgaatgtactctgctcacttccttcctggattacccatagccccacctcatcctcctacccttgctttcctccctgaagtcagagagatcctactcaagagataactgctcctgacagcccttattacagaactgaagtactctccttagcttcagctctgtgcccacgtgccttggctttggatacaaggtactacagcactttgtccactctccaggcttacctgtgtcattccacatgcacatcttagaaaatgccagccttagagaattctccctagccccaaaatgtctttgcccagtgcaattccttcttcctgtattacccctttccctccttcacactatctgcctggctaattcttatttatccttagttcaagtatggccttttctgggaaggtgaccctccttggccaccccttgcatatactttgatgccctagggcacaccccctttatttccctcatagaaacagccttctgtaaattgttccatgacaacctgtatttcaatttgtaagaaatttgcatgtactgtgagctccccaacgtcaggagactgacccttttgatatcattgctaagcctcattaaatgaatgaatgaaaa

SEQ ID NO: 218901 - DNA, 714 bp, Artificial Sequence
  derived and/or modified sequence
atggccgtgttcctgcagctgctgcccctgctgctgagcagagcccagggcaaccccggcgccagcctggacggcagacccggcgacagagtgaacctgagctgcggcggcgtgagccaccccatcagatgggtgtgggcccccagcttccccgcctgcaagggcctgagcaagggcagaagacccatcctgtgggccagcagcagcggcacccccaccgtgccccccctgcagcccttcgtgggcagactgagaagcctggacagcggcatcagaagactggagctgctgctgagcgccggcgacagcggcaccttcttctgcaagggcagacacgaggacgagagcagaaccgtgctgcacgtgctgggcgacagaacctactgcaaggcccccggccccacccacggcagcgtgtacccccagctgctgatccccctgctgggcgccggcctggtgctgggcctgggcgccctgggcctggtgtggtggctgcacagaagactgcccccccagcccatcggccccctgcccagattcgccctgagccccccccacagcagcacctgcgagaacagagcccccgaggccagcaagggcggcagagcccaggacagcagaggccccggccccggcaccgagcccgccctgtgcggcagcggccccagcagcccccagcaggccccccccgccgtgcacagcggcccctgctag

SEQ ID NO: 218902 - DNA, 714 bp, Artificial Sequence
  derived and/or modified sequence
atggcagtcttcctccagctgcttcccctgcttctgtccagggcacagggtaatccaggagcgtcactggacggcaggccaggtgatcgggtgaatttgtcctgcggcggcgtttcacatcctatcagatgggtctgggcgccctctttccctgcctgtaaagggctgagcaagggccgccgccccatattgtgggcgtctagctccgggacgcctacagttcctccccttcagcctttcgttggacggttgcggagcctggacagcggcatcagaaggctggagctgctcttgtcggccggcgatagcggcacctttttttgtaaaggtcggcatgaggacgaaagcagaaccgtccttcatgtcttgggagaccgcacgtactgtaaggctcctgggcccacacacggctcagtctacccccagttgctgatccccctactgggcgccggtttagtcctcggcctgggcgctctcgggctggtgtggtggctgcacagaagactgccgccgcagccgattggacccctgccccggtttgcattgtcaccccctcacagcagcacctgtgagaatagggcacccgaggcatctaagggcggacgcgctcaagactcacgcggacctggcccggggaccgaacctgccctttgtggaagcggcccaagcagcccccagcaggcccctcctgcagtacattctggaccgtgttag

SEQ ID NO: 218903 - DNA, 714 bp, Artificial Sequence
  derived and/or modified sequence
atggctgtgttcctgcagctgctgcccctgctgctgagccgggcccagggcaaccctggggccagcctggatggccggcctggggacagagtgaacctgagctgtggcggcgtgagccaccccatccgctgggtgtgggcccccagcttccctgcctgcaagggcctgagcaagggccggcggcccatcctgtgggccagcagcagcggcacccccaccgtgccccccctgcagccctttgtgggccgcctgcggagcctggacagcggcatccggcggctggagctgctgctgtctgctggggacagcggcaccttcttctgcaagggcagacatgaagatgagagcaggacagtgctgcacgtgctgggggacaggacctactgcaaggcccctggccccacccacggctctgtgtacccccagctgctgatccccctgctgggcgccggcctggtgctgggcctgggcgccctgggcctggtgtggtggctgcaccggcggctgcccccccagcccatcggccccctgcccaggtttgccctgagccccccccacagcagcacctgtgaaaatagagcccctgaggccagcaaaggaggccgggcccaggacagccggggccctggccctggaacagagcccgccctgtgtggcagcggccccagcagcccccagcaggcccctcctgctgtgcacagcggcccctgctag

SEQ ID NO: 218904 - DNA, 714 bp, Artificial Sequence
  derived and/or modified sequence
atggccgtgttcctgcagctgctgcccctgctgctgagccgggcccagggaaaccccggcgccagcctcgacggcaggccaggggacagagtgaacctgagctgcggaggggtgtctcaccctatacgctgggtgtgggctccgtcctttcccgcgtgtaagggattaagcaaaggcaggcggccaattctgtgggcgtctagtagcggaaccccaactgtccctcccctacagccattcgttggtaggctgcgcagtctggattctggcataagacggttagagctgctgctgtccgccggcgattctggaacatttttctgcaagggacgacatgaagacgagagcagaacagtgctgcacgtactcggagataggacctactgcaaggcgcccggcccaacccatggtagcgtgtatcctcagctgttaattcccctgctgggggccggattagtactgggcctgggagccctgggtttagtttggtggcttcatcgtcgattgcctcctcagccaatcgggcccttaccaaggtttgccctgtcacccccacattcttccacatgtgagaatagagcgcccgaggccagtaagggtggccgcgctcaagacagtcgtggccccggtcctggaactgagcccgctctgtgtggttcaggcccttcttcgccgcagcaggcccctccggcagttcactcaggcccttgttag

SEQ ID NO: 218905 - DNA, 714 bp, Artificial Sequence
  derived and/or modified sequence
atggccgttttcctacagctcctgcccctgctgctttctagggcacagggtaatcctggagcttctctggatgggcgacccggtgaccgagttaatctgagctgtggcggagtgtctcacccaataagatgggtgtgggccccttcgttcccggcatgtaagggactgagcaaagggaggaggcccattttgtgggcctcctctagtggtacaccgaccgtgccccctctccaaccttttgttgggaggctgcgcagtttggactcaggaattcggagattagagctgctgttgtcggcaggggattctggcacattcttttgcaagggcaggcacgaggatgagagcagaacggttcttcatgtcctcggggatcgcacctactgtaaagccccaggccctacacacggatccgtgtatccccagctgctcatcccacttcttggggctggcttagtcctgggtttgggggctctcggcctggtgtggtggctgcacaggagactccctccccagcctattggacccttacccaggttcgccctcagccccccacacagcagcacttgcgagaatagggctccggaagcgagtaagggtggcagagcacaggactctcggggacccggaccgggtactgaacctgcgctatgtggttcagggccatcgtcccctcaacaggccccacctgccgtccatagtggcccatgttag

SEQ ID NO: 218906 - protein, 125 aa, Artificial Sequence
  derived and/or modified sequence
MKALMLLTLSVLLCWVSADIRCHSCYKVPVLGCVDRQSCRLEPGQQCLTTHAYLGKMWVFSNLRCGTPEEPCQEAFNQTNRKLGLTYNTTCCNKDNCNSAGPRPTPALGLVFLTSLAGLGLWLLH

SEQ ID NO: 218907 - DNA, 378 bp, Artificial Sequence
  derived and/or modified sequence
atgaaggccctgatgctgctgaccctgagcgtgctgctgtgctgggtgagcgccgacatcagatgccacagctgctacaaggtgcccgtgctgggctgcgtggacagacagagctgcagactggagcccggccagcagtgcctgaccacccacgcctacctgggcaagatgtgggtgttcagcaacctgagatgcggcacccccgaggagccctgccaggaggccttcaaccagaccaacagaaagctgggcctgacctacaacaccacctgctgcaacaaggacaactgcaacagcgccggccccagacccacccccgccctgggcctggtgttcctgaccagcctggccggcctgggcctgtggctgctgcactag

SEQ ID NO: 218908 - DNA, 210 bp, Artificial Sequence
  derived and/or modified sequence
atgtgggtgttcagcaacctgagatgcggcacccccgaggagccctgccaggaggccttcaaccagaccaacagaaagctgggcctgacctacaacaccacctgctgcaacaaggacaactgcaacagcgccggccccagacccacccccgccctgggcctggtgttcctgaccagcctggccggcctgggcctgtggctgctgcactag

SEQ ID NO: 218909 - DNA, 378 bp, Artificial Sequence
  derived and/or modified sequence
atgaaagccctgatgctgctgaccctgagcgtgctgctgtgttgggtctctgctgacatccgctgccactcttgctacaaggtgcctgttcttggatgtgtggacagacagagctgccgcctggaaccaggccagcagtgcctgaccactcatgcatacctcgggaagatgtgggttttctcgaatctgagatgcggcacaccggaagagccttgtcaagaggccttcaaccagactaatcggaagctgggactgacatacaacactacgtgttgtaataaggataactgcaacagtgccggtccaaggcctacacccgcgctggggctggtatttctgacatcattagcaggtttgggattgtggcttctgcactag

SEQ ID NO: 218910 - DNA, 378 bp, Artificial Sequence
  derived and/or modified sequence
atgaaagcactgatgctcttaaccttgtctgtgctgctgtgctgggtctctgcagatatccgatgtcacagttgttataaggtaccagtccttggttgtgtagatcgccagtcctgtcggctagagcctgggcagcagtgcctgacaacccacgcctatctgggcaagatgtgggtcttttccaatctaaggtgcggcacccccgaagaaccttgccaggaagcatttaatcagaccaaccggaagctggggttgacttacaatacaacctgctgcaacaaggacaattgtaacagcgccggccccaggcccactcccgcactcggtctggtgttccttacatctctcgctgggttgggcctgtggctgctgcattag

SEQ ID NO: 218911 - DNA, 378 bp, Artificial Sequence
  derived and/or modified sequence
atgaaagccctcatgctgctgacactgagcgtgctgctctgttgggttagcgccgacatcagatgtcattcatgctacaaagtccccgtgctgggatgcgttgatcgacagtcttgccgcctggagcctgggcagcagtgtcttacgacccatgcctatttggggaagatgtgggtcttctcgaacttacggtgtggaacaccggaggagccttgccaggaggccttcaaccagaccaataggaagctcggtttaacctacaacaccacctgctgcaataaagataactgtaactccgctgggcctcggccaacaccggccctaggactcgtctttctgacctctttggccggcttgggactgtggttactgcattag

SEQ ID NO: 218912 - DNA, 378 bp, Artificial Sequence
  derived and/or modified sequence
atgaaggcactcatgctcctaacattgagtgtcctcttgtgttgggtcagtgccgatatacgttgccactcctgttacaaagtgccggtgcttggctgcgtcgaccgccagtcttgccgtctcgagcctgggcagcagtgtctaactacccatgcttatctggggaaaatgtgggtcttcagcaatctgcgatgtggcacaccggaggaaccgtgccaagaagcctttaaccaaactaatcgcaaattagggttgacctataatacgacttgctgtaacaaagataactgcaattctgcgggccctagaccaactccggccctcggcctggtgttcctgacatccctggcagggctcgggctatggttacttcactag

SEQ ID NO: 218913 - DNA, 378 bp, Artificial Sequence
  derived and/or modified sequence
atgaaggctcttatgctcctgactctcagcgtgctcttgtgctgggtgagcgctgatattcgctgccacagttgttataaagtgccagtgctcgggtgtgtggatcggcagtcgtgtagattggagccaggacagcaatgtttaactacccacgcgtacctggggaagatgtgggtgttttctaacctgcgatgtggcacaccagaagaaccttgccaggaggcgtttaatcagacaaatcggaagttaggcctcacatataatacgacttgttgtaacaaggacaactgtaactctgctggtccacgtccaacccctgcattgggcctcgtttttctcacaagcctcgccgggctcgggttatggctgctgcactag

SEQ ID NO: 218914 - DNA, 378 bp, Artificial Sequence
  derived and/or modified sequence
atgaaagccctgatgctgttgaccctatccgtgcttctttgctgggtttccgccgacataaggtgccattcttgttacaaggttcctgtccttggctgcgtagataggcagtcttgcagactcgagcccggacagcaatgtctaaccactcatgcttatctgggcaaaatgtgggtgttttccaatctgagatgcggcacccctgaagagccgtgccaggaggcatttaaccagaccaatagaaaactggggctgacgtacaacacaacttgttgtaacaaggataactgcaatagtgcagggcctcggcccacacccgctctgggtctggtgttcctgacctctttagccggacttgggctgtggctactccactag

SEQ ID NO: 218915 - DNA, 378 bp, Artificial Sequence
  derived and/or modified sequence
atgaaggcgctgatgctgctgactctttctgtcttattatgctgggtgtcagccgacattaggtgccattcctgctacaaggttcccgttttggggtgtgtcgaccgccagagctgccgtctcgagcctggacagcagtgcctgaccacacacgcttatttgggcaagatgtgggtgttcagtaacctccgatgcgggacacctgaggagccttgccaggaggctttcaatcagactaatcggaagctgggtctgacctataacaccacgtgctgcaacaaggataattgtaattctgctggcccaagacctactcctgccctgggtttggtgttcctgacatctttggcagggctgggcctgtggctgctgcattag

SEQ ID NO: 218916 - DNA, 210 bp, Artificial Sequence
  derived and/or modified sequence
atgtgggtgttttctaatctgcggtgtgggactccagaagagccatgtcaagaggccttcaatcagacaaataggaaacttggcctgacttacaataccacttgctgcaacaaggataactgtaacagcgcgggtccacggccaacccctgccctgggcttagtgttccttacctctctagctggattgggcctctggctgctgcattag

SEQ ID NO: 218917 - DNA, 210 bp, Artificial Sequence
  derived and/or modified sequence
atgtgggtgttttctaatctccgttgcggcacccccgaagagccttgccaagaggcgttcaaccagaccaaccgcaagctcgggctgacctacaatacaacttgttgtaataaagataactgtaactccgctggacctagacctaccccagcactgggcctcgttttcttgactagcctcgcaggcctagggctgtggttgctacactag

SEQ ID NO: 218918 - DNA, 992 bp, Artificial Sequence
  derived and/or modified sequence
ctggtcagctgcgtagtaagtgagaagggaggggctaccagaggcagggaagggaggagcctttgggtttataaattccaaaaaggccactcaactcctagagctggatccttgaaaatctactctatcagctgctgtggttgccaccattctcaggaccctcgccatgaaagcccttatgctgctcaccctgtctgttctgctctgctgggtctcagctgacattcgctgtcactcctgctacaaggtccctgtgctgggctgtgtggaccggcagtcctgccgcctggagccaggacagcaatgcctgacaacacatgcataccttggtaagatgtgggttttctccaatctgcgctgtggcacaccagaagagccctgtcaggaggccttcaaccaaaccaaccgcaagctgggtctgacatataacaccacctgctgcaacaaggacaactgcaacagcgcaggaccccggcccactccagccctgggccttgtcttccttacctccttggctggccttggcctctggctgctgcactgagactcattccattggctgcccctcctcccacctgccttggcctgagcctctctccctgtgtctctgtatcccctggctttacagaatcgtctctccctagctcccatttctttaattaaacactgttccgagtggtctcctcatccatccttcccacctcacacccttcactctcctttttctgggtcccttcccacttccttccaggacctccattggctcctagaagggctccccactttgcttcctatactctgctgtcccctacttgaggagggattgggatctgggcctgaaatggggcttctgtgttgtccccagtgaaggctcccacaaggacctgatgacctcactgtacagagctgactccccaaacccaggctcccatatgtaccccatcccccatactcacctctttccattttgagtaataaatgtctgagtctga

SEQ ID NO: 218919 - DNA, 992 bp, Artificial Sequence
  derived and/or modified sequence
ctggtcagctgcgtagtaagtgagaagggaggggctaccagaggcagggaagggaggagcctttgggtttataaattccaaaaaggccactcaactcctagagctggatccttgaaaatctactctatcagctgctgtggttgccaccattctcaggaccctcgccatgaaagcccttatgctgctcaccctgtctgttctgctctgctgggtctcagctgacattcgctgtcactcctgctacaaggtccctgtgctgggctgtgtggaccggcagtcctgccgcctggagccaggacagcaatgcctgacaacacatgcataccttggtaagatgtgggttttctccaatctgcgctgtggcacaccagaagagccctgtcaggaggccttcaaccaaaccaaccgtaagctgggtctgacatataacaccacctgctgcaacaaggacaactgcaacagcgcaggaccccggcccactccagccctgggccttgtcttccttacctccttggctggccttggcctctggctgctgcactgagactcattccattggctgcccctcctcccacctgccttggcctgagcctctctccctgtgtctctgtatcccctggctttacagaatcgtctctccctagctcccatttctttaattaaacactgttccgagtggtctcctcatccatccttcccacctcacacccttcactctcctttttctgggtcccttcccacttccttccaggacctccattggctcctagaagggctccccactttgcttcctatactctgctgtcccctacttgaggagggattgggatctgggcctgaaatggggcttctgtgttgtccccagtgaaggctcccacaaggacctgatgacctcactgtacagagctgactccccaaatccaggctcccatatgtaccccatcccccatactcacctctttccattttgagtaataaatgtctgagtctga

SEQ ID NO: 218920 - DNA, 937 bp, Artificial Sequence
  derived and/or modified sequence
atgaaagcccttatgctgctcaccctgtctgttctgctctgctgggtctcagatggttgcagtgacatctaagagcctccatggaaacagagcgttttcttgagccttctgaagaggggacaactgggccacttacctccagggtgaagtggatttcactgagctgacattcgctgtcactcctgctacaaggtccctgtgctgggctgtgtggaccggcagtcctgccgcctggagccaggacagcaatgcctgacaacacatgcataccttggtaagatgtgggttttctccaatctgcgctgtggcacaccagaagagccctgtcaggaggccttcaaccaaaccaaccgcaagctgggtctgacatataacaccacctgctgcaacaaggacaactgcaacagcgcaggaccccggcccactccagccctgggccttgtcttccttacctccttggctggccttggcctctggctgctgcactgagactcattccattggctgcccctcctcccacctgccttggcctgagcctctctccctgtgtctctgtatcccctggctttacagaatcgtctctccctagctcccatttctttaattaaacactgttccgagtggtctcctcatccatccttcccacctcacacccttcactctcctttttctgggtcccttcccacttccttccaggacctccattggctcctagaagggctccccactttgcttcctatactctgctgtcccctacttgaggagggattgggatctgggcctgaaatggggcttctgtgttgtccccagtgaaggctcccacaaggacctgatgacctcactgtacagagctgactccccaaacccaggctcccatatgtaccccatcccccatactcacctctttccattttgagtaataaatgtctgagtctga

SEQ ID NO: 218921 - DNA, 378 bp, Artificial Sequence
  derived and/or modified sequence
atgaaggccctgatgctgctgaccctgtctgtgctgctgtgctgggtgtctgctgacatccgctgccacagctgctacaaggtgcctgtgctgggctgtgtggaccggcagagctgccgcctggagcccggccagcagtgcctgaccacccacgcctacctgggcaagatgtgggtgttcagcaacctgcgctgtggcaccccagaggagccctgccaggaggccttcaaccagaccaacaggaagctgggcctgacctacaacaccacctgctgcaacaaggacaactgcaacagcgctggcccccggcccaccccagccctgggcctggtgttcctgaccagcctggccggcctgggcctgtggctgctgcactag

SEQ ID NO: 218922 - DNA, 210 bp, Artificial Sequence
  derived and/or modified sequence
atgtgggtgttcagcaacctgcgctgtggcaccccagaggagccctgccaggaggccttcaaccagaccaacaggaagctgggcctgacctacaacaccacctgctgcaacaaggacaactgcaacagcgctggcccccggcccaccccagccctgggcctggtgttcctgaccagcctggccggcctgggcctgtggctgctgcactag

SEQ ID NO: 218923 - DNA, 378 bp, Artificial Sequence
  derived and/or modified sequence
atgaaggccctgatgctgctgaccctgagcgtgctgctgtgctgggtgtctgccgatattaggtgtcatagctgctacaaagtcccggttttaggttgcgtagatcgccagtcgtgcagacttgagcctggtcagcagtgtctaacaacacacgcgtatctaggcaaaatgtgggtgttctccaatttgaggtgtggcacacctgaagagccatgccaagaagcctttaatcagaccaatcggaagttgggtctcacctacaataccacatgttgcaacaaggataattgcaacagcgccggccccaggccaactccggcattgggccttgtatttcttacttcactggcgggcttaggcctgtggttactccattag

SEQ ID NO: 218924 - DNA, 378 bp, Artificial Sequence
  derived and/or modified sequence
atgaaggccctgatgctgctgaccctgagcgtgctgctgtgctgggtgtcagcggatattagatgccatagctgttacaaggtgcccgtgcttggatgtgttgacagacagtcgtgccggcttgagccgggccagcagtgccttacaactcacgcatacctgggcaagatgtgggtcttctccaacttaagatgcggtacacccgaagaaccttgtcaggaggccttcaatcaaacaaatcgtaagctcgggttgacctacaataccacctgttgtaacaaagataactgtaacagcgctgggcctagaccgacaccggctttggggctggtgttccttactagcttggccggtttgggactctggctgctgcactag

SEQ ID NO: 218925 - DNA, 378 bp, Artificial Sequence
  derived and/or modified sequence
atgaaggccctgatgctgctgaccctgagcgtgctgctgtgctgggtgagtgcagacatcagatgccactcctgctataaggtgccagtcttgggatgcgtagacagacaatcctgccgccttgaaccaggccagcaatgtcttacaacccacgcgtaccttggcaaaatgtgggtcttctcaaatttgaggtgcgggacaccggaggaaccctgccaggaggcattcaatcagactaatcgcaagttgggattgacgtacaatacgacctgttgtaacaaagacaactgtaattccgctggcccccgacccacccccgcactcggacttgtattcctgaccagtctggccggtttgggtctctggctgctgcattag

SEQ ID NO: 218926 - DNA, 378 bp, Artificial Sequence
  derived and/or modified sequence
atgaaggccctgatgctgctgaccctgagcgtgctgctgtgctgggtctccgctgacatccgttgccattcgtgttacaaggtgcccgtgttgggctgcgtggacaggcagagctgccgtctcgaacctggacagcagtgcctgacaacccacgcatatttagggaagatgtgggtattcagtaatctaaggtgcggcacccctgaagaaccctgccaggaggcctttaaccaaactaataggaagctggggctcacttacaatacaacgtgctgcaacaaagacaattgtaatagcgctggacctagacctactcctgctctcggacttgtctttctcacctccctggcggggctagggctgtggctactccattag

SEQ ID NO: 218927 - DNA, 378 bp, Artificial Sequence
  derived and/or modified sequence
atgaaggccctgatgctgctgaccctgagcgtgctgctgtgctgggttagtgctgacatccgctgtcacagttgctataaagtgccggttctgggatgcgtggaccggcagtcatgcaggctggagccaggccagcaatgtctgacaacacacgcatacctaggtaagatgtgggtattttccaacctgaggtgtggaacacccgaggagccttgtcaagaagccttcaaccagacgaatcggaagctgggtcttacctacaacaccacctgttgtaacaaggacaactgcaatagtgcaggtccgcggcccacacctgcactgggattggtgttcctgactagccttgcaggattagggctctggttgctgcactag

SEQ ID NO: 218928 - DNA, 378 bp, Artificial Sequence
  derived and/or modified sequence
atgaaggccctgatgctgctgaccctgagcgtgctgctgtgctgggtgtcggctgacattcgttgccattcatgctataaggtgcctgtcctcgggtgtgtggataggcagtcctgtcggctggagcctgggcagcagtgcctcacaacccatgcttacttaggcaaaatgtgggtgttttccaatctgaggtgcggcacccctgaagaaccctgtcaggaggcttttaaccagacgaataggaagttagggctcacgtacaatacaacatgctgtaataaggataactgtaactccgccgggcccaggcctacacctgccctgggtttggtcttcttgacctcactggccggcttgggactttggctgctccattag

SEQ ID NO: 218929 - DNA, 378 bp, Artificial Sequence
  derived and/or modified sequence
atgaaggccctgatgctgctgaccctgagcgtgctgctgtgctgggtgtcggctgacatcagatgtcattcctgttataaagtgcctgtactaggttgtgtcgataggcagagctgccgcctggagccgggacagcaatgtttgaccacacacgcatacctgggcaagatgtgggtcttctcaaacctgaggtgtgggacaccggaagagccgtgccaggaagccttcaatcaaaccaataggaagctcggactgacttacaacacgacatgttgtaataaagataattgcaattctgccggccccaggcccacacctgccctcggccttgtgttcctgacctccctcgccggccttgggctgtggctgctacattag

SEQ ID NO: 218930 - DNA, 210 bp, Artificial Sequence
  derived and/or modified sequence
atgtgggtgttcagcaacctgcggtgcggcacccccgaggagccctgccaggaagccttcaaccagaccaaccggaagctgggactcacatacaacacaacctgttgtaacaaggacaactgcaacagtgctgggccacggcccacacctgccctagggctggttttcttgacaagcctggcaggcctgggcctctggctgctgcactag

SEQ ID NO: 218931 - DNA, 210 bp, Artificial Sequence
  derived and/or modified sequence
atgtgggtgttcagcaacctgcggtgcggcacccccgaggagccctgccaggaagcctttaaccagaccaacagaaaactgggtcttacatataacaccacctgctgcaacaaggacaattgcaactctgccggaccaaggccaactcccgcactaggtctggtattcttaacttcgcttgcaggtcttggattgtggctgttgcactag

SEQ ID NO: 218932 - DNA, 378 bp, Artificial Sequence
  derived and/or modified sequence
atgaaagccctgatgctgttgaccctctccgtgctcctgtgctgggtcagtgcagatatcaggtgtcattcttgctacaaagtccctgtgctcgggtgcgtggataggcagtcctgccgtctggaaccaggacagcagtgcctcaccactcacgcttatcttgggaaaatgtgggtgttctcaaatctacgctgcgggacacccgaggagccctgccaagaggcctttaaccagacaaataggaaactggggctgacatacaacacaacatgctgcaacaaggacaactgcaatagtgcaggtcctcgtccaacccccgcactcggtctggtattcctcacctccctggccggactcgggctgtggctgctgcactag

SEQ ID NO: 218933 - DNA, 378 bp, Artificial Sequence
  derived and/or modified sequence
atgaaggcgctcatgttgctcaccctctctgttctgctgtgttgggtgtccgccgacattcgctgccattcctgctacaaagtgccagtcctggggtgcgtggaccgtcagtcctgccggctcgagccaggacagcagtgcctcacaactcacgcttatctcggcaaaatgtgggtatttagtaacctccgctgcggtacccccgaggagccatgtcaggaggcctttaatcagacaaaccgcaaactgggcctcacctataatactacttgctgcaataaagacaactgcaattctgcaggaccacgacccacacctgccctcggactcgtgtttctcacatctctggccggactcgggctctggctgttgcactag

SEQ ID NO: 218934 - DNA, 378 bp, Artificial Sequence
  derived and/or modified sequence
atgaaagccctgatgctcctgaccctgtcagtcctcttgtgttgggtttcggctgatattaggtgtcatagttgctataaggttcctgtcctcgggtgcgtcgaccggcaaagttgtcggctggagccgggtcagcagtgcttaacgacacatgcgtacttaggcaaaatgtgggtgtttagcaacttaagatgcggcacccctgaggaaccgtgtcaggaggcgttcaatcagactaaccgaaaactgggccttacatacaacacaacatgctgtaataaggacaattgtaacagcgctggacccagacccactcctgccctgggtctggtatttcttacatccctggccggtcttggcttgtggttgctgcactag

SEQ ID NO: 218935 - DNA, 378 bp, Artificial Sequence
  derived and/or modified sequence
atgaaagctctgatgttgctaactctttccgtgctcctgtgctgggtgagcgcagacatccgatgtcacagttgctataaagtaccagtgctcggatgcgtcgaccgacagagttgcaggctcgaacccggacagcagtgtctcacaacacacgcctaccttggaaagatgtgggtgttcagcaatctgcgctgtggcacgccagaagagccttgccaagaagcattcaaccagactaaccgcaagctcggcctaacgtacaatacaacatgttgcaacaaggataactgtaattcagctggccctcgacccactcctgccctggggctggtgttcctgacctctcttgccggtctgggtctgtggttgctgcattag

SEQ ID NO: 218936 - DNA, 378 bp, Artificial Sequence
  derived and/or modified sequence
atgaaagccctgatgcttctgaccttgagtgtgctgctgtgctgggtttcagcagatatccgatgtcacagctgctataaggtccctgtgctgggctgcgtcgaccgtcagtcttgtaggcttgaaccagggcagcagtgtctgactacccacgcgtacctcgggaaaatgtgggtgttcagtaatctgagatgtggtacaccggaggaaccatgccaggaagctttcaaccagacaaaccgcaagctcggactgacttacaacaccacctgttgcaacaaagataattgcaattccgccggtcctcggccaacacccgctctagggctcgtcttcctgacatctctagccggtctgggcctgtggctgttgcattag

SEQ ID NO: 218937 - DNA, 378 bp, Artificial Sequence
  derived and/or modified sequence
atgaaggcgctgatgctgctgacattgagcgtgttactctgctgggtaagtgcagacatcagatgtcattcatgttataaagttccagtgcttggctgtgtggatagacagagctgcagactagaacccggacagcaatgcctgactacccacgcatacttgggaaagatgtgggtgttttcaaacctgcggtgcggaacccccgaagagccgtgccaggaggctttcaaccagacaaacaggaaattgggactgacatacaataccacttgttgcaacaaggacaactgcaactcagccggaccgagacccactcctgcgctaggcctggtgttcctcaccagccttgccggattaggactgtggctgttgcattag

SEQ ID NO: 218938 - DNA, 378 bp, Artificial Sequence
  derived and/or modified sequence
atgaaagcacttatgctgctgacattatcagtgcttctgtgctgggtttccgcggatatacgctgccactcttgttacaaggttcccgtcttagggtgcgttgatcgccagtcttgccgacttgagccagggcagcagtgccttaccacccacgcctacctcggcaaaatgtgggtgttcagtaacctaaggtgtgggacacctgaggaaccctgccaggaggcgttcaatcagaccaatcggaagctgggactgacttataacacgacctgctgcaataaggacaactgcaattctgcagggcctagaccgactcccgctctcggcttggtgttcctgacaagcctggcgggattaggcctttggttattgcattag

SEQ ID NO: 218939 - DNA, 210 bp, Artificial Sequence
  derived and/or modified sequence
atgtgggtgttttctaacttgcggtgtggaacaccagaagagccctgtcaggaagccttcaatcagaccaatcgaaaactcggacttacctataataccacatgctgtaacaaggataactgcaactctgctgggccacgtccaactccggcactgggactggtgttcctcacctctttagctgggctcggattatggcttctccattag

SEQ ID NO: 218940 - DNA, 210 bp, Artificial Sequence
  derived and/or modified sequence
atgtgggtattctcaaacctcagatgtggaacaccagaggagccctgccaggaagcgttcaatcagacaaatcggaaactgggccttacatataacaccacgtgctgcaacaaggataactgcaactctgctggcccaagaccaacccccgcacttgggctcgtatttctcacctcactcgccggtttagggctgtggctgctgcattag

SEQ ID NO: 218941 - protein, 150 aa, Artificial Sequence
  derived and/or modified sequence
MRFMAGPAGSQSLGPLCFHSSPQALYTVLLIVLVMMSLVFGKFVPVNWEPPQPLPFPKYLRCYRCLLETKELGCLLGSDICLTPAGSSCITLHKKNSSGSDVMVSDCRSKEQMSDCSNTRTSPVSGFWIFSQYCFLDFCNDPQNRGLYTP

SEQ ID NO: 218942 - protein, 147 aa, Artificial Sequence
  derived and/or modified sequence
MAGPAGSQSLGPLCFHSSPQALYTVLLIVLVMMSLVFGKFVPVNWEPPQPLPFPKYLRCYRCLLETKELGCLLGSDICLTPAGSSCITLHKKNSSGSDVMVSDCRSKEQMSDCSNTRTSPVSGFWIFSQYCFLDFCNDPQNRGLYTP

SEQ ID NO: 218943 - protein, 148 aa, Artificial Sequence
  derived and/or modified sequence
MQTFPVAGALDPAILDTSSPQALYTVLLIVLVMMSLVFGKFVPVNWEPPQPLPFPKYLRCYRCLLETKELGCLLGSDICLTPAGSSCITLHKKNSSGSDVMVSDCRSKEQMSDCSNTRTSPVSGFWIFSQYCFLDFCNDPQNRGLYTP

SEQ ID NO: 218944 - protein, 225 aa, Artificial Sequence
  derived and/or modified sequence
  misc_feature (1)..(1): Xaa can be any naturally occurring amino acid
XADLPSCWGAGPCYTGHKVGALRRDTVICCCRHGDYSTPCLFTPGKPSRNPSPWKRTLWTLSAPWAGPAGWTGEEQNATKTGLITRRPRPLRRRPHPAPASPLPEIIRGNIPRMLGKFVPVNWEPPQPLPFPKYLRCYRCLLETKELGCLLGSDICLTPAGSSCITLHKKNSSGSDVMVSDCRSKEQMSDCSNTRTSPVSGFWIFSQYCFLDFCNDPQNRGLYTP

SEQ ID NO: 218945 - DNA, 447 bp, Artificial Sequence
  derived and/or modified sequence
atgcagaccttccccgtggccggcgccctggaccccgccatcctggacaccagctcaccccaggccctttataccgtcctcttgatcgtgctggtgatgatgtcacttgtgttcggcaagttcgtccccgttaactgggagcccccccagcctcttcccttcccaaagtatctcagatgctacagatgtctgctcgagaccaaggagctgggctgcctactgggaagcgatatttgcctgactcccgcaggcagcagttgcatcaccctgcacaagaaaaactcttcaggaagcgatgttatggtatcagactgcagatcaaaagagcaaatgagcgactgcagcaacacacggacaagtccggtcagtggcttctggatcttctctcaatactgctttttagatttttgcaacgatcctcagaacagaggcctgtatactccctag

SEQ ID NO: 218946 - DNA, 447 bp, Artificial Sequence
  derived and/or modified sequence
atgcagaccttccccgtggccggcgccctggaccccgccatcctggacacttcatcaccacaggccctctacaccgtcctgcttattgttttggtgatgatgagtctggtattcggaaagtttgttcccgttaactgggagcctcctcagccacttcctttccctaagtacttacggtgctacagatgtttactcgagacaaaagagctcgggtgcctgctgggttccgatatctgtctcacaccggcaggcagcagctgcatcacacttcataaaaagaattcatctggttctgatgtgatggtctccgactgtagatcgaaggaacagatgagtgattgtagtaatacgcgcacctcccccgtgagcggattctggatcttcagccagtactgcttcctggatttctgtaacgacccacagaatcggggcctttatacgccttag

SEQ ID NO: 218947 - DNA, 447 bp, Artificial Sequence
  derived and/or modified sequence
atgcagaccttccccgtggccggcgccctggaccccgccatcctggacacatcctccccgcaagccctgtacacagttttgctaattgttcttgttatgatgtccctggtgttcggcaagttcgtaccagtaaattgggagcctccccagccattaccattccccaaatacctgaggtgttatcggtgtctcctggagaccaaggaattgggctgcctccttggatccgatatctgtcttacccccgccggtagcagctgcatcacgctacacaagaaaaattcttccggctctgatgtgatggtgtcggattgcaggtccaaggaacagatgtctgattgtagtaatacacgaacttctcccgttagcggtttttggatcttttcacaatactgctttctggacttctgtaacgatcctcagaacagaggcctgtacaccccatag

SEQ ID NO: 218948 - DNA, 447 bp, Artificial Sequence
  derived and/or modified sequence
atgcagaccttccccgtggccggcgccctggaccccgccatcctggatactagctcccctcaggccttatataccgtgctcctgatagtgctggtcatgatgtcactcgtcttcgggaaatttgtgcctgtgaattgggaacctcctcagcctctgccattccccaagtacctgcgttgctaccgatgccttctggagaccaaggagcttgggtgtctgttggggtccgatatatgtctgacccccgccggttcttcctgtattaccctgcacaagaaaaacagctccggcagtgacgtaatggtgtcggactgcaggagtaaggaacagatgtctgactgtagcaacacacggacatctcctgtttccggattctggatcttttcacagtactgttttctggatttctgtaatgacccacagaaccgaggactctacactccatag

SEQ ID NO: 218949 - DNA, 447 bp, Artificial Sequence
  derived and/or modified sequence
atgcagaccttccccgtggccggcgccctggaccccgccatcctggatactagctctccccaggctttatatacggtgttactgatcgttctcgtgatgatgagcctggtcttcggaaagtttgtccccgtcaattgggaacctccacaaccacttcctttcccaaaatatctccggtgctacaggtgtctcctggaaactaaggagctgggttgcctgttgggaagcgacatctgtcttacacccgccgggtcaagttgtataactctgcataagaaaaattctagcggctcagacgtgatggtgtccgactgcagatccaaagaacaaatgtctgactgcagtaacacaagaacgtccccagtcagtgggttttggatattctcgcagtactgttttttggatttttgtaacgacccccaaaacagaggcctctacactccctag

SEQ ID NO: 218950 - DNA, 447 bp, Artificial Sequence
  derived and/or modified sequence
atgcagaccttccccgtggccggcgccctggaccccgccatcctggacaccagctctccacaagcactgtacacagttctgctgatcgtgttagtgatgatgtcacttgtcttcggaaaatttgtacccgttaactgggagccaccacagcccctccctttccccaagtacctccgatgctaccggtgtctgctcgagaccaaagagcttggatgcctccttggctccgatatctgtttgacacccgcagggagcagttgtatcactttacacaagaagaactccagtggaagcgatgtcatggtgagtgattgtaggtcaaaggagcagatgtcagattgtagcaacacacggacatcccccgtgtccggcttctggattttttcacagtattgttttttggacttctgcaatgatcctcagaatagaggcttgtataccccgtag

SEQ ID NO: 218951 - DNA, 453 bp, Artificial Sequence
  derived and/or modified sequence
atgaggttcatggccggtcccgctgggagccagtcactcggccctttgtgctttcactcctcaccacaggcactttataccgtactcttgattgtccttgttatgatgtccttggtgttcggaaagtttgtgccagtgaattgggagccaccccagccattgccatttcccaagtacctccgctgctatagatgtttactggagacgaaagagctgggctgcttactgggctccgatatttgtttaacaccagcagggtcaagctgcattacgctccacaagaagaatagctcgggctccgacgtaatggtgagtgattgccgcagcaaggagcaaatgagcgactgctctaacactagaactagtccagtgagcgggttttggatttttagccagtactgcttcctcgatttctgcaacgatccccagaaccggggactttatactccatag

SEQ ID NO: 218952 - DNA, 444 bp, Artificial Sequence
  derived and/or modified sequence
atggccggaccggcaggatctcagtccctggggccactctgctttcattctagcccccaagccttgtatacggtgttgctgatcgtgctggttatgatgtcactggtgtttggaaaatttgttcccgtcaactgggagccaccgcaaccacttcccttccccaagtacctgcgatgctaccggtgtctgctcgagactaaggaattaggttgtcttctcgggagtgatatctgcctgactccagccggatcgtcctgtattaccctgcacaagaagaattcttctggctccgatgtgatggtgagcgattgtcgtagcaaggaacaaatgtctgactgttctaatactcgcacctctcctgtatccggcttctggatcttttcacagtattgcttcctcgatttctgcaacgatccccagaacaggggtttgtacactccttag

SEQ ID NO: 218953 - DNA, 447 bp, Artificial Sequence
  derived and/or modified sequence
atgcagaccttcccagttgctggggcacttgatccagcaatcttagatacaagttccccacaggctctgtacactgtgctgcttatcgtgttggtgatgatgagtctggttttcggaaagtttgtgcccgtgaattgggaaccgcctcagcctctcccatttcccaagtatctcaggtgttatagatgcctcttggagacaaaggaacttgggtgcctgcttgggtccgacatctgcctcaccccagcaggctcctcatgcatcaccctgcacaaaaaaaactcttcaggtagcgacgtgatggtgagtgactgtaggtccaaggaacagatgagcgactgttcaaacacgcgcacatcccctgtgagtgggttctggatcttctcacaatattgcttcctcgatttttgcaatgatccccagaatcggggactatataccccttag

SEQ ID NO: 218954 - DNA, 453 bp, Artificial Sequence
  derived and/or modified sequence
atgagatttatggccggacccgcaggatcacaatccctgggacccctgtgttttcactcctcccctcaggcactgtacacagttctcttaatcgtgcttgttatgatgtcactggtttttgggaaatttgtgccggtgaactgggagccccctcaaccactgccctttcccaagtacctgcgctgctaccgctgtctactcgaaacaaaagaactgggatgtcttctggggagcgacatctgtctaacccccgctggtagttcttgcatcactttgcataagaagaactctagcggctcagacgtaatggtgagcgactgtcgctctaaagagcagatgtctgattgttcgaacacaaggacctccccagtgagtggattttggatcttttctcagtactgcttcctggacttttgcaatgacccacagaaccgcggattgtatactccctag

SEQ ID NO: 218955 - DNA, 453 bp, Artificial Sequence
  derived and/or modified sequence
atgcggttcatggctggtcccgctgggagccagtccttgggtcccctgtgctttcattcctctccccaagcgttatacactgttctgctcatcgtgctggtaatgatgtcgctggtcttcggaaagtttgtgcccgtcaattgggaacccccacagccactgcccttccccaaatatctcagatgttatcgttgcctgctggagactaaggagctgggctgtctgttggggtctgacatatgtctgaccccagctggcagctcctgtattactctgcataagaaaaattcttccggcagtgacgtgatggtgagtgactgtcggtccaaggagcaaatgtctgactgtagcaatacacgcacttcccccgtctccggtttttggatcttcagccagtattgcttcctcgatttctgcaatgaccctcagaataggggcctctacactccttag

SEQ ID NO: 218956 - DNA, 678 bp, Artificial Sequence
  derived and/or modified sequence
taagctgatctgccatcctgttggggcgctggtccatgttacaccgggcacaaagtcggcgctcttagacgcgacacagtcatttgctgttgtaggcacggtgattattctacaccctgcctcttcacaccaggcaagccatccaggaatcccagtccctggaagaggactttgtggactctgtcagcgccatgggctggacctgcgggatggaccggagaggaacagaatgctactaaaactgggctcatcacaaggcgcccacggccattgcgacgtaggccccatcctgctcccgcaagcccgcttcctgaaataatcagaggcaacattcccaggatgttaggtaaattcgtgcccgtaaattgggagccgcctcaaccgctgccctttcccaagtacctgcggtgttatcggtgcctgctggaaaccaaagagctgggttgcctgctgggttcagatatttgtctaacacctgccggtagctcatgcataaccctccataagaaaaacagcagcggcagcgatgtgatggtcagtgactgtagaagtaaggaacagatgtccgactgctcaaatacgaggacatcacctgttagcgggttttggatcttcagtcagtattgctttttagatttctgcaacgatccacagaatcgaggattatacacaccctag

SEQ ID NO: 218957 - DNA, 453 bp, Artificial Sequence
  derived and/or modified sequence
atgcgctttatggcgggtccagcgggaagccagtcactggggccactctgttttcactcttcaccacaggccctctacaccgtattgctgattgtactggttatgatgtcactagtgtttggcaaatttgttcctgtgaactgggagcctccccagccattgccatttcccaagtatctgagatgttacaggtgtctgctggaaactaaggaattgggctgccttctcggctccgatatttgtttaacccctgccggttcgtcttgtattactctgcacaaaaagaactcctcgggtagcgacgtgatggtgagtgactgtaggtccaaggagcaaatgtctgactgctcaaataccagaacctcaccagtatccggcttctggattttcagtcagtattgttttttggatttttgcaacgacccccaaaaccgcggtctatacacaccctag

SEQ ID NO: 218958 - DNA, 950 bp, Artificial Sequence
  derived and/or modified sequence
atgcagaccttcccagttgctggggcgctggaccctgctatactggacacaaggtaggagcactcagaagggacaccgtcatctgctgctgtcgccatggcgattattcaacgccctgcctcttcaccccaggaaaaccttcgcggaacccgtcaccatggaaacgaactctctggactcttagcgcgccctgggctggccctgctgggtggacaggagaggagcaaaacgcaacaaagacgggattaattactcggaggccgcgccccctccgaagaaggccccaccctgccccggcctcacccctccccgaaataattcgaggaaatattccgcgaatgctgggtaagtttgttcctgtcaattgggaaccccctcaaccacttccattccccaaatacctgcgctgctaccgatgcctcttggagaccaaggagttagggtgccttctgggatctgacatctgcctcaccccagctggcagcagctgcatcactctccacaaaaagaacagcagcggttctgacgtcatggtgagtgactgccgaagtaaggagcagatgagtgattgttcaaatacccgaacttctccggtgtctggcttctggatattctctcaatactgcttcctggatttctgcaatgaccctcaaaacagagggctctatactccttagtgtgactgcagcaaactttggtgtaaaattccaccagtttccagccaccttcctgacttctatctgggcttggccaggacttctagtccctcataccagccctccttgcctccctccagccactggaccccagccttggctcttcctcttggttgacgcccttcagcacacttactgctactctgtacccccagccctactgcccaccaggtttcctctcttgtcccctagtccctggatgtttctcccaaataaatttgtgtgtaaactgtt

SEQ ID NO: 218959 - DNA, 453 bp, Artificial Sequence
  derived and/or modified sequence
atgcggtttatggccggacccgctgggagccagagtttgggccctctgtgctttcactcaagcccccaggcgctttatactgtactgctcatcgtgctggttatgatgagtttagtgttcggaaagttcgtgcccgtgaactgggagccaccacagcctctaccctttcctaaataccttcgctgttatagatgcctcttggaaacgaaggagctggggtgcttactcggaagcgacatttgcctgacacctgccggttccagttgtattacactgcacaaaaaaaacagcagcggctctgacgttatggtttccgactgccggtcaaaagagcagatgtctgactgctcaaataccaggacgtccccagtgtccggtttttggatattttcacagtactgttttctggacttttgcaacgatcctcagaacaggggactctacacaccttag

SEQ ID NO: 218960 - DNA, 678 bp, Artificial Sequence
  derived and/or modified sequence
tgagcagaccttccaagttgctggggcgctggcccatgttacaccggccataaagtgggagcattaagaagggacacagtaatttgttgctgcagacatggcgactacagcacaccttgtctgtttactccgggaaagccctctcgaaacccgtcaccctggaaacgtaccctgtggaccctgagcgccccatgggctggtccggctggatggaccggcgaagagcaaaatgctactaagaccggtcttatcacccgcagaccacgacccctacgccgtcgcccacaccccgcacccgcaagtcccctgccagaaattattagaggcaacatccctcgtatgctcggtaagttcgtgcccgtgaattgggagcctcctcagcccctgcctttcccaaagtacctcagatgttatagatgcttacttgaaactaaggagctgggatgcttgttgggcagcgatatttgcctgacaccggctggctccagctgcatcactctacacaagaagaattcctcgggtagtgacgtcatggttagtgattgcaggtccaaggagcagatgtccgattgtagcaatactagaacttcacctgtcagcgggttctggattttttctcagtattgtttcctggacttctgcaatgatccacagaacagagggctctataccccgtag

SEQ ID NO: 218961 - DNA, 678 bp, Artificial Sequence
  derived and/or modified sequence
taggccgacttgcctagctgctggggtgcaggcccatgctataccggccacaaggtgggagccttacggagagacaccgttatatgttgttgcagacacggggactacagcaccccctgtctgttcacaccagggaagccttctcgcaacccatcgccctggaagaggacactttggactttgtcggccccttgggcaggacccgcagggtggacaggggaagaacagaacgctactaagacagggctgatcacccggcgtcctagaccactccgccgacgaccccaccctgctccggcttcaccactgcccgaaatcatccgcggtaatataccacggatgcttgggaagtttgtacccgttaactgggagccccctcagccacttccattccccaagtacctgaggtgctacaggtgtctgttagaaacaaaggagttggggtgtctgctggggtccgatatctgcctcacacccgctgggtcaagttgtataactctacataagaagaattcttcaggctctgatgtgatggtctcagactgtaggagcaaggaacagatgagcgactgttcaaacacccggacaagtccagttagcggattctggatcttttctcaatattgttttctggatttctgcaatgatccccagaatcgcggtctatacaccccctag

SEQ ID NO: 218962 - DNA, 678 bp, Artificial Sequence
  derived and/or modified sequence
tgagccgatctcccatcctgctggggtgctggaccctgctacactggtcacaaggtaggagccctcaggcgggataccgtgatttgctgttgcagacacggagactactctaccccatgcctgtttaccccaggaaagcccagtaggaacccgtctccctggaaacgaactctgtggacactttcggccccttgggcagggccagcaggatggaccggagaggagcagaacgccacaaagaccggactaataacccgcagacccaggcctttgcgcagaagacctcaccccgctccagcgagtcccctaccagaaattatcaggggcaatataccacgaatgttagggaaattcgtgcccgttaactgggaacctccccagccccttcccttccccaagtaccttagatgttaccgttgtctattggagacaaaagagttaggctgcctcctcgggagcgacatatgccttactccagcaggctcgtcgtgtataaccctgcacaagaaaaactccagcgggtcagacgtgatggtcagtgactgtcgctcaaaagagcagatgtcggattgcagcaatacaagaaccagtccagtttctggcttttggatattctcacagtactgcttcctggatttctgtaatgatccccagaatcgaggtctgtatactccgtag

SEQ ID NO: 218963 - DNA, 678 bp, Artificial Sequence
  derived and/or modified sequence
tgagcagatcttccttcctgttggggcgctgggccatgttacactggacacaaagtgggtgcattgcgacgcgacacagtaatttgctgctgtcgccacggggactatagtacaccttgtctctttacgcccggaaaacccagtcggaatcctagtccttggaaaaggaccctgtggactctgtcagccccttgggctggcccagccggatggacaggtgaagagcagaacgccacaaaaactggactgatcacccggagacccaggcctcttcgcaggagacctcaccccgcacctgccagtcccctgccagagatcatcagaggcaacatccctagaatgcttgggaagttcgtcccagtaaattgggaacctcctcaaccattgccgttccccaaatacctccgctgttatcgatgccttctggaaactaaggagttaggttgtctgctcggcagtgatatctgcctcactcccgctggcagctcttgtattacattgcacaaaaagaattcctctggatctgacgttatggtaagcgactgtcgcagcaaggagcaaatgagcgactgttctaatacaagaaccagccctgtgtccggattctggatcttctcgcaatactgcttcctcgacttctgtaacgatccacagaatagaggtctctatacaccttag

SEQ ID NO: 218964 - DNA, 678 bp, Artificial Sequence
  derived and/or modified sequence
taggctgacttaccttcttgctggggtgccggtccatgttatacaggtcataaggtcggtgcattgcgccgagataccgtaatttgctgctgtcgccatggcgactactcaaccccttgtctcttcacacctgggaagccttctcgcaatccaagcccctggaagcgcactctgtggaccctcagtgccccatgggccggacccgcagggtggactggcgaggaacaaaacgcaacaaaaacgggcctgataacaagacgccctcggccactgcgccgacggcctcatcctgctcctgcatcaccactccccgaaataatcagaggcaatataccgcgaatgctcggaaagttcgtgcctgttaattgggagccaccacagcccctacccttcccaaaatatctccgttgttatcggtgtttgctagagactaaagagctgggatgtctgctcgggagcgatatttgtcttacaccggctggctcctcatgcatcacactccataaaaaaaactctagtggctctgatgtcatggtgtcagattgtaggtctaaagaacagatgtctgactgcagtaacaccaggacaagccccgttagtggcttctggattttcagtcagtactgcttccttgacttttgtaatgatccacaaaacagaggtctatataccccctag

SEQ ID NO: 218965 - DNA, 453 bp, Artificial Sequence
  derived and/or modified sequence
atgaggttcatggccggtcctgctgggtcccaatccttaggtcccctttgctttcacagctctccacaagctctctatacagtgctgctgatcgttcttgtcatgatgtctcttgtcttcggcaagttcgtgcctgtgaactgggagccccctcagcctctgcctttccccaaatatcttaggtgttatagatgccttctggaaacaaaggagctgggttgtctcttggggtcggatatttgtcttacaccagcagggagctcatgtattacactgcacaaaaagaattccagtggttccgatgtgatggtgtcagactgtagatctaaggagcagatgagcgattgcagcaacacgagaacgtcccccgtgtccgggttttggatcttttcacagtattgcttcctggacttttgtaacgacccccagaacaggggcctgtatactccctag

SEQ ID NO: 218966 - DNA, 453 bp, Artificial Sequence
  derived and/or modified sequence
atgcgatttatggccggtccggctggatctcagtctttggggccactgtgcttccactctagtccacaggccctgtataccgttctgctgatagtactggtcatgatgtccctcgtgttcggtaaattcgttcctgtgaattgggagcccccacagcctttgcccttcccgaaatatctaaggtgttaccgatgtcttcttgagacaaaggagttagggtgtctgttgggatcggacatctgtctcacccccgcaggatcatcctgtatcactctgcacaaaaaaaatagcagtggctccgacgtgatggtttccgattgccggtccaaagagcagatgagcgattgtagcaatacccgtacaagtcctgtctcaggcttttggatattttctcaatactgcttcttagacttttgtaatgacccccaaaataggggtttgtatacaccctag

SEQ ID NO: 218967 - DNA, 730 bp, Artificial Sequence
  derived and/or modified sequence
agtcatgcgttttatggcaggccctgcagggagccagagtctgggtcccctgtgcttccacagcagcccccaagccctctacacggtcctcttaatagtgctggtcatgatgagcttggtgtttggtaagtttgttcctgtcaattgggaaccccctcaaccacttccattccccaaatacctgcgctgctaccgatgcctcttggagaccaaggagttagggtgccttctgggatctgacatctgcctcaccccagctggcagcagctgcatcactctccacaaaaagaacagcagcggttctgacgtcatggtgagtgactgccgaagtaaggagcagatgagtgattgttcaaatacccgaacttctccggtgtctggcttctggatattctctcaatactgcttcctggatttctgcaatgaccctcaaaacagagggctctatactccttagtgtgactgcagcaaactttggtgtaaaattccaccagtttccagccaccttcctgacttctatctgggcttggccaggacttctagtccctcataccagccctccttgcctccctccagccactggaccccagccttggctcttcctcttggttgacgcccttcagcacacttactgctactctgtacccccagccctactgcccaccaggtttcctctcttgtcccctagtccctggatgtttctcccaaataaatttgtgtgtaaactgtt

SEQ ID NO: 218968 - DNA, 447 bp, Artificial Sequence
  derived and/or modified sequence
atgcagacctttcctgtggcaggcgctttggacccggctatactggatacatcaagtccacaggcactgtacaccgtcctcctaattgtgctggtcatgatgtctctagtgttcggtaaattcgtgcccgttaattgggagcctccacagcccctgcccttccctaaatacctgagatgctataggtgtctgctcgagaccaaagagctaggttgcctgctggggagcgatatttgtcttacaccagctggcagctcctgtattacactacacaaaaagaacagcagcgggtcagatgtaatggtatctgactgtagatctaaagagcagatgagcgattgtagtaacaccagaacaagccccgtgtctggcttctggattttctcacagtattgttttctagacttttgtaatgaccctcagaatcgcggtctgtacactccttag

SEQ ID NO: 218969 - DNA, 447 bp, Artificial Sequence
  derived and/or modified sequence
atgcaaacgttccccgtcgcaggggctctggaccctgccatcctggatacttcctcccctcaggcgctttacacggtgttactgatcgtgcttgttatgatgtcactcgtgttcggcaaatttgttccagttaattgggagcccccacaaccgcttccatttccaaagtacctccggtgctatcggtgtctgctcgagaccaaggagctgggctgcctgctgggttctgacatttgcctgacccccgctggctcatcctgcatcactctacacaagaagaactcttccgggagcgacgttatggtgagtgattgcaggtctaaagagcaaatgtcagactgctctaacacaagaacgagccccgtgtccggcttttggattttttcacagtattgtttcttggacttctgcaatgacccccagaacagaggtctctacaccccctag

SEQ ID NO: 218970 - DNA, 447 bp, Artificial Sequence
  derived and/or modified sequence
atgcaaacatttcccgtagctggcgctttagatcccgctatactggacaccagttcaccccaggcgttatacacagtgctacttattgttctggttatgatgagccttgtgttcgggaagttcgttcccgtgaactgggaaccaccacagcccttgccttttcccaagtatctccgatgctacaggtgcttactggagacaaaagaactcgggtgccttctggggtccgatatttgtcttactccagcgggatcatcatgtattactttgcataagaagaactcttctggaagtgacgtgatggtaagcgattgccgctccaaagagcaaatgagtgactgttcaaacacacgaacgtcccctgtcagtggattctggatcttctctcagtactgtttcctagatttttgtaacgatccccaaaaccggggactgtatacgccttag

SEQ ID NO: 218971 - DNA, 447 bp, Artificial Sequence
  derived and/or modified sequence
atgcagacctttccagttgctggcgcactcgatccagccatcctagacacatcatcccctcaggcgttatataccgtactgttgattgttttggtgatgatgagtcttgtcttcgggaagttcgtacccgtcaactgggagccacctcaaccactgccctttcccaagtatctgagatgctaccggtgcctcctggagacaaaagagcttgggtgcttgcttggatcggacatttgcctgacccctgctggctccagttgcataaccctgcacaagaagaacagttccggatctgacgtaatggtcagtgactgtcgaagcaaggagcaaatgtctgactgctccaacacacgtaccagtccggtaagcgggttctggatctttagtcagtattgttttttagacttctgcaatgatccacaaaatcgcggtctttacacaccgtag

SEQ ID NO: 218972 - DNA, 447 bp, Artificial Sequence
  derived and/or modified sequence
atgcagaccttcccagtcgcaggtgctctggaccctgcaattctggatacttcaagtccacaagcactttacactgttcttctgattgtgctggttatgatgtccctggttttcgggaaatttgttccagtgaattgggaaccccctcaacccttgccttttcctaagtacctgcgttgttatagatgcttgctggagaccaaagagctgggctgtctattgggatcagacatctgcctgacacctgctggatcctcatgcataacgctgcataaaaaaaattccagcggctcagacgtgatggtctctgattgtaggtctaaggagcagatgagcgattgttccaatactcgaacaagtcccgtgtccggcttttggatattttcgcagtactgctttctcgacttctgcaatgatccacagaacagaggactgtacaccccgtag

SEQ ID NO: 218973 - DNA, 447 bp, Artificial Sequence
  derived and/or modified sequence
atgcagactttccccgttgcaggggctctcgatcctgctattctggacacatcatctccacaggctctatatacagtcttgctgatcgtcttggttatgatgagtctcgtattcggcaaatttgtgcccgttaactgggaacctccacagccactccccttcccgaagtacttacggtgttaccgatgcttgctggaaactaaggaactggggtgcctactagggtctgacatttgtctcactcctgcgggaagtagctgtattacccttcataaaaaaaattcaagcggatctgacgtcatggtgtcggattgcaggtccaaggagcagatgtcagactgttctaatacacgaacatcaccagtctccgggttttggatattttcccagtactgttttctggatttttgtaacgaccctcaaaatagggggctctacaccccctag

SEQ ID NO: 218974 - DNA, 453 bp, Artificial Sequence
  derived and/or modified sequence
atgcgtttcatggcaggtcccgctggctctcagtctctgggacccctctgcttccacagctccccccaggcactttatacggtgttgctgatcgtgcttgtcatgatgagtctcgtgttcggaaagtttgtgccggtcaactgggagcctccacaaccattgccctttcctaagtatctaagatgctatcgctgtttgttggagactaaagaacttggctgtctattaggaagcgatatttgcctcaccccagctggctcatcatgtatcacactgcacaagaaaaactcttcaggttcggacgtgatggtctcagattgccgctccaaagagcagatgtccgattgttccaacacccgcacctctcccgtttctggattctggatctttagccagtactgtttcttggatttctgcaacgaccctcagaatcgggggctctacaccccttag

SEQ ID NO: 218975 - DNA, 444 bp, Artificial Sequence
  derived and/or modified sequence
atggcaggccccgccggcagccaatctctgggcccattatgctttcacagctccccgcaagccctatacacagttctcctgattgtgctggtgatgatgagcttggtgtttggaaaattcgtccctgtgaactgggaacccccccagcccctgccctttcctaaatacttgagatgctacagatgcctactcgaaacaaaagagctcggctgtttactaggctctgacatatgtctgacacccgccggttcctcttgcatcacactacacaagaagaattcatccgggtctgatgtgatggtgtcagattgtcgcagtaaggagcagatgtctgactgcagtaacacacgaacatcccccgtcagcggattctggatatttagccagtattgttttctggacttctgtaatgacccacagaacagaggtctgtatactccttag

SEQ ID NO: 218976 - DNA, 447 bp, Artificial Sequence
  derived and/or modified sequence
atgcaaactttccccgtcgctggggccttagacccagctattcttgacacttctagcccccaagctctgtacacggtgctgttaatagtccttgttatgatgtcccttgtgtttggtaagttcgtgcctgtaaactgggagcccccacaacctctgccctttcctaagtatctccgctgttaccggtgcctgcttgagaccaaagagttaggatgtctgttaggcagcgacatttgcctcactccagccgggtcaagctgtatcaccttacacaagaagaatagctctgggtcagacgtaatggtttctgactgcagaagtaaggaacagatgagcgactgctcaaacacccgcacatcaccggtttcaggtttttggatcttctctcagtactgttttctcgatttctgtaacgacccacagaaccgagggctgtataccccatag

SEQ ID NO: 218977 - DNA, 453 bp, Artificial Sequence
  derived and/or modified sequence
atgagattcatggccggccccgccggatcccaatctctcggacctctttgcttccattcttcaccccaagccctgtacacggtgctgcttatagtgcttgtcatgatgtctttagtatttgggaagtttgttcccgttaactgggaaccacctcaaccactccctttccctaaatatctgcgatgctacagatgcctgctcgagaccaaagaacttggatgcctgctgggttccgacatctgcctcacacccgcgggcagctcatgcattactttgcacaaaaagaactcctcaggttcagacgtgatggtctccgactgtaggagcaaggagcaaatgtctgactgttccaataccaggacaagccctgtctctggattctggattttctcccaatactgttttttagacttttgtaatgatcctcagaatagaggactgtacactccatag

SEQ ID NO: 218978 - DNA, 453 bp, Artificial Sequence
  derived and/or modified sequence
atgcggtttatggcgggcccagccggctcccagtccttagggcccctgtgctttcatagctctccccaggccctgtacacagtgctgctgatcgtgttagttatgatgtctttagtgttcggtaaatttgtaccagtcaactgggaaccacctcagccgctcccttttcccaagtatctgcggtgctacagatgtctgttagagacaaaggaactgggttgcctcctcggctccgatatctgtctgactcctgctggcagttcctgtatcactctgcacaagaaaaacagttccggctctgacgttatggtgtccgattgcagatcaaaagaacaaatgtccgattgctctaacacacgcacctcaccagtgtcaggattttggatcttttctcagtattgcttcttagacttttgtaacgatccacaaaataggggcttgtacactccgtag

SEQ ID NO: 218979 - DNA, 678 bp, Artificial Sequence
  derived and/or modified sequence
taagctgacctcccgagctgctggggagccggaccatgctacacaggccataaggtgggtgcgctccggcgggataccgtaatatgctgctgtaggcatggcgactactctacaccatgtttatttacaccaggcaaaccaagtagaaacccttctccatggaaaagaaccctctggactctgtccgcaccctgggctggccctgcgggctggaccggcgaagaacagaacgctactaagaccggcctcattacccgtaggcccagacccttgaggcgtcgcccacacccagccccagcttctcctttgccagagatcattcggggcaatattccaaggatgctcggaaagttcgtacctgtgaattgggaaccaccacagcccctcccatttcccaaatatctgagatgctataggtgcctgctggagacaaaggagctgggctgcttgcttggatcggacatctgcctgacgcccgcagggtcaagctgcattacacttcacaagaaaaatagctccggatcagacgtcatggtgtctgattgtagatctaaggaacagatgtccgactgttcaaataccagaacatcccctgttagtggattttggatctttagccagtactgcttcctcgacttctgtaacgatccacaaaatcgcggcttatacaccccctag

SEQ ID NO: 218980 - DNA, 453 bp, Artificial Sequence
  derived and/or modified sequence
atgcgcttcatggctggccctgccggatcacagtccctgggcccattatgctttcactcatccccacaggccctttacaccgtcctgctgatcgtactcgtgatgatgtctctggttttcggaaagttcgtgcccgtcaattgggagcctcctcaacccctcccattccccaagtatctgcgatgctacagatgtctcctcgaaaccaaagaactggggtgcctgttggggtcagacatctgcctgacccccgccggttctagctgcatcacactgcacaagaaaaattctagcggctctgacgttatggtctccgactgccgaagtaaagaacaaatgagcgattgctccaacacacgaacaagcccagtatcaggattttggattttctctcagtattgcttcctggacttttgtaatgatccgcaaaatcggggactttatacgccctag

SEQ ID NO: 218981 - DNA, 453 bp, Artificial Sequence
  derived and/or modified sequence
atgcgctttatggctggccctgccggttctcagagtcttggacccctctgttttcactctagcccccaggccttatacacggtgctcctaatcgtccttgtgatgatgtctcttgtctttggaaaatttgttcctgtcaactgggaaccccctcagcctctcccatttccaaaatacctccgctgctataggtgcctcctggaaactaaggaactgggttgtctccttgggtctgatatctgcttgacccctgctggtagctcttgcataaccctgcataaaaagaattcttcggggagtgacgtgatggtaagcgactgccggtctaaggaacagatgagtgattgtagtaacacccgaacttcacctgtctctggattctggatcttttcacagtattgttttttggacttctgtaatgacccccagaatagaggactctatacaccatag

SEQ ID NO: 218982 - DNA, 678 bp, Artificial Sequence
  derived and/or modified sequence
tgagccgaccttccatcctgctggggcgcggggccttgttataccggccataaagttggggcgctgagaagagatacagttatctgttgttgtcggcacggggactattccacaccatgtctatttactccaggaaaacccagccggaacccttccccttggaagcgcaccctatggacattgtctgcaccttgggccggtcccgcgggttggacgggcgaggagcagaatgctaccaaaacaggcctcataaccaggagacctcgacccctgcgccgaagaccacaccccgcccctgcttcacctcttccagaaatcatacggggcaacatcccaagaatgcttggaaagttcgtccccgttaattgggaacctccgcagcccttgccctttccaaagtacctccgatgttacaggtgtctccttgagactaaggaactgggatgcctacttggttccgacatttgtctgacaccagcaggctcatcatgtatcactctgcataaaaagaactcttccggatcagatgtcatggtgtctgattgtagaagcaaagaacagatgagcgattgttccaatactaggactagccctgtcagcggcttctggattttcagtcagtactgctttctggacttctgtaatgaccctcaaaatagaggactctacactccctag

SEQ ID NO: 218983 - DNA, 678 bp, Artificial Sequence
  derived and/or modified sequence
tgagcggatctgccaagttgctggggcgctggaccttgttataccggccacaaagttggcgccctgagacgagacactgtaatatgctgctgtcgccacggcgattattccacaccatgcctgttcactcccggtaaaccctccaggaacccatctccgtggaagcgaaccctttggacactttcagctccctgggctgggcccgcaggatggacaggtgaggaacagaatgctacaaaaacaggtctgatcacacgaagaccacgcccacttcggcggagacctcaccctgcccccgcatctccgttgcccgagatcatcaggggaaatatcccgagaatgcttggcaagttcgtccctgtgaactgggagcctcctcagcccctgcctttcccgaaatatcttcgttgttaccggtgcctactggaaacaaaggagttaggctgtctgttgggctcagacatttgtctcaccccagcaggatcctcatgcatcacactgcacaagaaaaactcttccggctcagacgttatggtttcggattgtagatcaaaggaacaaatgtctgattgcagtaatacaagaacctctcccgtctctggattttggatcttctcccagtactgctttcttgacttctgcaatgaccctcaaaaccgcggtttatataccccttag

SEQ ID NO: 218984 - DNA, 678 bp, Artificial Sequence
  derived and/or modified sequence
taagccgacttgccgtcatgctggggtgctgggccttgttacactgggcacaaagttggcgccttgcgccgggatacagttatttgttgctgtaggcacggtgattattctacaccttgcctgttcacccccggaaaaccttcacggaacccctcaccctggaaacggacactctggacactttctgctccttgggctggcccggccggatggactggcgaggaacagaacgccacaaaaacgggccttattacgagaagaccccggcccctgcgacgccggcctcaccctgcaccagctagcccgctacctgagattattcgtggtaacattcctcgcatgctcggtaagtttgtacccgtgaactgggaacctcctcagcccttgcccttcccaaagtatctgaggtgttaccgatgtttacttgagaccaaagagcttggatgtctcttaggctctgatatatgtctgacacccgccggtagcagctgtataaccctacacaagaagaactcttccggttccgacgtcatggtttcagactgtagatcaaaagaacagatgagtgactgttcgaacactagaacatcccccgtgtcaggattttggatatttagccaatattgctttctggacttttgcaatgaccctcagaacagaggcctgtataccccttag

SEQ ID NO: 218985 - DNA, 678 bp, Artificial Sequence
  derived and/or modified sequence
taggcggacctcccctcctgctggggtgccggcccatgttatactgggcacaaggttggagccttgaggagagatactgtcatctgctgctgtaggcatggtgattactccaccccctgcttgtttactcccggaaaaccatccagaaacccttccccttggaaaagaactctatggaccttatccgcgccctgggctggaccagcaggctggaccggagaggagcaaaacgccacaaagaccggtctcatcaccaggcggcccaggccacttagaagacgtcctcatccagcccctgcctccccattaccggaaattatacggggaaacattccacggatgcttgggaagtttgtccccgtgaactgggagccaccacaaccactgccatttcccaaatacctcagatgctacaggtgcctactcgaaactaaggaattgggctgtctgctgggatccgacatctgcttaacacctgcaggctcctcgtgtatcaccctccataaaaagaatagctcgggctctgatgtgatggtcagcgactgccgatctaaagagcagatgagcgactgcagcaatacacgcacgagcccggtgagtggcttctggatttttagtcagtattgtttcctggacttctgtaatgaccctcaaaaccgaggtctgtatacaccatag

SEQ ID NO: 218986 - DNA, 678 bp, Artificial Sequence
  derived and/or modified sequence
tgagccgacctgccatcttgctggggagctgggccctgttataccggccataaggtgggcgctctaagaagagataccgtgatttgctgctgcaggcacggggattattctacaccctgtttattcacgccaggcaagccctccaggaacccatccccctggaagcgaacgctgtggaccctcagcgccccgtgggccgggcctgccggctggacaggcgaggagcagaacgcaacaaagacgggattgattacaagaaggcctagacctctccggcgtcgcccacatcccgcccccgctagcccactgccagaaattatacgtggcaatattccaagaatgttaggaaaatttgttcccgtgaattgggaaccacctcaaccactccccttcccaaaatatctccgttgttatcgctgcctccttgagacaaaggaacttggttgtctcctcggatctgacatctgcctcacccctgcaggatccagttgtattactttgcacaaaaagaatagcagtgggagtgacgtgatggtgtccgattgtcgaagtaaggaacagatgagtgattgttctaatacgaggacctccccagtgtccggcttctggatcttttctcaatattgttttctggatttttgcaacgatcctcagaacagagggttgtacaccccgtag

SEQ ID NO: 218987 - DNA, 453 bp, Artificial Sequence
  derived and/or modified sequence
atgcgctttatggccggccccgccgggtcccaaagcttaggtcccctctgttttcattctagtccccaggcactgtataccgtgctgctgattgtgctcgttatgatgtcactggtgttcggaaagtttgtgccagtcaattgggagcctccccagcctctgcccttcccaaaataccttcgctgttatcgctgtctgctggagacaaaagaacttggctgcctccttggcagcgacatttgcctgacccccgccggatcaagctgcattactctccacaagaagaattcctctggctccgatgtcatggtatcggattgtcgatctaaagaacaaatgtcagattgttcgaacacaaggacttctcctgtgagcgggttttggattttttctcaatattgctttctggatttttgcaatgacccgcaaaacaggggtctatatacaccctag

SEQ ID NO: 218988 - DNA, 453 bp, Artificial Sequence
  derived and/or modified sequence
atgagatttatggccgggccagccggatcccaatcactggggcctctctgctttcattcctccccacaggctttatatactgtgctgctcatcgtgctggtgatgatgtctttagtgttcggaaagttcgtccccgttaactgggaacccccacagcccttgccctttcctaaatatttgaggtgttaccggtgtttacttgagactaaggaattagggtgcctgctagggagtgacatttgcttgacccccgctggttcttcatgtatcaccttacacaaaaagaactcttccgggtcggatgtgatggttagtgactgccgaagcaaggaacagatgtcagactgctctaatacacgaacttctccagtttccggcttctggatttttagccaatactgcttcctcgatttctgcaatgatccacagaaccgtggactgtacacaccctag

SEQ ID NO: 218989 - DNA, 447 bp, Artificial Sequence
  derived and/or modified sequence
atgcaaacttttcccgttgccggagccttggaccccgcgatcctggatacttcctccccgcaggccctatacacagtgttattgattgtccttgtgatgatgtcacttgtgtttggcaagttcgtgccagtgaattgggagcccccgcagccgttgccctttcccaaatacctgcgctgctatcgttgtctccttgaaacaaaagagcttggatgcctgctcggcagcgacatttgtttgaccccagccggctcatcctgcataaccctgcacaagaagaatagcagtgggtcagacgttatggtctctgattgccgctctaaagaacagatgagcgattgctcgaatacccgaacctctcccgtctctggattttggatcttctcacaatactgtttcctcgatttttgcaacgacccccagaataggggcctctacacaccttag

SEQ ID NO: 218990 - DNA, 447 bp, Artificial Sequence
  derived and/or modified sequence
atgcagacatttcctgtagccggcgccctggacccagccatcctcgacacctccagcccccaggccttatatacagtattactaatcgttctcgtgatgatgagccttgttttcggaaagtttgtcccagttaattgggagcccccccagcccctaccattccccaaatatctgaggtgttataggtgcctcttggagaccaaggaattgggatgcctacttggaagcgacatctgtctcactcccgctggaagctcatgtattaccttgcacaaaaagaactcatcaggctctgacgtaatggtgtccgactgccgtagcaaagagcagatgtcagactgtagcaatacccgcacttcccctgtcagcggcttttggattttctcacagtactgttttctcgacttctgtaacgaccctcagaaccggggactttacactccctag

SEQ ID NO: 218991 - DNA, 447 bp, Artificial Sequence
  derived and/or modified sequence
atgcagacatttcccgtggcaggagcactcgaccccgcaatcctcgacacaagcagtccccaggcactttacaccgtcctcctgattgtactggtaatgatgagcctcgtattcgggaaatttgttcctgttaactgggagcctcctcagcctcttccttttcccaagtaccttcgatgctaccgttgcctgcttgaaaccaaggaactgggttgcctcctaggtagtgacatctgtctcacaccggcgggcagttcttgcattacacttcataaaaagaacagcagcggctccgatgtcatggtatccgattgtcggtctaaagagcagatgagcgactgttcaaatacccgcaccagtcctgtttccggtttctggatcttctcgcagtactgcttcctggatttttgcaatgatccacagaacagaggactgtacacaccgtag

SEQ ID NO: 218992 - DNA, 447 bp, Artificial Sequence
  derived and/or modified sequence
atgcaaaccttccccgtggccggagccctcgacccagcaattctggacacatcaagccctcaagctctctacactgttctgctgatcgttcttgtcatgatgtccctggtgttcggaaagtttgtgcccgtgaattgggaaccaccacagccccttccctttccaaagtatctgcgctgctatcgatgtcttttagagacaaaagagctgggatgtctgttagggagtgatatttgcctgacacccgccggttctagttgcatcactttacacaagaagaattccagcggaagtgacgtgatggtatctgattgtaggtctaaagaacagatgagcgactgttctaatacaagaaccagcccagtcagcggattctggatattttcacaatactgcttcctcgacttctgcaacgatccccagaaccgcggtctctataccccttag

SEQ ID NO: 218993 - DNA, 447 bp, Artificial Sequence
  derived and/or modified sequence
atgcagacattcccagttgcaggggcactggatccagccatactcgacacctcttccccccaggccttgtacactgtgttactaatcgtcctggtcatgatgtcactggtcttcggcaagttcgtgccagtaaactgggagccgccacaaccattaccattcccgaagtatctccggtgttatcggtgtctgctggagacaaaggaactgggctgtttgcttggaagcgacatctgcctcacccccgcaggctcaagttgcatcacgctgcataaaaagaactcatcaggaagcgatgtgatggtatctgactgtcgcagtaaggaacaaatgtccgactgttctaatacaagaacctctcccgtaagcggcttctggattttttctcaatactgttttctcgatttctgtaacgatccacagaacagaggcctgtacaccccctag

SEQ ID NO: 218994 - DNA, 447 bp, Artificial Sequence
  derived and/or modified sequence
atgcagacattcccagtcgctggggcccttgaccccgctatactcgatacctcttctccccaagctctgtacacggtgctcctgatcgtgttggtaatgatgagcctcgtctttggtaagtttgtccctgtcaactgggaaccccctcaaccccttcccttcccaaagtatcttcggtgttatcggtgtttactggaaacgaaggaattgggctgtctccttggaagtgacatttgtctgacacccgccgggtccagctgtatcaccctgcataagaagaactcctctggttcagatgtcatggtttccgactgtagatccaaagaacagatgtctgattgttctaatactcggacttcaccagtgagcggcttctggatctttagtcagtattgttttcttgacttttgcaatgacccacagaatcgtggcttatataccccttag

SEQ ID NO: 218995 - DNA, 453 bp, Artificial Sequence
  derived and/or modified sequence
atgagattcatggccggccccgctggttcacagtctttgggaccactttgcttccactcatcacctcaagccctgtacaccgtcctgttgattgttctcgttatgatgtccctggtgtttggaaaatttgtacccgtcaactgggagccccctcagccacttcctttccccaagtacctcagatgctacagatgtctccttgagaccaaggagctcgggtgccttctcgggagcgacatctgcctgaccccagccggctcttcatgtattacccttcacaagaaaaatagtagcggtagtgatgtaatggtgtctgattgtaggagtaaagaacagatgtcagactgctcaaacacacgcacatctccagtatctggattttggattttttcacagtactgttttctcgacttttgtaacgaccctcagaatagaggactatacaccccatag

SEQ ID NO: 218996 - DNA, 950 bp, Artificial Sequence
  derived and/or modified sequence
atgcagaccttcccagttgctggggcgctggaccctgctatactggacacaaggtaggagcactcagaagggacaccgtcatctgctgctgtcgccatggcgattattcaacgccctgcctcttcaccccaggaaaaccttcgcggaacccgtcaccatggaaacgaactctctggactcttagcgcgccctgggctggccctgctgggtggacaggagaggagcaaaacgcaacaaagacgggattaattactcggaggccgcgccccctccgaagaaggccccaccctgccccggcctcacccctccccgaaataattcgaggaaatattccgcgaatgctgggtaagtttgttcctgtcaattgggaaccccctcaaccacttccattccccaaatacctgcgctgctaccgatgcctcttggagaccaaggagttagggtgccttctgggatctgacatctgcctcaccccagctggcagcagctgcatcactctccacaaaaagaacagcagcggttctgacgtcatggtgagtgactgccgaagtaaggagcagatgagtgattgttcaaatacccgaacttctccggtgtctggcttctggatattctctcaatactgcttcctggatttctgcaatgaccctcaaaacagagggctctatactccttagtgtgactgcagcaaactttggtgtaaaattccaccagtttccagccaccttcctgacttctatctgggcttggccaggacttctagtccctcacaccagccctccttgcctccctccagccactggaccccagccttggctcttcctcttggttgacgcccttcagcacacttactgctactctgtacccccagccctactgcccaccaggtttcctctcttgtcccctagtccctggatgtttctcccaaataaatttgtgtgtaaactgtt

SEQ ID NO: 218997 - DNA, 444 bp, Artificial Sequence
  derived and/or modified sequence
atggcaggccccgccggcagccaatctctgggcccattatgctttcacagctccccgcaagccctatacacagttctcctgattgtgctggtgatgatgagcttggtgtttggaaaattcgtccctgtgaactgggaacccccccagcccctgccctttcctaaatacttgagatgctacagatgcctactcgaaacaaaagagctcggctgtttactaggctctgacatatgtctgacacccgccggttcctcttgcatcacactacacaagaagaattcatccgggtctgatgtgatggtgtcagactgccgaagcaaagagcaaatgtccgactgtagtaacactcgtacctccccagtgtccggattttggatttttagtcagtattgtttcttagacttttgcaatgacccccaaaaccgcggcctgtatacaccttag

SEQ ID NO: 218998 - DNA, 447 bp, Artificial Sequence
  derived and/or modified sequence
atgcaaaccttccctgtggctggagcacttgaccccgctatcctggacacaagtagtccccaagcactgtacactgtcctcctgattgtgctagtgatgatgtccctagttttcggaaagttcgtgcccgtcaattgggagccccctcagcccctgccatttcctaagtatcttcgatgttatcgctgccttctagagaccaaagagctgggctgtctgctgggttccgacatctgtctgacacctgccgggtcatcgtgtattactctccacaaaaagaactcgagcgggtctgacgtcatggtcagcgactgtcgctcgaaggaacagatgagcgactgttcaaacacaaggacttctcctgtaagcggattttggatatttagccaatattgctttttagacttttgtaatgatccccaaaaccgaggactgtataccccctag

SEQ ID NO: 218999 - DNA, 453 bp, Artificial Sequence
  derived and/or modified sequence
atgaggtttatggccggccccgccgggtcccaaagcttgggccccctttgtttccactctagtcctcaggcactgtacaccgtattgctaatagttttagtaatgatgtctctagtattcggaaagttcgtgcccgtcaactgggaaccaccccagcctctgcccttccctaagtatctccgctgctataggtgcctgctggagacgaaagaactaggctgtctccttggatcagacatctgcctgacacccgcaggctcttcctgtattacactgcacaaaaagaatagttccggctctgatgtgatggttagtgattgccgctccaaggaacagatgtcagactgcagcaacactcggacctcccctgtgtcaggtttttggattttttcacagtattgtttcttagatttctgtaacgaccctcagaaccgcgggctctacaccccttag

SEQ ID NO: 219000 - DNA, 453 bp, Artificial Sequence
  derived and/or modified sequence
atgagatttatggcgggccctgccggctcccaatcactgggtcctctctgttttcactcttccccccaggcactctacaccgttctgctgatcgtgctggtcatgatgagcctcgttttcggtaagtttgtgcccgtcaactgggaacccccacagccattacctttccctaagtatttgcgctgctataggtgtttgctcgaaacaaaagaactgggctgtcttctcggttctgacatttgcttgacaccagccggctcctcatgtatcacgctgcacaagaaaaactcctcaggctccgacgttatggtgtccgattgcagatcaaaagaacaaatgtccgattgctctaacacacgcacctcaccagtgtcaggattttggatcttttctcagtattgcttcttagacttttgtaacgatccacaaaataggggcttgtacactccgtag

SEQ ID NO: 219001 - DNA, 678 bp, Artificial Sequence
  derived and/or modified sequence
taagcagatttgcccagttgctggggagcaggaccatgttacacaggccacaaggtcggcgctttgagacgggacactgtaatatgttgttgtcgccacggagactactcgacaccgtgcctctttactcccggaaaaccatcccggaaccctagcccctggaagcggacactgtggacacttagcgcaccctgggccggtcctgccgggtggacaggagaagagcagaacgccacaaaaaccggattaattaccaggagacccaggcctcttagaaggcgcccacatccggcacctgcttctccgctgccagagataattcgaggcaatatccctagaatgctgggcaaatttgtaccagtcaattgggaaccaccacagccgctacccttccccaagtacctgagatgttatcgttgtcttctcgagactaaagagttggggtgtctcctgggcagcgatatttgtttaacccctgccgggagtagctgcattacactccataaaaaaaactcttctggctccgacgtgatggtaagcgactgccgctccaaggaacagatgtcagattgctcaaatacaagaacgagccctgtctcgggcttctggatttttagtcagtactgctttctcgacttctgtaatgacccacaaaaccgcggactttatactccctag

SEQ ID NO: 219002 - DNA, 453 bp, Artificial Sequence
  derived and/or modified sequence
atgcgattcatggcaggccccgccggtagccagagtcttggcccactttgcttccattcaagccctcaagctttatacactgtactcctcatcgtgcttgttatgatgtccctagtgttcgggaagtttgtgcccgttaactgggaacctccacagcctttgcccttccctaaatatttacgatgctacagatgcctgctcgaaactaaggaactgggatgcttactggggagcgacatatgtctgacgcccgcaggtagctcctgtataactctgcacaaaaaaaatagctcaggcagtgacgtgatggtctccgattgtagaagtaaggagcagatgtcagattgtagcaacacccgcacctctcccgttagcggcttttggatcttttcccagtactgttttctggatttctgtaatgaccctcagaaccgcggcctttacaccccttag

SEQ ID NO: 219003 - DNA, 453 bp, Artificial Sequence
  derived and/or modified sequence
atgcgctttatggctggccctgccggttctcagagtcttggacccctctgttttcactctagcccccaggccttatacacggtgctcctaatcgtccttgtgatgatgtctcttgtctttggaaaatttgttcctgtcaactgggaaccccctcagcctctcccatttccaaaatacctccgctgctataggtgcctcctggaaactaaggaactgggttgtctccttgggtctgatatctgcttgacccctgctggtagctcttgcataaccctgcataaaaagaattcttcggggagtgacgtcatggtatcagattgcaggtccaaagaacaaatgagtgattgttccaacacccggacctctcccgtcagcggtttctggatcttcagccaatattgttttcttgacttctgtaatgacccccaaaatcgcggattgtacacaccctag

SEQ ID NO: 219004 - DNA, 678 bp, Artificial Sequence
  derived and/or modified sequence
tgagctgaccttccatcatgttggggcgccgggccgtgctatacaggccataaggtaggcgccctgcgtagagatacagtgatctgttgttgtagacatggagattattccacgccctgtctcttcacacccggtaaacccagtagaaatccctcgccgtggaaaaggacactgtggactctgtcagcaccatgggctggacctgccggatggactggtgaggaacaaaacgcaaccaaaaccggcctgattactcgcagaccccggcctctgaggagacgaccccacccggctcctgctagtcctctgcccgaaattatccgcggcaatataccacgaatgcttggtaagttcgtccctgtaaattgggagcctccccaaccgttgccttttcccaaatatttacggtgttatcgctgccttctcgaaactaaggaattaggttgcctcctcggatcagatatctgcttaacccccgccgggtcatcgtgcataactctgcataaaaagaactcaagtggctctgacgtgatggtgagtgactgcaggtccaaagaacagatgtcagactgtagtaacaccaggacttcacccgtgagtggtttttggatattctcacagtactgctttctcgacttctgtaacgacccccagaaccgaggcttatataccccttag

SEQ ID NO: 219005 - DNA, 678 bp, Artificial Sequence
  derived and/or modified sequence
taggcagatctacctagctgttggggagcaggtccttgttatacagggcacaaagtgggagcccttagacgagacaccgtcatatgctgttgtcgccatggtgattattcaaccccctgcctcttcactcctggcaagccttctagaaacccaagtccttggaagcggaccctctggaccctgagtgctccttgggccgggcctgccggatggaccggggaagaacagaacgccaccaagaccggactgattaccagaagaccccggccgctacgacgccggccacaccctgccccagcgagccctctgccagaaatcattagggggaatataccacgcatgctcggcaagtttgtccccgtgaattgggagcccccacagccactgccattccctaaatatttacgctgctacaggtgtctgctcgagacaaaagaattgggctgcctcttagggtccgacatctgccttactcccgccggttcgtcctgcattacacttcacaagaaaaattcctccgggtctgatgttatggttagcgactgcagatcaaaggagcagatgagcgactgttctaatacccgtacttcaccagtaagcggattttggatcttctctcagtattgttttctcgacttttgtaatgacccacagaatagaggcctgtatacaccatag

SEQ ID NO: 219006 - DNA, 678 bp, Artificial Sequence
  derived and/or modified sequence
taagctgatttgccttcctgttggggagcggggccctgctacactggacacaaagtcggagccctgagacgtgacactgtgatatgttgttgcaggcacggagattactccacgccctgtctgttcacccctggcaaaccctccagaaacccttcaccgtggaaaagaactctctggactttaagtgccccttgggccgggcctgctggctggaccggcgaagagcagaatgcgaccaagaccggattgattactcggcgtccgaggcctttacgacggagacctcatcctgcgcccgcaagcccactacctgagattatcagaggtaatatccccagaatgctgggcaaattcgttcctgtcaactgggaacctcctcagccattgccattccccaagtacctgcggtgttaccggtgcctcctcgagacaaaggaattaggttgtctgttgggatctgacatatgcctcacacctgccggctcttcctgtatcacccttcataaaaaaaactctagcggatcagacgtgatggtatcagactgccgctccaaagaacagatgtcagattgtagcaatacacgcacctcaccagtctctggtttttggatattctctcagtattgttttctggacttctgtaacgaccctcaaaatcgcggcttatatacaccatag

SEQ ID NO: 219007 - DNA, 678 bp, Artificial Sequence
  derived and/or modified sequence
taagccgatctgcccagctgttggggtgccggaccttgttacacaggccataaagtgggcgcattgaggagggacacggtgatatgttgctgccgtcacggtgactatagcacaccttgtttattcacgcctggaaagccctcaagaaatccgtctccctggaaacgaaccttgtggacgttgagtgctccctgggcgggacctgcaggatggaccggagaagagcagaacgcaaccaagaccggtctgatcacacggaggcccagacctctccgaagaagaccccatcccgctcctgctagtccccttccagaaattattagaggaaacattccccgcatgttaggaaagtttgtgccagttaattgggagccccctcagccactgccgttccctaagtatctcagatgctaccggtgtctcctggagaccaaggaactggggtgtttgctcggatctgatatatgcctgactccagccggctcgtcctgtatcaccctgcataagaaaaatagctcagggtccgacgtcatggttagcgactgtcgcagcaaggagcagatgagtgactgctctaatactcgaacaagtccagtgagtggcttttggattttctctcaatactgcttcctcgacttctgcaatgatccacaaaaccgcggactgtataccccatag

SEQ ID NO: 219008 - DNA, 678 bp, Artificial Sequence
  derived and/or modified sequence
tgagctgatcttccatcctgttggggggcaggaccatgttacacagggcacaaggtgggagctctcaggcgggacaccgtgatttgctgctgtcggcacggggattatagcacaccatgcctatttacacctggaaaaccaagcagaaacccctctccatggaagagaaccctgtggaccctgagtgccccctgggctgggcccgctggatggacaggagaagaacaaaacgccacgaaaaccggcctcataacccgaaggcccagacctttgagaaggagacctcatccagcaccagccagcccactgccagaaattatacgtggcaatattccaagaatgttaggaaaatttgttcccgtgaattgggaaccacctcaaccactccccttcccaaaatatctccgttgttatcgctgcctccttgagacaaaggaacttggttgtctcctcggatctgacatctgcctcacccctgcaggatccagttgtattactttgcacaaaaagaatagcagtgggagtgacgtgatggtgtccgattgtcgaagtaaggaacagatgagtgattgttctaatacgaggacctccccagtgtccggattctggattttctctcaatactgcttccttgacttttgtaatgacccacaaaaccggggcctgtataccccttag

SEQ ID NO: 219009 - DNA, 453 bp, Artificial Sequence
  derived and/or modified sequence
atgcgctttatggccggccccgccgggtcccaaagcttaggtcccctctgttttcattctagtccccaggcactgtataccgtgctgctgattgtgctcgttatgatgtcactggtgttcggaaagtttgtgccagtcaattgggagcctccccagcctctgcccttcccaaaataccttcgctgttatcgctgtctgctggagacaaaagaacttggctgcctccttggcagcgacatttgcctgacccccgccggatcaagctgcattactctccacaagaagaattcctctggctccgatgtgatggtcagcgactgtcgttccaaagaacaaatgtccgattgcagcaatacaagaacctccccagttagcggtttttggatcttctctcaatactgctttttggatttctgtaatgatccccaaaaccgcgggttgtatacaccctag

SEQ ID NO: 219010 - DNA, 453 bp, Artificial Sequence
  derived and/or modified sequence
atgcggtttatggcaggaccagctggttcccagagtcttggacctctgtgtttccattcttccccccaggctctgtataccgtgctcctcatagtgctcgttatgatgtcactcgtgtttggcaagtttgtgcccgtgaactgggaacccccccagcctctgccctttcctaagtatttacgctgctacagatgtttgttggaaaccaaagagctaggctgccttcttggatccgacatatgtttaacccctgccggcagcagctgcattacactacacaaaaaaaattcgtcaggatctgatgttatggtatccgactgcaggtctaaagaacaaatgagtgattgcagcaatacacgaacctctcctgtttcaggcttctggattttttcgcagtactgcttcctggatttttgtaatgatccccagaaccgaggattatatactccctag

SEQ ID NO: 219011 - DNA, 447 bp, Artificial Sequence
  derived and/or modified sequence
atgcagacctttcccgtggccggagcattagaccctgcaattctcgacacttcctcccctcaggctttatacactgtactcctgatcgtgttggttatgatgagcctggtgttcggcaaattcgtacctgtgaattgggaacctcctcagccgctgccatttccaaaatatctgcgatgctatcgctgcctcttagaaaccaaagagctgggctgtcttctcggatctgatatctgtctgacaccagccggctcctcatgtattaccttgcataaaaagaactcaagtggatccgacgtgatggtctctgattgccgctctaaagaacagatgagcgattgctcgaatacccgaacctctcccgtctctggattttggatcttctcacaatactgtttcctcgatttttgcaacgacccccagaataggggcctctacacaccttag

SEQ ID NO: 219012 - DNA, 447 bp, Artificial Sequence
  derived and/or modified sequence
atgcagacatttcctgtagccggcgccctggacccagccatcctcgacacctccagcccccaggccttatatacagtattactaatcgttctcgtgatgatgagccttgttttcggaaagtttgtcccagttaattgggagcccccccagcccctaccattccccaaatatctgaggtgttataggtgcctcttggagaccaaggaattgggatgcctacttggaagcgacatctgtctcactcccgctggaagctcatgtattaccttgcacaaaaagaactcatcaggctctgacgtaatggtctccgattgtcgatccaaagagcaaatgtccgattgtagcaacactcgcacttcgcctgtgtctggcttctggattttttcccagtattgttttcttgatttctgcaatgatccacaaaataggggcttatacactccatag

SEQ ID NO: 219013 - DNA, 447 bp, Artificial Sequence
  derived and/or modified sequence
atgcaaacctttcccgttgctggagctttagaccccgccatcttagacactagttctccccaagccctgtacacagtcctgttaatcgtattggttatgatgtccctggttttcggtaaattcgtccccgtgaattgggagccaccccagcctctgccgtttccaaaatatttacggtgttaccggtgcctcctcgagacgaaggaactcggctgtctgctaggatccgatatctgtcttacccccgccggtagttcttgcatcactttacataagaaaaattcgtccggctccgatgtgatggtgtccgattgtagatccaaggagcagatgagcgattgcagtaatacaaggaccagtcccgtgtcagggttttggattttctcccaatattgttttttagatttttgtaacgatcctcagaacagaggactttataccccttag

SEQ ID NO: 219014 - DNA, 447 bp, Artificial Sequence
  derived and/or modified sequence
atgcaaaccttccccgtggccggagccctcgacccagcaattctggacacatcaagccctcaagctctctacactgttctgctgatcgttcttgtcatgatgtccctggtgttcggaaagtttgtgcccgtgaattgggaaccaccacagccccttccctttccaaagtatctgcgctgctatcgatgtcttttagagacaaaagagctgggatgtctgttagggagtgatatttgcctgacacccgccggttctagttgcatcactttacacaagaagaattccagcggaagtgacgtgatggtatccgactgtagatctaaagaacagatgtccgactgctcaaacaccagaacttcacccgtctcaggattttggattttctcgcagtactgcttccttgatttttgcaatgatccacagaacagggggttgtacacaccatag

SEQ ID NO: 219015 - DNA, 447 bp, Artificial Sequence
  derived and/or modified sequence
atgcaaacctttcccgttgccggagccctggatcctgccatccttgacacaagttccccccaagccctttacacagtcttgttaattgtgctcgtgatgatgtcactggttttcggaaagttcgtgcccgtcaactgggaaccaccacaacccctgccctttcccaaatatctaaggtgttacagatgtcttctcgagaccaaagagcttggatgtctgcttggttcagacatatgcctaacacctgctggatcaagctgtatcacactccataagaaaaacagttcaggtagcgatgtgatggtttccgattgtcgctcaaaagagcaaatgtccgactgcagcaatacacgaacctcacctgtgtccgggttctggattttttctcaatactgtttcctcgacttctgcaacgatcctcaaaaccgaggcctttacaccccgtag

SEQ ID NO: 219016 - DNA, 447 bp, Artificial Sequence
  derived and/or modified sequence
atgcagacctttccagtcgcaggtgcactggacccagctatactggacacaagttcaccacaggccctctataccgtgttactgattgtcctcgtgatgatgagtctcgttttcggaaaattcgtgcccgtcaactgggagcctcctcaacctctgccctttcctaaatatcttaggtgctatcgatgcctcctggaaaccaaagagctgggctgcctcttgggctcagacatctgcctcacccctgcaggttcaagctgtattacacttcataagaagaactcatccggttcggatgtgatggtgagcgactgtcgctccaaagaacagatgagtgactgttccaacacacgcacttccccagtttcaggattttggatcttttctcagtactgttttctcgacttttgtaatgaccctcagaaccgcggtttatataccccttag

SEQ ID NO: 219017 - DNA, 720 bp, Artificial Sequence
  derived and/or modified sequence
atgcagaccttcccagttgctggggcgctggaccctgctatactggacacaagcagcccccaagccctctacacggtcctcttaatagtgctggtcatgatgagcttggtgtttggtaagtttgttcctgtcaattgggaaccccctcaaccacttccattccccaaatacctgcgctgctaccgatgcctcttggagaccaaggagttagggtgccttctgggatctgacatctgcctcaccccagctggcagcagctgcatcactctccacaaaaagaacagcagcggttctgacgtcatggtgagtgactgccgaagtaaggagcagatgagtgattgttcaaatacccgaacttctccggtgtctggcttctggatattctctcaatactgcttcctggatttctgcaatgaccctcaaaacagagggctctatactccttagtgtgactgcagcaaactttggtgtaaaattccaccagtttccagccaccttcctgacttctatctgggcttggccaggacttctagtccctcacaccagccctccttgcctccctccagccactggaccccagccttggctcttcctcttggttgacgcccttcagcacacttactgctactctgtacccccagccctactgcccaccaggtttcctctcttgtcccctagtccctggatgtttctcccaaataaatttgtgtgtaaactgtt

SEQ ID NO: 219018 - DNA, 453 bp, Artificial Sequence
  derived and/or modified sequence
atgagattcatggccggccccgccggcagccagagcctgggccccctgtgcttccacagcagcccccaggccctgtacaccgtgctgctgatcgtgctggtgatgatgagcctggtgttcggcaagttcgtgcccgtgaactgggagcccccccagcccctgcccttccccaagtacctgagatgctacagatgcctgctggagaccaaggagctgggctgcctgctgggcagcgacatctgcctgacccccgccggcagcagctgcatcaccctgcacaagaagaacagcagcggcagcgacgtgatggtgagcgactgcagaagcaaggagcagatgagcgactgcagcaacaccagaaccagccccgtgagcggcttctggatcttcagccagtactgcttcctggacttctgcaacgacccccagaacagaggcctgtacaccccctag

SEQ ID NO: 219019 - DNA, 444 bp, Artificial Sequence
  derived and/or modified sequence
atggccggccccgccggcagccagagcctgggccccctgtgcttccacagcagcccccaggccctgtacaccgtgctgctgatcgtgctggtgatgatgagcctggtgttcggcaagttcgtgcccgtgaactgggagcccccccagcccctgcccttccccaagtacctgagatgctacagatgcctgctggagaccaaggagctgggctgcctgctgggcagcgacatctgcctgacccccgccggcagcagctgcatcaccctgcacaagaagaacagcagcggcagcgacgtgatggtgagcgactgcagaagcaaggagcagatgagcgactgcagcaacaccagaaccagccccgtgagcggcttctggatcttcagccagtactgcttcctggacttctgcaacgacccccagaacagaggcctgtacaccccctag

SEQ ID NO: 219020 - DNA, 447 bp, Artificial Sequence
  derived and/or modified sequence
atgcagaccttccccgtggccggcgccctggaccccgccatcctggacaccagcagcccccaggccctgtacaccgtgctgctgatcgtgctggtgatgatgagcctggtgttcggcaagttcgtgcccgtgaactgggagcccccccagcccctgcccttccccaagtacctgagatgctacagatgcctgctggagaccaaggagctgggctgcctgctgggcagcgacatctgcctgacccccgccggcagcagctgcatcaccctgcacaagaagaacagcagcggcagcgacgtgatggtgagcgactgcagaagcaaggagcagatgagcgactgcagcaacaccagaaccagccccgtgagcggcttctggatcttcagccagtactgcttcctggacttctgcaacgacccccagaacagaggcctgtacaccccctag

SEQ ID NO: 219021 - DNA, 678 bp, Artificial Sequence
  derived and/or modified sequence
tgagccgacctgcccagctgctggggcgccggcccctgctacaccggccacaaggtgggcgccctgagaagagacaccgtgatctgctgctgcagacacggcgactacagcaccccctgcctgttcacccccggcaagcccagcagaaaccccagcccctggaagagaaccctgtggaccctgagcgccccctgggccggccccgccggctggaccggcgaggagcagaacgccaccaagaccggcctgatcaccagaagacccagacccctgagaagaagaccccaccccgcccccgccagccccctgcccgagatcatcagaggcaacatccccagaatgctgggcaagttcgtgcccgtgaactgggagcccccccagcccctgcccttccccaagtacctgagatgctacagatgcctgctggagaccaaggagctgggctgcctgctgggcagcgacatctgcctgacccccgccggcagcagctgcatcaccctgcacaagaagaacagcagcggcagcgacgtgatggtgagcgactgcagaagcaaggagcagatgagcgactgcagcaacaccagaaccagccccgtgagcggcttctggatcttcagccagtactgcttcctggacttctgcaacgacccccagaacagaggcctgtacaccccctag

SEQ ID NO: 219022 - DNA, 730 bp, Artificial Sequence
  derived and/or modified sequence
agtcatgcgttttatggcaggccctgcagggagccagagtctgggtcccctgtgcttccacagcagcccccaagccctctacacggtcctcttaatagtgctggtcatgatgagcttggtgtttggtaagtttgttcctgtcaattgggaaccccctcaaccacttccattccccaaatacctgcgctgctaccgatgcctcttggagaccaaggagttagggtgccttctgggatctgacatctgcctcaccccagctggcagcagctgcatcactctccacaaaaagaacagcagcggttctgacgtcatggtgagtgactgccgaagtaaggagcagatgagtgattgttcaaatacccgaacttctccggtgtctggcttctggatattctctcaatactgcttcctggatttctgcaatgaccctcaaaacagagggctctatactccttagtgtgactgcagcaaactttggtgtaaaattccaccagtttccagccaccttcctgacttctatctgggcttggccaggacttctagtccctcacaccagccctccttgcctccctccagccactggaccccagccttggctcttcctcttggttgacgcccttcagcacacttactgctactctgtacccccagccctactgcccaccaggtttcctctcttgtcccctagtccctggatgtttctcccaaataaatttgtgtgtaaactgtt

SEQ ID NO: 219023 - DNA, 453 bp, Artificial Sequence
  derived and/or modified sequence
atgcgcttcatggcaggccccgcaggatctcagagcctgggtcctttatgctttcactcctctcctcaggcactctatactgtgctgctcatagtcttagtcatgatgagtttggtttttggaaaatttgtgcccgtcaattgggaaccaccccagcctctccctttcccgaagtatctgagatgttaccggtgcctgcttgaaacaaaagaacttggctgtttattaggttccgatatatgccttacacccgccggctcaagctgcattaccttacacaaaaagaactcgagtggatctgatgtaatggtcagcgactgccgatccaaagaacagatgtctgactgcagcaacactcggacatcacctgtcagtggcttctggatattctctcagtactgtttcctggatttctgcaacgatcctcagaaccggggcctgtacacaccctag

SEQ ID NO: 219024 - DNA, 444 bp, Artificial Sequence
  derived and/or modified sequence
atggcaggccccgccggctctcagtctctgggccccttgtgcttccactcctccccacaggctctgtacacagtgctgctaattgtgctggttatgatgtcactcgttttcggcaaattcgtgccggtgaattgggagccaccacagccgttgccatttcccaaatatctgaggtgctataggtgcctgttggagactaaggagctgggctgcctcctggggtccgacatctgtctgacacctgcaggaagctcttgcatcaccttacataagaagaactctagcggcagcgacgtgatggtgtcagactgccggtctaaagagcagatgtctgactgttccaatacgagaacttcaccggtatcgggtttttggattttctcgcaatactgctttttggacttttgcaacgatccacagaaccgaggcctgtataccccatag

SEQ ID NO: 219025 - DNA, 447 bp, Artificial Sequence
  derived and/or modified sequence
atgcagacgtttccagttgcaggagccttggaccctgctatcctggacaccagcagtccccaagccctctacaccgtactgctcatagtgttggtgatgatgtcattagtcttcggaaagtttgtgcctgtgaactgggaaccaccccagcccctaccattccccaaatatctgcgatgttataggtgtctgctggagactaaagaactgggctgcctgctgggatccgacatctgtctaacccctgccggatcctcctgtattactcttcataaaaaaaactccagtggctccgatgttatggtgtcagactgccggtccaaggaacaaatgtctgactgctctaatacccgaacaagcccagtcagcggattttggatcttctcccagtattgctttctcgatttctgtaacgatccacagaaccgcggcctgtataccccttag

SEQ ID NO: 219026 - DNA, 453 bp, Artificial Sequence
  derived and/or modified sequence
atgagatttatggctggcccagccggatcccaatctttaggccctctctgcttccatagtagcccccaggcactttatacagtcctcctgattgtactggtgatgatgtctctggtttttgggaaattcgtgccagtcaactgggaaccaccccagccactcccattccctaaatatctcaggtgttatcgctgtctgctggagacaaaggaactagggtgcctgctgggatcagacatctgccttactcccgccggttcaagttgtatcacactgcacaaaaaaaattcgagtggcagcgacgtgatggtgagcgattgtaggagcaaggaacagatgagcgattgtagtaacacacgcaccagtcctgtgagtgggttttggattttctctcagtattgctttcttgacttctgcaatgatcctcagaataggggcctgtatacaccctag

SEQ ID NO: 219027 - DNA, 453 bp, Artificial Sequence
  derived and/or modified sequence
atgcgcttcatggctggccccgccggcagccagagcctagggcctctctgctttcattcttctccccaggccctgtacacagtactcctgattgtgctcgtcatgatgtcccttgtttttggaaagttcgttccggtgaactgggagcccccgcaacctttaccattccccaagtacctgcggtgttatcgctgcctgctagagaccaaagaactcggatgcttgttgggctctgacatttgtttaactcccgccgggtcttcttgcattacactgcacaaaaagaactcctctgggtccgatgtgatggtgtctgattgtcggtcgaaagaacagatgtccgattgctcaaatacaagaacctctcctgtcagtggattttggatcttctctcagtattgtttcctggacttttgcaacgacccacagaaccgcgggttgtacactccctag

SEQ ID NO: 219028 - DNA, 678 bp, Artificial Sequence
  derived and/or modified sequence
taagctgaccttccatcttgttggggggccggtccctgttacactggacataaggttggcgcactgcggagagataccgtcatttgctgctgtcggcacggcgattacagcactccttgcctgttcaccccaggaaagccatcacggaaccctagtccctggaagcgtacgctgtggacgctgtcagccccatgggcagggcccgctggctggacaggcgaggagcagaatgccactaaaactggcttaattacccgcaggcctcggccgctgcgccgtcggcctcaccctgcgcccgcctctcccctcccagaaatcatcaggggcaatatccccaggatgcttggaaagtttgtccccgttaattgggagcctccacagccgctgccctttcctaagtacttgagatgctataggtgtcttctagaaaccaaggagctcgggtgcttattagggagcgacatctgtttgactccagccggctcaagttgtattaccctgcacaaaaaaaattcttccggcagcgatgtgatggtatccgactgcagaagcaaagagcagatgagcgactgttcaaacacccgaacatcccccgtgtctggtttttggatcttcagtcagtactgctttctggatttctgtaacgacccccagaatcgcggcttgtataccccgtag

SEQ ID NO: 219029 - DNA, 453 bp, Artificial Sequence
  derived and/or modified sequence
atgagatttatggctggtccagccggcagtcagagtctgggtcctctatgttttcacagcagccctcaggctctatacactgtgctcctcattgtcctggtcatgatgtccttggtattcggcaaatttgtgcccgtcaactgggaaccaccacagcctcttcctttccctaaataccttagatgctatcgctgtctattggagaccaaagaactgggttgtctgcttggaagtgatatttgcctcacgccggctggaagcagctgcatcacgctgcataagaaaaacagcagtgggtctgacgtaatggttagcgactgtcgtagtaaggagcagatgagtgattgctcaaacactaggacaagccctgtaagtgggttctggatatttagccaatactgcttcctagatttctgcaatgatccacagaatcgagggctttacaccccctag

SEQ ID NO: 219030 - DNA, 453 bp, Artificial Sequence
  derived and/or modified sequence
atgagatttatggctggtccagccggttcacagtcactcggccctttgtgttttcatagcagtccccaggccttatatacagtgctgctgatcgtcctggtgatgatgtccctcgtgttcggcaaattcgtccccgtaaattgggaaccaccacagccacttccatttcccaagtaccttagatgctaccgatgcctgttagagaccaaagagttggggtgccttctgggctccgacatctgtctcacccccgccggcagttcctgtattaccctgcacaagaagaattcaagcgggagcgacgtcatggtctcagactgtaggagtaaggaacagatgtcggattgttcaaacacgcgaacatcccccgtgagcggcttctggatcttcagccagtactgtttcttagatttctgtaatgatccccaaaacaggggtctatacacaccctag

SEQ ID NO: 219031 - DNA, 678 bp, Artificial Sequence
  derived and/or modified sequence
tgagctgatcttccttcgtgctggggcgccgggccttgttacactggccacaaggtgggagccctacgtagggatactgtgatctgctgctgccgccacggcgactactctactccctgtctgtttacccccggcaaaccgagcaggaatccatctccttggaaacggaccctgtggaccctgtcagctccctgggccggacccgccggctggaccggagaggagcagaatgctacgaagaccggccttatcactcggcgtccgcggcctttgcgcaggcgtccgcacccagctccagcctctcctctccccgaaattatccgagggaacataccccgcatgctgggcaaatttgtgccagtgaactgggaaccgccacagcccttaccctttcccaaatatctcagatgctacagatgccttctggaaacgaaagaactcggctgcttgttgggttcagacatctgtctgacacccgctggctcttcgtgcatcaccttgcataagaaaaatagttccggatcagacgtaatggtctccgattgtcggtctaaggagcagatgagcgactgcagcaatactcgaaccagtccagtgagtgggttttggatattttcccagtactgcttcctcgacttttgcaatgatccacagaatcgcggcctatatactccctag

SEQ ID NO: 219032 - DNA, 678 bp, Artificial Sequence
  derived and/or modified sequence
tgagctgatctcccctcctgctggggggctgggccttgctataccgggcataaggtcggcgctctccgcagagatacagtgatatgttgttgcagacatggcgactacagcaccccttgtctttttactccagggaaacctagtcggaacccatccccgtggaagaggacgctgtggacactctccgcaccttgggccggaccagcgggctggactggcgaggaacagaatgcaaccaagactgggcttatcacccggcggccacgtcctttaaggcgcagaccccatccagcgccggcttccccgctgcctgagatcattcgggggaacataccccggatgctcggtaaattcgtaccagtgaattgggaaccccctcagcctctaccgttccccaagtatctgcggtgctacaggtgcctgcttgagacaaaggaattggggtgtctactcgggtctgacatctgcctgacgccagctgggtcttcctgcatcacacttcataagaaaaactcttcaggttctgatgtgatggtgtctgactgccgcagtaaggagcagatgtccgattgtagcaacactcggacatccccagtcagcgggttttggatcttctctcagtactgctttcttgatttttgcaacgacccccagaatcgcggtttgtatacgccatag

SEQ ID NO: 219033 - DNA, 678 bp, Artificial Sequence
  derived and/or modified sequence
tgagcagacttgcccagctgttggggtgccggcccgtgctacaccggccacaaagtcggagctctgaggcgagacaccgtgatctgttgttgtcgacacggggactacagtacaccctgtctctttacacccggaaagccatcacgcaatccctcaccgtggaagaggaccctatggacgctgtctgcaccatgggcggggcctgctggttggacaggcgaggaacagaacgcaaccaagacaggcctgatcacccgcaggccgcgccctttaagaagaagacctcatccagcccccgcctctccattgccggagatcattcgcgggaatattccccggatgctcgggaagtttgttccagtgaattgggagccaccccagccactccccttccctaaatatcttcggtgttaccgctgtctacttgagactaaggaactgggatgtctgctgggcagtgacatttgcttgacaccagctggctcttcctgcattacactccacaagaaaaactcctccggttccgatgtgatggtctccgactgtagatccaaagagcaaatgagtgattgttccaacacgcggacatcacctgttagcggattctggatattcagccaatattgtttcttggacttttgtaacgatcctcagaatcgtgggctctatacaccctag

SEQ ID NO: 219034 - DNA, 678 bp, Artificial Sequence
  derived and/or modified sequence
taagctgatctgccgtcttgttggggcgcaggtccatgttataccggtcacaaagtgggcgccctgaggcgtgacaccgtgatctgttgctgccgacatggtgattatagtacaccctgcttatttacacccggcaaaccaagtagaaatccttcgccctggaagcgaacactttggacattgagtgctccatgggccggacccgccgggtggacaggcgaggagcaaaatgccacgaaaacaggtcttatcactagaagacctaggcctctcagaagacgtcctcaccccgccccagccagtcctctcccagagatcattcgagggaacatccctaggatgctgggcaaattcgtgccagtgaactgggagcccccgcagccgctgcccttcccgaaatacctgcggtgctaccgatgcctgctggagactaaggagttgggatgtctgcttggctcggacatctgtctgacacccgcgggatcatcatgcatcacgctgcacaaaaagaactcttccggatcggacgtcatggtgagcgattgcaggtctaaggaacagatgtctgattgctcaaataccagaacatcccctgtttctggcttctggatcttttcgcagtactgctttctagacttttgcaatgacccccagaaccggggcctgtacaccccatag

SEQ ID NO: 219035 - DNA, 678 bp, Artificial Sequence
  derived and/or modified sequence
tgagcggacctcccctcttgttggggagcggggccatgttacacaggccacaaggtgggagcccttagacgggacactgttatttgctgctgtcgccatggagactacagcactccttgcctgtttactccaggcaaaccttcgcgtaatcccagcccatggaagcgcactctctggaccctttccgccccctgggctggcccagccggctggacgggcgaggagcagaacgctacaaagacaggactgataactcggcggccccggccactaagacgcaggccacaccccgcccctgcaagccctctgcccgagattatccgggggaatatacctcgcatgttaggcaagtttgtcccagtcaactgggagcctcctcagccactaccatttccgaaatacctgcggtgttacaggtgcctgctagagactaaggagttgggatgccttctaggaagtgacatttgcctaacacccgctggctcctcatgtatcacactccataagaagaatagcagcggctccgatgtgatggtatccgactgcagatcaaaggagcaaatgtctgattgcagcaatactagaacttcccctgtgtcaggattctggatcttttcccagtactgcttcctggacttctgtaatgacccacagaacagagggctgtacaccccctag

SEQ ID NO: 219036 - DNA, 453 bp, Artificial Sequence
  derived and/or modified sequence
atgcggttcatggcagggcccgcgggctctcagagtctaggaccgctgtgtttccattcatcaccccaggcgctatataccgttctccttatcgtcctagtgatgatgtccctcgtcttcggtaaattcgtgcctgtgaactgggagcctccgcagcctttgcccttccccaagtacctgcgatgttaccggtgtctactagagacaaaggagctgggctgtctgttgggctccgatatttgcctcacccctgccgggtctagctgcataacccttcacaaaaagaactccagcggctcagacgtcatggtgtctgactgccggagcaaggagcagatgagtgactgttcaaatactcgcaccagccccgtaagcggcttctggattttcagtcagtattgttttctagatttttgtaacgatccccagaaccggggtctgtacacaccctag

SEQ ID NO: 219037 - DNA, 453 bp, Artificial Sequence
  derived and/or modified sequence
atgaggtttatggccggcccagccggatcccaatccctgggtcctctctgcttccactctagcccgcaggcgctgtacaccgtgttgctgatcgtgctggtaatgatgtctttagttttcggaaagtttgtgccggttaattgggaacccccacagccactcccttttcctaagtacctaaggtgctataggtgcctcctggagaccaaggagctgggttgtctgctaggcagcgatatttgcctgacccctgcggggagctcatgtatcacactgcataagaagaattcatccgggagcgacgttatggtttctgactgtcggtcaaaagaacagatgagtgattgctcaaacacccggactagtcctgtcagtgggttctggattttttcacaatactgcttcttggatttctgcaatgatcctcagaacagggggctatacacgccgtag

SEQ ID NO: 219038 - DNA, 447 bp, Artificial Sequence
  derived and/or modified sequence
atgcaaactttccctgtagccggcgcactggatcccgccattctcgacacctcttctcctcaggctctttacactgtactcctgatcgtgctggttatgatgtcactggtgtttggtaaattcgttccagtgaactgggagcctccccagccactgccgttccccaagtacctgcgctgctaccgctgtttgctcgaaaccaaagaactaggctgtctattgggatccgacatctgtttgaccccagccggctcatcctgcattacgcttcataagaagaactcaagtggttcggatgtcatggtgtctgattgtaggtcaaaagaacagatgtctgactgtagcaatactaggacttcaccagtcagcggattctggatattttcccagtactgtttcctggacttctgcaacgaccctcaaaatcgtggcctctataccccatag

SEQ ID NO: 219039 - DNA, 447 bp, Artificial Sequence
  derived and/or modified sequence
atgcagactttcccagttgccggggcgctggaccctgccatccttgacactagctcccctcaggcgctatatacagtactcttaatcgtgttagtgatgatgtcgctggtattcggtaaatttgtcccagtgaactgggagccacctcaaccattgccctttccaaagtatctgaggtgttataggtgtctgctggagaccaaggagctggggtgtctcttaggaagcgatatttgcctgacacccgccggttcttcatgtattactctgcacaagaagaacagctcagggagtgatgtcatggtgagcgactgccgatccaaagaacaaatgtcggactgttcaaacacccgtaccagccccgtaagcggattctggatcttcagccagtactgctttctcgacttttgtaacgacccccaaaatcgcgggctttacaccccgtag

SEQ ID NO: 219040 - DNA, 447 bp, Artificial Sequence
  derived and/or modified sequence
atgcagacattcccggtggccggagccctggacccagctatacttgacacctcaagcccacaggccctctacacagttctcctcattgtgctagtaatgatgagtctggtctttggcaaattcgtgccagtgaactgggaacctccacagccacttcccttccctaagtaccttaggtgttacaggtgcctgttagagacaaaagagctaggttgtcttctgggttctgacatctgtcttacacctgccggaagctcatgcataactctgcataaaaaaaactctagtgggagtgatgtcatggtctcagattgccgctctaaggagcaaatgtccgactgttcaaacacgcggacgtctccggtaagcgggttttggatcttctcccagtactgttttctcgatttttgtaatgatccccagaatcgaggactttataccccctag

SEQ ID NO: 219041 - DNA, 447 bp, Artificial Sequence
  derived and/or modified sequence
atgcagacattccccgtcgccggcgccctggacccagcaatcctggacacaagcagtcctcaggctctctataccgtcttgttaattgtgctggtaatgatgtctctagtatttggcaagtttgtgccggtgaactgggagccaccgcagcctttgcccttcccaaaatacctgaggtgctaccggtgcctgctggagaccaaggagttggggtgcttgctgggatccgatatctgtctgactcctgcggggtccagttgcattaccctgcacaagaaaaattcttcgggctcagacgttatggtgtcggattgcagatccaaggagcaaatgagcgactgtagtaacactaggacaagtcctgtctcagggttttggattttttctcagtactgctttctcgatttctgcaatgatccccagaaccggggactgtacacgccctag

SEQ ID NO: 219042 - DNA, 447 bp, Artificial Sequence
  derived and/or modified sequence
atgcagacattcccagttgctggtgccctggatccagccatactggacaccagcagccctcaggccctctatacggtgctcttgatagtgctcgtgatgatgagcctggtgttcgggaagttcgtcccagtaaactgggagccgccacagccgttaccatttccgaaatatttacggtgctacaggtgcctcctcgaaacaaaagagctgggctgcctgcttggctctgacatttgcctgacgcccgcagggtcctcgtgcattactctgcataaaaagaactcctcagggtcagatgtgatggtgagtgattgtcggtccaaggagcaaatgagtgattgtagcaacactagaacaagccccgtctcgggcttctggatcttcagccagtattgtttcctcgacttttgcaatgatcctcagaacagaggcctttatactccatag

SEQ ID NO: 219043 - DNA, 447 bp, Artificial Sequence
  derived and/or modified sequence
atgcagactttcccagtagcaggggctctggatcctgccatcttggacaccagtagtccacaggcactctacacagtattgcttatcgtactagtgatgatgtccctggtttttggaaaattcgtgcctgtgaactgggagccaccgcaacctctgcccttcccaaaatacttgagatgctatcgatgcttattggaaaccaaagaactgggatgcctgctgggttccgacatctgtttgaccccagcgggctcctcttgcattactttgcataagaaaaactctagcggcagtgatgttatggtctcagactgccgcagcaaggagcagatgtcagattgctctaacactcggacctcccccgtaagcgggttttggattttctcccaatactgcttcctagatttctgtaacgatccccagaacagggggttgtacacaccgtag

SEQ ID NO: 219044 - DNA, 453 bp, Artificial Sequence
  derived and/or modified sequence
atgaggttcatggccggccctgctggcagccagagcctgggccccctgtgcttccacagcagcccccaggccctgtacacagtgctgctgattgtgctggtgatgatgagcctggtgtttgggaagtttgtgcctgtgaactgggagcccccccagcccctgcccttccccaagtacctgcgctgctaccgctgcctgctggagaccaaggagctgggctgcctgctgggcagtgacatctgcctgaccccagctggcagcagctgcatcaccctgcacaagaagaacagcagcggcagtgatgtgatggtgtctgactgccgcagcaaggagcagatgtctgactgcagcaacaccaggaccagccctgtgtctggcttctggatcttcagccagtactgcttcctggacttctgcaatgacccccagaacagaggcctgtacaccccctag

SEQ ID NO: 219045 - DNA, 444 bp, Artificial Sequence
  derived and/or modified sequence
atggccggccctgctggcagccagagcctgggccccctgtgcttccacagcagcccccaggccctgtacacagtgctgctgattgtgctggtgatgatgagcctggtgtttgggaagtttgtgcctgtgaactgggagcccccccagcccctgcccttccccaagtacctgcgctgctaccgctgcctgctggagaccaaggagctgggctgcctgctgggcagtgacatctgcctgaccccagctggcagcagctgcatcaccctgcacaagaagaacagcagcggcagtgatgtgatggtgtctgactgccgcagcaaggagcagatgtctgactgcagcaacaccaggaccagccctgtgtctggcttctggatcttcagccagtactgcttcctggacttctgcaatgacccccagaacagaggcctgtacaccccctag

SEQ ID NO: 219046 - DNA, 447 bp, Artificial Sequence
  derived and/or modified sequence
atgcagaccttccctgtggccggggccctggaccctgccatcctggacaccagcagcccccaggccctgtacacagtgctgctgattgtgctggtgatgatgagcctggtgtttgggaagtttgtgcctgtgaactgggagcccccccagcccctgcccttccccaagtacctgcgctgctaccgctgcctgctggagaccaaggagctgggctgcctgctgggcagtgacatctgcctgaccccagctggcagcagctgcatcaccctgcacaagaagaacagcagcggcagtgatgtgatggtgtctgactgccgcagcaaggagcagatgtctgactgcagcaacaccaggaccagccctgtgtctggcttctggatcttcagccagtactgcttcctggacttctgcaatgacccccagaacagaggcctgtacaccccctag

SEQ ID NO: 219047 - DNA, 678 bp, Artificial Sequence
  derived and/or modified sequence
tgagctgacctgcccagctgctggggcgccggcccctgctacacaggccacaaggtgggcgccctgcggcgggacaccgtcatctgctgctgcagacatggagactacagcaccccctgcctcttcacccctgggaagcccagcaggaaccccagcccctggaagaggaccctgtggaccctgagcgccccctgggccggccctgctggctggacaggagaggagcagaatgccaccaagacaggcctcatcacccggcggccccggcccctgcggcggcggccccacccagccccagccagccccctgcctgagatcatccggggcaacatccccaggatgctgggcaagtttgtgcctgtgaactgggagcccccccagcccctgcccttccccaagtacctgcgctgctaccgctgcctgctggagaccaaggagctgggctgcctgctgggcagtgacatctgcctgaccccagctggcagcagctgcatcaccctgcacaagaagaacagcagcggcagtgatgtgatggtgtctgactgccgcagcaaggagcagatgtctgactgcagcaacaccaggaccagccctgtgtctggcttctggatcttcagccagtactgcttcctggacttctgcaatgacccccagaacagaggcctgtacaccccctag

SEQ ID NO: 219048 - DNA, 726 bp, Artificial Sequence
  derived and/or modified sequence
atgcgttttatggcaggccctgcagggagccagagtctgggtcccctgtgcttccacagcagcccccaagccctctacacggtcctcttaatagtgctggtcatgatgagcttggtgtttggtaagtttgttcctgtcaattgggaaccccctcaaccacttccattccccaaatacctgcgctgctaccgatgcctcttggagaccaaggagttagggtgccttctgggatctgacatctgcctcaccccagctggcagcagctgcatcactctccacaaaaagaacagcagcggttctgacgtcatggtgagtgactgccgaagtaaggagcagatgagtgattgttcaaatacccgaacttctccggtgtctggcttctggatattctctcaatactgcttcctggatttctgcaatgaccctcaaaacagagggctctatactccttagtgtgactgcagcaaactttggtgtaaaattccaccagtttccagccaccttcctgacttctatctgggcttggccaggacttctagtccctcataccagccctccttgcctccctccagccactggaccccagccttggctcttcctcttggttgacgcccttcagcacacttactgctactctgtacccccagccctactgcccaccaggtttcctctcttgtcccctagtccctggatgtttctcccaaataaatttgtgtgtaaactgtt

SEQ ID NO: 219049 - DNA, 720 bp, Artificial Sequence
  derived and/or modified sequence
atgcagaccttcccagttgctggggcgctggaccctgctatactggacacaagcagcccccaagccctctacacggtcctcttaatagtgctggtcatgatgagcttggtgtttggtaagtttgttcctgtcaattgggaaccccctcaaccacttccattccccaaatacctgcgctgctaccgatgcctcttggagaccaaggagttagggtgccttctgggatctgacatctgcctcaccccagctggcagcagctgcatcactctccacaaaaagaacagcagcggttctgacgtcatggtgagtgactgccgaagtaaggagcagatgagtgattgttcaaatacccgaacttctccggtgtctggcttctggatattctctcaatactgcttcctggatttctgcaatgaccctcaaaacagagggctctatactccttagtgtgactgcagcaaactttggtgtaaaattccaccagtttccagccaccttcctgacttctatctgggcttggccaggacttctagtccctcataccagccctccttgcctccctccagccactggaccccagccttggctcttcctcttggttgacgcccttcagcacacttactgctactctgtacccccagccctactgcccaccaggtttcctctcttgtcccctagtccctggatgtttctcccaaataaatttgtgtgtaaactgtt

SEQ ID NO: 219050 - DNA, 453 bp, Artificial Sequence
  derived and/or modified sequence
atgcggttcatggccggccccgccggcagccagagcctgggccccctctgtttccacagttcccctcaggccctgtatacagtgctcctaatagtgctggtgatgatgtccttagtgttcggaaagtttgtcccagtaaattgggaaccgccacagccgttgccttttcccaagtaccttagatgctaccgatgcctgctggaaacaaaagaactgggctgccttctcggcagcgacatatgcttgacaccggcgggatctagctgcatcactctgcacaaaaagaactcaagcgggtctgatgtaatggtatctgactgccgaagcaaggagcagatgtcggattgttctaacacaaggacctcccctgtgtctggattctggatcttttctcagtattgcttcttagacttttgtaatgatccacaaaacagagggttgtacacaccctag

SEQ ID NO: 219051 - DNA, 444 bp, Artificial Sequence
  derived and/or modified sequence
atggccggccccgccggcagccagagcctgggccccctgtgcttccacagctctccgcaagcgttgtatacagtcctcttgattgtccttgtcatgatgtctcttgtcttcggaaagttcgtacctgtgaactgggagcctccgcagcccctcccattccccaagtacttacgatgctacaggtgtctcctcgaaacgaaggagttgggatgcctgctgggctcagacatttgcctgacccccgccggatcctcgtgcattacactgcacaagaaaaattctagcggatccgacgtgatggtcagcgactgccgttcaaaggaacagatgagtgattgctctaatacaagaactagtcctgtgtcaggtttctggatattctcacagtattgcttcctggacttttgcaatgatccacagaatagagggttgtacaccccatag

SEQ ID NO: 219052 - DNA, 447 bp, Artificial Sequence
  derived and/or modified sequence
atgcagaccttccccgtggccggcgccctggaccccgccatcctggatacttcctctcctcaagctctgtatactgtcctgctgattgtactggtgatgatgtccctggtgttcggaaaattcgtgccagtgaattgggaaccgccccagccactgccattcccaaagtatctacgttgctaccgctgtctcctcgaaaccaaagagctgggctgccttctgggtagcgacatttgcttgaccccagccggctcaagttgtataactctgcataaaaagaacagctctgggagcgatgtgatggtgtccgattgtcggtcgaaggagcagatgtctgactgtagtaacacacggacctcaccagtaagcggattctggatcttctcacagtactgcttcctggatttttgcaacgacccacagaacaggggactgtatacgccctag

SEQ ID NO: 219053 - DNA, 674 bp, Artificial Sequence
  derived and/or modified sequence
agtcatgcgttttatggcaggccctgcagggagccagagtctgggtcccctgtgcttccacagcagcccccaagccctctacacggtcctcttaatagtgctggtcatgatgagcttggtgtttggtaagtttgttcctgtcaattgggaaccccctcaaccacttccattccccaaatacctgcgctgctaccgatgcctcttggagaccaaggagttagggtgccttctgggatctgacatctgcctcaccccagctggcagcagctgcatcactctccacaaaaagaacagcagcggttctgacgtcatggtgagtgactgccgaagtaaggagcagatgagtgattgttcaaatacccgaacttctccggtgtctggcttctggatattctctcaatactgcttcctggatttctgcaatgaccctcaaaacagagggctctatactccttagtgtgactgcagcaaactttggtgtaaaattccaccagtttccagccaccttcctgacttctatctgggcttggccaggacttctagtccctcataccagccctccttgcctccctccagccactggaccccagccttggctcttcctcttggttgacgcccttcagcacacttactgctactctgtacccccagccctactgcccaccaggtttcct

SEQ ID NO: 219054 - DNA, 453 bp, Artificial Sequence
  derived and/or modified sequence
atgcggttcatggccggccccgccggcagccagagcctgggccccctgtgcttccactctagcccccaggcgctgtatacagtgttgttgatcgtgcttgtaatgatgagcctggtgttcggcaagttcgttcctgtaaattgggagccaccacagccacttcccttcccaaagtatctaagatgctaccgatgcctgctggagactaaagaactggggtgtctgttgggttccgacatttgccttacgccagctggaagctcctgcatcacactgcacaagaagaactcttcaggctccgacgtgatggtcagcgattgtcgctccaaagagcagatgagtgactgcagcaacactagaaccagccccgtgtctggtttttggatttttagccagtattgcttcctggacttttgcaacgatccccaaaatagaggtttgtatactccctag

SEQ ID NO: 219055 - DNA, 453 bp, Artificial Sequence
  derived and/or modified sequence
atgcggttcatggccggccccgccggcagccagagcctgggccccctctgctttcactctagtccgcaagcactgtacaccgtgctgctgatcgtccttgtgatgatgtctctcgtgtttggcaaattcgtaccggtcaactgggaacctccgcagcctcttcccttccctaagtaccttcggtgctaccggtgtctcttagagacaaaggagctaggttgtttattggggtccgacatctgtcttactccagccggcagctcttgcatcacactccacaaaaaaaattccagcggttctgatgtgatggtgtcagactgtcgctcgaaagagcaaatgagcgattgttccaacacaagaaccagcccagtgtccggtttctggatatttagccagtactgctttttggatttttgtaacgacccgcagaatagggggctctacaccccctag

SEQ ID NO: 219056 - DNA, 678 bp, Artificial Sequence
  derived and/or modified sequence
tgagccgacctgcccagctgctggggcgccggcccctgctacaccggccacaaagtcggcgctcttcgccgcgatacagtgatttgctgttgccgtcacggtgactatagcaccccctgcctgtttactcctgggaagccatctcgcaatcctagcccgtggaagagaaccctgtggactctgtcagctccttgggccggccccgctggatggactggggaggaacagaacgcaactaagacaggcttgattacaagaagaccacgccctttacgcagaagaccccacccagctccggcttcaccacttccggagattattaggggcaacatcccacggatgcttggaaaatttgtccctgtcaactgggaacctccacaacccctgccattccctaaatacttgcgatgctatcgatgcttattggaaaccaaagagttagggtgtctactgggttcagatatttgcctgactccagcgggatcaagttgcatcaccctgcataagaagaattcttctggcagtgacgttatggtcagcgattgcaggagtaaagagcagatgtctgattgcagtaatactcggacaagtcctgtgtctgggttctggatcttcagtcagtactgtttcctcgacttttgcaatgatccccagaatcgcggattgtacacaccctag

SEQ ID NO: 219057 - DNA, 453 bp, Artificial Sequence
  derived and/or modified sequence
atgcggttcatggccggccccgccggcagccagagcctgggccccctctgtttccacagtagcccccaggcactgtatacagtcctgctaatcgttttagtaatgatgtctctggtctttggaaagttcgtgccagtgaactgggagccacctcagccactaccttttcctaagtatctccgatgctatcgctgcctgctggagactaaggagctcggctgtcttttgggcagtgacatctgcttaaccccagccggatcttcttgtatcacacttcacaagaaaaattcttccggaagcgacgtgatggtgtctgactgtcgctccaaagagcaaatgtctgactgttctaatacccggacttcgccagtctccgggttttggatcttctctcagtactgctttctggacttctgtaatgacccccagaacagggggctctacactccctag

SEQ ID NO: 219058 - DNA, 453 bp, Artificial Sequence
  derived and/or modified sequence
atgcggttcatggccggccccgccggcagccagagcctgggccccctgtgcttccactcatcaccccaggcactgtacaccgttctcctgattgtgctggttatgatgtctctggtctttgggaagttcgtgcctgttaattgggaaccaccccagcccctcccgtttcctaagtacctgaggtgctaccgctgcctcctggagactaaggagctggggtgtctgctcggcagtgacatttgccttactcccgctggctcatcttgcatcacgctgcacaaaaaaaactctagcggctcagacgtcatggtgtcagactgcagatccaaagaacagatgagtgactgttcaaacaccaggacaagtcctgtgagcggcttctggatcttcagccagtactgctttctggacttttgcaacgatccccagaatcggggactctacactccatag

SEQ ID NO: 219059 - DNA, 678 bp, Artificial Sequence
  derived and/or modified sequence
tgagccgacctgcccagctgctggggcgccggcccctgctacaccggccacaaggtgggggcactgcgaagggacaccgtcatctgctgctgtcgacacggtgactacagcaccccgtgcctgttcacccccggaaaacctagtagaaaccccagcccctggaagaggaccctgtggacattgagcgctccatgggcaggccctgccggatggaccggggaggaacagaacgctaccaaaaccgggctcatcacacgccggccccgtcccctcaggcgacgcccacatcccgcacctgcgagtcccctcccggagataattaggggcaacataccccgaatgctcggcaaatttgttcccgtgaattgggaaccgccacaaccgctcccctttccaaagtacctgcgttgctatcggtgcttgctggaaactaaggagctagggtgcctgctcggctccgatatctgccttacgcccgctggttcctcatgtattacacttcacaaaaaaaactcttctggctcagatgtgatggtttctgactgtagaagtaaagagcagatgtcagactgctcaaacacgagaactagtccagtctctggcttctggatcttttcccagtactgcttcttggatttttgtaatgatccacaaaaccgcggcctgtataccccatag

SEQ ID NO: 219060 - DNA, 678 bp, Artificial Sequence
  derived and/or modified sequence
tgagccgacctgcccagctgctggggcgccggcccctgctacaccggtcacaaagtcggcgccctccgaagagataccgtgatatgctgctgtcgacacggagattatagcaccccctgcctttttaccccggggaagccaagcaggaacccatctccctggaagcgcactctctggaccttatcagcaccctgggcgggtcccgcaggttggacaggcgaagagcagaacgcgactaagaccggcctcatcacacggcgcccgcggcccctcaggcgtcgcccccatcctgcacctgcttctccgctgccggaaataatcagaggtaatattcctagaatgctcggtaagttcgtgccagttaactgggagcctccccagcccttgcccttccccaaatacctgcggtgttataggtgtcttctcgagactaaggaactgggctgcctgcttggtagcgacatatgcctgacacctgccggaagtagttgcatcacgcttcataagaagaactcatccggttccgacgtgatggttagtgattgccgctcaaaggaacagatgtcagactgttccaatacacggacttctcccgtttcaggcttctggatcttctctcagtattgttttcttgatttttgcaacgaccctcagaacagaggcctctatacaccgtag

SEQ ID NO: 219061 - DNA, 678 bp, Artificial Sequence
  derived and/or modified sequence
tgagccgacctgcccagctgctggggcgccggcccctgctacaccgggcacaaggtgggagctctgcggagagatacagtaatatgttgctgccggcacggggattactcaaccccatgtctcttcacccccggcaagccttcccgaaaccctagtccgtggaaacggaccctctggaccttatcagccccctgggctggacccgctggctggactggtgaggagcagaacgccacgaagacggggctgataactcgtcgccctagacccctgcgaaggcgcccacacccagcgcctgcctccccgttgcccgaaattataaggggcaacatcccccgaatgctcggtaaattcgtcccggtgaactgggaacccccccaacccctgccgttcccgaaatatctgaggtgttatcgatgtcttctggagaccaaggagctgggatgtcttctggggtccgatatctgcctcactccagcagggtcttcatgtattaccctccacaagaagaacagttccgggagcgacgtgatggttagtgactgccgatctaaagagcaaatgtctgattgctcaaatacacgcacctcacctgtgagcggattctggatcttcagtcaatactgctttctcgatttctgtaatgatccacagaaccgcgggctttataccccatag

SEQ ID NO: 219062 - DNA, 678 bp, Artificial Sequence
  derived and/or modified sequence
tgagccgacctgcccagctgctggggcgccggcccctgctacaccggtcacaaagtgggcgccctaagacgtgatacagtgatctgctgttgccgacacggcgattattctactccttgcctgttcaccccagggaaaccatcacgtaatccatccccttggaaacgcacactctggaccctgagcgcaccatgggccggccctgctggttggacaggggaggagcagaacgccactaaaacgggactgatcacccgtcggccaaggccgctgcggagacggcctcacccagcccccgcttcacctctgccagagatcattcgagggaacatacctaggatgctgggaaagtttgtgcctgtcaattgggaacccccacagcctctgccttttcctaagtacctgagatgttacagatgcctattagaaacaaaggaacttgggtgtttgcttgggagcgatatctgcttgacaccggctgggtctagctgcattacgttgcacaaaaagaacagcagcgggtcggatgtgatggttagcgactgtcgtagcaaagagcagatgagcgactgctccaacacaagaacaagtcccgtgtcggggttctggatattctcccaatattgctttctagacttctgcaatgatccgcagaatcggggtctgtacaccccctag

SEQ ID NO: 219063 - DNA, 678 bp, Artificial Sequence
  derived and/or modified sequence
tgagccgacctgcccagctgctggggcgccggcccctgctacaccggccacaaggtgggcgccctgaggcgtgacacagtgatatgctgctgcagacacggggactactcaaccccatgtctgtttacacccggaaagccgagtcgcaatcccagtccttggaaacgtaccctgtggaccctgagtgccccctgggccggtcctgccgggtggactggagaagagcagaatgccaccaaaaccggattaatcacacgacggcctcgcccgcttcgccgccggccacatccggctccagccagtcccctgcctgagatcatacgcggcaatataccgagaatgctggggaagtttgtacctgtcaactgggaacccccacagccccttcccttcccaaaatacctacggtgctaccgttgcctgcttgagaccaaggagctggggtgtctgctcgggtctgatatttgtcttacccccgccggctcatcctgcattacactgcacaagaagaactcttctggtagcgatgtgatggtctcggactgccgctcaaaagaacagatgtccgactgctccaataccaggacctctcctgtgtcagggttttggatctttagccagtactgctttctggatttttgtaatgatccccaaaaccggggcttatatactccttag

SEQ ID NO: 219064 - DNA, 453 bp, Artificial Sequence
  derived and/or modified sequence
atgcggttcatggccggccccgccggcagccagagcctgggccccctgtgctttcactcgtcaccacaggcactttacactgtgctgctgattgtactcgtcatgatgtcactcgtcttcgggaagttcgtgccagtcaattgggagccgccccagcctctaccatttcccaagtaccttcggtgctatagatgtctccttgagacaaaggagcttggctgcctgctgggttctgacatctgcctgacacctgccggctcttcgtgcattaccctacataaaaagaatagttccggctccgatgtgatggtgtctgactgtcggagcaaagaacagatgtcagactgcagcaacacacggacaagccctgtcagcgggttctggattttctctcagtactgtttcctcgatttctgcaacgatcctcagaacaggggactgtataccccttag

SEQ ID NO: 219065 - DNA, 453 bp, Artificial Sequence
  derived and/or modified sequence
atgcggttcatggccggccccgccggcagccagagcctgggccccctgtgctttcatagctcaccccaagctctgtacactgtactcttgattgttctggtgatgatgtctctagtgtttggcaaatttgttcctgtgaattgggagcctccgcagccccttccttttcccaaatacctgagatgctatagatgcctgctggaaacaaaggaacttggatgtcttttggggtccgatatctgcctgacacccgctggatcatcttgcattacactacataaaaagaattccagcggcagtgacgtcatggtgtctgattgtagatccaaagagcaaatgtccgattgttctaacacccgaacctcaccagtgtcaggcttctggatattttctcaatactgcttcttggatttttgcaatgatccacaaaatagaggcctctataccccctag

SEQ ID NO: 219066 - DNA, 546 bp, Artificial Sequence
  derived and/or modified sequence
aaccgatgccgccgggtacgagctgtgctgcacgcggacgcgagctcgcgtcccacccgttttccccttccatctactttgtccccaaccctctccccgagtctcttcctttccccgctgaggtcactagtgaactctgcttccaagtactcctgcaaagtacaccacaagcctgtctatattctcaagccatccgcttcagttcatatgaccacacttgcatgtcagcaacagaagagaacacacatcatacagcatttacagcagtggacaaagagaatctccctggaaaaggagacatgaatgtctgcaatgatacttcctgacaagaagttgatacaagaaaaggaaaggagattaacagctagtgagcagaatttcgaacagcaggatttcgtattttttgcttccaactgcacacttccgttgcccacttttaaatcagagatacctacactcaaaacccagacaaggcaaaaggatacttttcttgtatattttttgagatcgaagaaacgacaatgtccaggaaacagaaccagaagg

SEQ ID NO: 219067 - RNA, 453 nt, Artificial Sequence
  derived and/or modified sequence
augcguuucauggcaggucccgcuggcucucagucucugggaccccucugcuuccacagcuccccccaggcacuuuauacgguguugcugaucgugcuugucaugaugagucucguguucggaaaguuugugccggucaacugggagccuccacaaccauugcccuuuccuaaguaucuaagaugcuaucgcuguuuguuggagacuaaagaacuuggcugucuauuaggaagcgauauuugccucaccccagcuggcucaucauguaucacacugcacaagaaaaacucuucagguucggacgugauggucucagauugccgcuccaaagagcagauguccgauuguuccaacacccgcaccucucccguuucuggauucuggaucuuuagccaguacuguuucuuggauuucugcaacgacccucagaaucgggggcucuacaccccuuag

SEQ ID NO: 219068 - RNA, 444 nt, Artificial Sequence
  derived and/or modified sequence
auggcaggccccgccggcagccaaucucugggcccauuaugcuuucacagcuccccgcaagcccuauacacaguucuccugauugugcuggugaugaugagcuugguguuuggaaaauucgucccugugaacugggaacccccccagccccugcccuuuccuaaauacuugagaugcuacagaugccuacucgaaacaaaagagcucggcuguuuacuaggcucugacauaugucugacacccgccgguuccucuugcaucacacuacacaagaagaauucauccgggucugaugugauggugucagauugucgcaguaaggagcagaugucugacugcaguaacacacgaacaucccccgucagcggauucuggauauuuagccaguauuguuuucuggacuucuguaaugacccacagaacagaggucuguauacuccuuag

SEQ ID NO: 219069 - RNA, 447 nt, Artificial Sequence
  derived and/or modified sequence
augcaaacuuuccccgucgcuggggccuuagacccagcuauucuugacacuucuagcccccaagcucuguacacggugcuguuaauaguccuuguuaugaugucccuuguguuugguaaguucgugccuguaaacugggagcccccacaaccucugcccuuuccuaaguaucuccgcuguuaccggugccugcuugagaccaaagaguuaggaugucuguuaggcagcgacauuugccucacuccagccgggucaagcuguaucaccuuacacaagaagaauagcucugggucagacguaaugguuucugacugcagaaguaaggaacagaugagcgacugcucaaacacccgcacaucaccgguuucagguuuuuggaucuucucucaguacuguuuucucgauuucuguaacgacccacagaaccgagggcuguauaccccauag

SEQ ID NO: 219070 - RNA, 453 nt, Artificial Sequence
  derived and/or modified sequence
augagauucauggccggccccgccggaucccaaucucucggaccucuuugcuuccauucuucaccccaagcccuguacacggugcugcuuauagugcuugucaugaugucuuuaguauuugggaaguuuguucccguuaacugggaaccaccucaaccacucccuuucccuaaauaucugcgaugcuacagaugccugcucgagaccaaagaacuuggaugccugcuggguuccgacaucugccucacacccgcgggcagcucaugcauuacuuugcacaaaaagaacuccucagguucagacgugauggucuccgacuguaggagcaaggagcaaaugucugacuguuccaauaccaggacaagcccugucucuggauucuggauuuucucccaauacuguuuuuuagacuuuuguaaugauccucagaauagaggacuguacacuccauag

SEQ ID NO: 219071 - RNA, 453 nt, Artificial Sequence
  derived and/or modified sequence
augcgguuuauggcgggcccagccggcucccaguccuuagggccccugugcuuucauagcucuccccaggcccuguacacagugcugcugaucguguuaguuaugaugucuuuaguguucgguaaauuuguaccagucaacugggaaccaccucagccgcucccuuuucccaaguaucugcggugcuacagaugucuguuagagacaaaggaacuggguugccuccucggcuccgauaucugucugacuccugcuggcaguuccuguaucacucugcacaagaaaaacaguuccggcucugacguuaugguguccgauugcagaucaaaagaacaaauguccgauugcucuaacacacgcaccucaccagugucaggauuuuggaucuuuucucaguauugcuucuuagacuuuuguaacgauccacaaaauaggggcuuguacacuccguag

SEQ ID NO: 219072 - RNA, 678 nt, Artificial Sequence
  derived and/or modified sequence
uaagcugaccucccgagcugcuggggagccggaccaugcuacacaggccauaaggugggugcgcuccggcgggauaccguaauaugcugcuguaggcauggcgacuacucuacaccauguuuauuuacaccaggcaaaccaaguagaaacccuucuccauggaaaagaacccucuggacucuguccgcacccugggcuggcccugcgggcuggaccggcgaagaacagaacgcuacuaagaccggccucauuacccguaggcccagacccuugaggcgucgcccacacccagccccagcuucuccuuugccagagaucauucggggcaauauuccaaggaugcucggaaaguucguaccugugaauugggaaccaccacagccccucccauuucccaaauaucugagaugcuauaggugccugcuggagacaaaggagcugggcugcuugcuuggaucggacaucugccugacgcccgcagggucaagcugcauuacacuucacaagaaaaauagcuccggaucagacgucauggugucugauuguagaucuaaggaacagauguccgacuguucaaauaccagaacauccccuguuaguggauuuuggaucuuuagccaguacugcuuccucgacuucuguaacgauccacaaaaucgcggcuuauacacccccuag

SEQ ID NO: 219073 - RNA, 453 nt, Artificial Sequence
  derived and/or modified sequence
augcgcuucauggcuggcccugccggaucacagucccugggcccauuaugcuuucacucauccccacaggcccuuuacaccguccugcugaucguacucgugaugaugucucugguuuucggaaaguucgugcccgucaauugggagccuccucaaccccucccauuccccaaguaucugcgaugcuacagaugucuccucgaaaccaaagaacuggggugccuguuggggucagacaucugccugacccccgccgguucuagcugcaucacacugcacaagaaaaauucuagcggcucugacguuauggucuccgacugccgaaguaaagaacaaaugagcgauugcuccaacacacgaacaagcccaguaucaggauuuuggauuuucucucaguauugcuuccuggacuuuuguaaugauccgcaaaaucggggacuuuauacgcccuag

SEQ ID NO: 219074 - RNA, 453 nt, Artificial Sequence
  derived and/or modified sequence
augcgcuuuauggcuggcccugccgguucucagagucuuggaccccucuguuuucacucuagcccccaggccuuauacacggugcuccuaaucguccuugugaugaugucucuugucuuuggaaaauuuguuccugucaacugggaacccccucagccucucccauuuccaaaauaccuccgcugcuauaggugccuccuggaaacuaaggaacuggguugucuccuugggucugauaucugcuugaccccugcugguagcucuugcauaacccugcauaaaaagaauucuucggggagugacgugaugguaagcgacugccggucuaaggaacagaugagugauuguaguaacacccgaacuucaccugucucuggauucuggaucuuuucacaguauuguuuuuuggacuucuguaaugacccccagaauagaggacucuauacaccauag

SEQ ID NO: 219075 - RNA, 678 nt, Artificial Sequence
  derived and/or modified sequence
ugagccgaccuuccauccugcuggggcgcggggccuuguuauaccggccauaaaguuggggcgcugagaagagauacaguuaucuguuguugucggcacggggacuauuccacaccaugucuauuuacuccaggaaaacccagccggaacccuuccccuuggaagcgcacccuauggacauugucugcaccuugggccggucccgcggguuggacgggcgaggagcagaaugcuaccaaaacaggccucauaaccaggagaccucgaccccugcgccgaagaccacaccccgccccugcuucaccucuuccagaaaucauacggggcaacaucccaagaaugcuuggaaaguucguccccguuaauugggaaccuccgcagcccuugcccuuuccaaaguaccuccgauguuacaggugucuccuugagacuaaggaacugggaugccuacuugguuccgacauuugucugacaccagcaggcucaucauguaucacucugcauaaaaagaacucuuccggaucagaugucauggugucugauuguagaagcaaagaacagaugagcgauuguuccaauacuaggacuagcccugucagcggcuucuggauuuucagucaguacugcuuucuggacuucuguaaugacccucaaaauagaggacucuacacucccuag

SEQ ID NO: 219076 - RNA, 678 nt, Artificial Sequence
  derived and/or modified sequence
ugagcggaucugccaaguugcuggggcgcuggaccuuguuauaccggccacaaaguuggcgcccugagacgagacacuguaauaugcugcugucgccacggcgauuauuccacaccaugccuguucacucccgguaaacccuccaggaacccaucuccguggaagcgaacccuuuggacacuuucagcucccugggcugggcccgcaggauggacaggugaggaacagaaugcuacaaaaacaggucugaucacacgaagaccacgcccacuucggcggagaccucacccugcccccgcaucuccguugcccgagaucaucaggggaaauaucccgagaaugcuuggcaaguucgucccugugaacugggagccuccucagccccugccuuucccgaaauaucuucguuguuaccggugccuacuggaaacaaaggaguuaggcugucuguugggcucagacauuugucucaccccagcaggauccucaugcaucacacugcacaagaaaaacucuuccggcucagacguuaugguuucggauuguagaucaaaggaacaaaugucugauugcaguaauacaagaaccucucccgucucuggauuuuggaucuucucccaguacugcuuucuugacuucugcaaugacccucaaaaccgcgguuuauauaccccuuag

SEQ ID NO: 219077 - RNA, 678 nt, Artificial Sequence
  derived and/or modified sequence
uaagccgacuugccgucaugcuggggugcugggccuuguuacacugggcacaaaguuggcgccuugcgccgggauacaguuauuuguugcuguaggcacggugauuauucuacaccuugccuguucacccccggaaaaccuucacggaaccccucacccuggaaacggacacucuggacacuuucugcuccuugggcuggcccggccggauggacuggcgaggaacagaacgccacaaaaacgggccuuauuacgagaagaccccggccccugcgacgccggccucacccugcaccagcuagcccgcuaccugagauuauucgugguaacauuccucgcaugcucgguaaguuuguacccgugaacugggaaccuccucagcccuugcccuucccaaaguaucugagguguuaccgauguuuacuugagaccaaagagcuuggaugucucuuaggcucugauauaugucugacacccgccgguagcagcuguauaacccuacacaagaagaacucuuccgguuccgacgucaugguuucagacuguagaucaaaagaacagaugagugacuguucgaacacuagaacaucccccgugucaggauuuuggauauuuagccaauauugcuuucuggacuuuugcaaugacccucagaacagaggccuguauaccccuuag

SEQ ID NO: 219078 - RNA, 678 nt, Artificial Sequence
  derived and/or modified sequence
uaggcggaccuccccuccugcuggggugccggcccauguuauacugggcacaagguuggagccuugaggagagauacugucaucugcugcuguaggcauggugauuacuccacccccugcuuguuuacucccggaaaaccauccagaaacccuuccccuuggaaaagaacucuauggaccuuauccgcgcccugggcuggaccagcaggcuggaccggagaggagcaaaacgccacaaagaccggucucaucaccaggcggcccaggccacuuagaagacguccucauccagccccugccuccccauuaccggaaauuauacggggaaacauuccacggaugcuugggaaguuuguccccgugaacugggagccaccacaaccacugccauuucccaaauaccucagaugcuacaggugccuacucgaaacuaaggaauugggcugucugcugggauccgacaucugcuuaacaccugcaggcuccucguguaucacccuccauaaaaagaauagcucgggcucugaugugauggucagcgacugccgaucuaaagagcagaugagcgacugcagcaauacacgcacgagcccggugaguggcuucuggauuuuuagucaguauuguuuccuggacuucuguaaugacccucaaaaccgaggucuguauacaccauag

SEQ ID NO: 219079 - RNA, 678 nt, Artificial Sequence
  derived and/or modified sequence
ugagccgaccugccaucuugcuggggagcugggcccuguuauaccggccauaaggugggcgcucuaagaagagauaccgugauuugcugcugcaggcacggggauuauucuacacccuguuuauucacgccaggcaagcccuccaggaacccaucccccuggaagcgaacgcuguggacccucagcgccccgugggccgggccugccggcuggacaggcgaggagcagaacgcaacaaagacgggauugauuacaagaaggccuagaccucuccggcgucgcccacaucccgcccccgcuagcccacugccagaaauuauacguggcaauauuccaagaauguuaggaaaauuuguucccgugaauugggaaccaccucaaccacuccccuucccaaaauaucuccguuguuaucgcugccuccuugagacaaaggaacuugguugucuccucggaucugacaucugccucaccccugcaggauccaguuguauuacuuugcacaaaaagaauagcagugggagugacgugaugguguccgauugucgaaguaaggaacagaugagugauuguucuaauacgaggaccuccccaguguccggcuucuggaucuuuucucaauauuguuuucuggauuuuugcaacgauccucagaacagaggguuguacaccccguag

SEQ ID NO: 219080 - RNA, 453 nt, Artificial Sequence
  derived and/or modified sequence
augcgcuuuauggccggccccgccgggucccaaagcuuagguccccucuguuuucauucuaguccccaggcacuguauaccgugcugcugauugugcucguuaugaugucacugguguucggaaaguuugugccagucaauugggagccuccccagccucugcccuucccaaaauaccuucgcuguuaucgcugucugcuggagacaaaagaacuuggcugccuccuuggcagcgacauuugccugacccccgccggaucaagcugcauuacucuccacaagaagaauuccucuggcuccgaugucaugguaucggauugucgaucuaaagaacaaaugucagauuguucgaacacaaggacuucuccugugagcggguuuuggauuuuuucucaauauugcuuucuggauuuuugcaaugacccgcaaaacaggggucuauauacacccuag

SEQ ID NO: 219081 - RNA, 453 nt, Artificial Sequence
  derived and/or modified sequence
augagauuuauggccgggccagccggaucccaaucacuggggccucucugcuuucauuccuccccacaggcuuuauauacugugcugcucaucgugcuggugaugaugucuuuaguguucggaaaguucguccccguuaacugggaacccccacagcccuugcccuuuccuaaauauuugagguguuaccgguguuuacuugagacuaaggaauuagggugccugcuagggagugacauuugcuugacccccgcugguucuucauguaucaccuuacacaaaaagaacucuuccgggucggaugugaugguuagugacugccgaagcaaggaacagaugucagacugcucuaauacacgaacuucuccaguuuccggcuucuggauuuuuagccaauacugcuuccucgauuucugcaaugauccacagaaccguggacuguacacacccuag

SEQ ID NO: 219082 - RNA, 447 nt, Artificial Sequence
  derived and/or modified sequence
augcaaacuuuucccguugccggagccuuggaccccgcgauccuggauacuuccuccccgcaggcccuauacacaguguuauugauuguccuugugaugaugucacuuguguuuggcaaguucgugccagugaauugggagcccccgcagccguugcccuuucccaaauaccugcgcugcuaucguugucuccuugaaacaaaagagcuuggaugccugcucggcagcgacauuuguuugaccccagccggcucauccugcauaacccugcacaagaagaauagcagugggucagacguuauggucucugauugccgcucuaaagaacagaugagcgauugcucgaauacccgaaccucucccgucucuggauuuuggaucuucucacaauacuguuuccucgauuuuugcaacgacccccagaauaggggccucuacacaccuuag

SEQ ID NO: 219083 - RNA, 447 nt, Artificial Sequence
  derived and/or modified sequence
augcagacauuuccuguagccggcgcccuggacccagccauccucgacaccuccagcccccaggccuuauauacaguauuacuaaucguucucgugaugaugagccuuguuuucggaaaguuugucccaguuaauugggagcccccccagccccuaccauuccccaaauaucugagguguuauaggugccucuuggagaccaaggaauugggaugccuacuuggaagcgacaucugucucacucccgcuggaagcucauguauuaccuugcacaaaaagaacucaucaggcucugacguaaugguguccgacugccguagcaaagagcagaugucagacuguagcaauacccgcacuuccccugucagcggcuuuuggauuuucucacaguacuguuuucucgacuucuguaacgacccucagaaccggggacuuuacacucccuag

SEQ ID NO: 219084 - RNA, 447 nt, Artificial Sequence
  derived and/or modified sequence
augcagacauuucccguggcaggagcacucgaccccgcaauccucgacacaagcaguccccaggcacuuuacaccguccuccugauuguacugguaaugaugagccucguauucgggaaauuuguuccuguuaacugggagccuccucagccucuuccuuuucccaaguaccuucgaugcuaccguugccugcuugaaaccaaggaacuggguugccuccuagguagugacaucugucucacaccggcgggcaguucuugcauuacacuucauaaaaagaacagcagcggcuccgaugucaugguauccgauugucggucuaaagagcagaugagcgacuguucaaauacccgcaccaguccuguuuccgguuucuggaucuucucgcaguacugcuuccuggauuuuugcaaugauccacagaacagaggacuguacacaccguag

SEQ ID NO: 219085 - RNA, 447 nt, Artificial Sequence
  derived and/or modified sequence
augcaaaccuuccccguggccggagcccucgacccagcaauucuggacacaucaagcccucaagcucucuacacuguucugcugaucguucuugucaugaugucccugguguucggaaaguuugugcccgugaauugggaaccaccacagccccuucccuuuccaaaguaucugcgcugcuaucgaugucuuuuagagacaaaagagcugggaugucuguuagggagugauauuugccugacacccgccgguucuaguugcaucacuuuacacaagaagaauuccagcggaagugacgugaugguaucugauuguaggucuaaagaacagaugagcgacuguucuaauacaagaaccagcccagucagcggauucuggauauuuucacaauacugcuuccucgacuucugcaacgauccccagaaccgcggucucuauaccccuuag

SEQ ID NO: 219086 - RNA, 447 nt, Artificial Sequence
  derived and/or modified sequence
augcagacauucccaguugcaggggcacuggauccagccauacucgacaccucuuccccccaggccuuguacacuguguuacuaaucguccuggucaugaugucacuggucuucggcaaguucgugccaguaaacugggagccgccacaaccauuaccauucccgaaguaucuccgguguuaucggugucugcuggagacaaaggaacugggcuguuugcuuggaagcgacaucugccucacccccgcaggcucaaguugcaucacgcugcauaaaaagaacucaucaggaagcgaugugaugguaucugacugucgcaguaaggaacaaauguccgacuguucuaauacaagaaccucucccguaagcggcuucuggauuuuuucucaauacuguuuucucgauuucuguaacgauccacagaacagaggccuguacacccccuag

SEQ ID NO: 219087 - RNA, 447 nt, Artificial Sequence
  derived and/or modified sequence
augcagacauucccagucgcuggggcccuugaccccgcuauacucgauaccucuucuccccaagcucuguacacggugcuccugaucguguugguaaugaugagccucgucuuugguaaguuugucccugucaacugggaacccccucaaccccuucccuucccaaaguaucuucgguguuaucgguguuuacuggaaacgaaggaauugggcugucuccuuggaagugacauuugucugacacccgccggguccagcuguaucacccugcauaagaagaacuccucugguucagaugucaugguuuccgacuguagauccaaagaacagaugucugauuguucuaauacucggacuucaccagugagcggcuucuggaucuuuagucaguauuguuuucuugacuuuugcaaugacccacagaaucguggcuuauauaccccuuag

SEQ ID NO: 219088 - RNA, 453 nt, Artificial Sequence
  derived and/or modified sequence
augagauucauggccggccccgcugguucacagucuuugggaccacuuugcuuccacucaucaccucaagcccuguacaccguccuguugauuguucucguuaugaugucccugguguuuggaaaauuuguacccgucaacugggagcccccucagccacuuccuuuccccaaguaccucagaugcuacagaugucuccuugagaccaaggagcucgggugccuucucgggagcgacaucugccugaccccagccggcucuucauguauuacccuucacaagaaaaauaguagcgguagugauguaauggugucugauuguaggaguaaagaacagaugucagacugcucaaacacacgcacaucuccaguaucuggauuuuggauuuuuucacaguacuguuuucucgacuuuuguaacgacccucagaauagaggacuauacaccccauag

SEQ ID NO: 219089 - RNA, 444 nt, Artificial Sequence
  derived and/or modified sequence
auggcaggccccgccggcagccaaucucugggcccauuaugcuuucacagcuccccgcaagcccuauacacaguucuccugauugugcuggugaugaugagcuugguguuuggaaaauucgucccugugaacugggaacccccccagccccugcccuuuccuaaauacuugagaugcuacagaugccuacucgaaacaaaagagcucggcuguuuacuaggcucugacauaugucugacacccgccgguuccucuugcaucacacuacacaagaagaauucauccgggucugaugugauggugucagacugccgaagcaaagagcaaauguccgacuguaguaacacucguaccuccccaguguccggauuuuggauuuuuagucaguauuguuucuuagacuuuugcaaugacccccaaaaccgcggccuguauacaccuuag

SEQ ID NO: 219090 - RNA, 447 nt, Artificial Sequence
  derived and/or modified sequence
augcaaaccuucccuguggcuggagcacuugaccccgcuauccuggacacaaguaguccccaagcacuguacacuguccuccugauugugcuagugaugaugucccuaguuuucggaaaguucgugcccgucaauugggagcccccucagccccugccauuuccuaaguaucuucgauguuaucgcugccuucuagagaccaaagagcugggcugucugcuggguuccgacaucugucugacaccugccgggucaucguguauuacucuccacaaaaagaacucgagcgggucugacgucauggucagcgacugucgcucgaaggaacagaugagcgacuguucaaacacaaggacuucuccuguaagcggauuuuggauauuuagccaauauugcuuuuuagacuuuuguaaugauccccaaaaccgaggacuguauacccccuag

SEQ ID NO: 219091 - RNA, 453 nt, Artificial Sequence
  derived and/or modified sequence
augagguuuauggccggccccgccgggucccaaagcuugggcccccuuuguuuccacucuaguccucaggcacuguacaccguauugcuaauaguuuuaguaaugaugucucuaguauucggaaaguucgugcccgucaacugggaaccaccccagccucugcccuucccuaaguaucuccgcugcuauaggugccugcuggagacgaaagaacuaggcugucuccuuggaucagacaucugccugacacccgcaggcucuuccuguauuacacugcacaaaaagaauaguuccggcucugaugugaugguuagugauugccgcuccaaggaacagaugucagacugcagcaacacucggaccuccccugugucagguuuuuggauuuuuucacaguauuguuucuuagauuucuguaacgacccucagaaccgcgggcucuacaccccuuag

SEQ ID NO: 219092 - RNA, 453 nt, Artificial Sequence
  derived and/or modified sequence
augagauuuauggcgggcccugccggcucccaaucacuggguccucucuguuuucacucuuccccccaggcacucuacaccguucugcugaucgugcuggucaugaugagccucguuuucgguaaguuugugcccgucaacugggaacccccacagccauuaccuuucccuaaguauuugcgcugcuauagguguuugcucgaaacaaaagaacugggcugucuucucgguucugacauuugcuugacaccagccggcuccucauguaucacgcugcacaagaaaaacuccucaggcuccgacguuaugguguccgauugcagaucaaaagaacaaauguccgauugcucuaacacacgcaccucaccagugucaggauuuuggaucuuuucucaguauugcuucuuagacuuuuguaacgauccacaaaauaggggcuuguacacuccguag

SEQ ID NO: 219093 - RNA, 678 nt, Artificial Sequence
  derived and/or modified sequence
uaagcagauuugcccaguugcuggggagcaggaccauguuacacaggccacaaggucggcgcuuugagacgggacacuguaauauguuguugucgccacggagacuacucgacaccgugccucuuuacucccggaaaaccaucccggaacccuagccccuggaagcggacacuguggacacuuagcgcacccugggccgguccugccggguggacaggagaagagcagaacgccacaaaaaccggauuaauuaccaggagacccaggccucuuagaaggcgcccacauccggcaccugcuucuccgcugccagagauaauucgaggcaauaucccuagaaugcugggcaaauuuguaccagucaauugggaaccaccacagccgcuacccuuccccaaguaccugagauguuaucguugucuucucgagacuaaagaguuggggugucuccugggcagcgauauuuguuuaaccccugccgggaguagcugcauuacacuccauaaaaaaaacucuucuggcuccgacgugaugguaagcgacugccgcuccaaggaacagaugucagauugcucaaauacaagaacgagcccugucucgggcuucuggauuuuuagucaguacugcuuucucgacuucuguaaugacccacaaaaccgcggacuuuauacucccuag

SEQ ID NO: 219094 - RNA, 453 nt, Artificial Sequence
  derived and/or modified sequence
augcgauucauggcaggccccgccgguagccagagucuuggcccacuuugcuuccauucaagcccucaagcuuuauacacuguacuccucaucgugcuuguuaugaugucccuaguguucgggaaguuugugcccguuaacugggaaccuccacagccuuugcccuucccuaaauauuuacgaugcuacagaugccugcucgaaacuaaggaacugggaugcuuacuggggagcgacauaugucugacgcccgcagguagcuccuguauaacucugcacaaaaaaaauagcucaggcagugacgugauggucuccgauuguagaaguaaggagcagaugucagauuguagcaacacccgcaccucucccguuagcggcuuuuggaucuuuucccaguacuguuuucuggauuucuguaaugacccucagaaccgcggccuuuacaccccuuag

SEQ ID NO: 219095 - RNA, 453 nt, Artificial Sequence
  derived and/or modified sequence
augcgcuuuauggcuggcccugccgguucucagagucuuggaccccucuguuuucacucuagcccccaggccuuauacacggugcuccuaaucguccuugugaugaugucucuugucuuuggaaaauuuguuccugucaacugggaacccccucagccucucccauuuccaaaauaccuccgcugcuauaggugccuccuggaaacuaaggaacuggguugucuccuugggucugauaucugcuugaccccugcugguagcucuugcauaacccugcauaaaaagaauucuucggggagugacgucaugguaucagauugcagguccaaagaacaaaugagugauuguuccaacacccggaccucucccgucagcgguuucuggaucuucagccaauauuguuuucuugacuucuguaaugacccccaaaaucgcggauuguacacacccuag

SEQ ID NO: 219096 - RNA, 678 nt, Artificial Sequence
  derived and/or modified sequence
ugagcugaccuuccaucauguuggggcgccgggccgugcuauacaggccauaagguaggcgcccugcguagagauacagugaucuguuguuguagacauggagauuauuccacgcccugucucuucacacccgguaaacccaguagaaaucccucgccguggaaaaggacacuguggacucugucagcaccaugggcuggaccugccggauggacuggugaggaacaaaacgcaaccaaaaccggccugauuacucgcagaccccggccucugaggagacgaccccacccggcuccugcuaguccucugcccgaaauuauccgcggcaauauaccacgaaugcuugguaaguucgucccuguaaauugggagccuccccaaccguugccuuuucccaaauauuuacgguguuaucgcugccuucucgaaacuaaggaauuagguugccuccucggaucagauaucugcuuaacccccgccgggucaucgugcauaacucugcauaaaaagaacucaaguggcucugacgugauggugagugacugcagguccaaagaacagaugucagacuguaguaacaccaggacuucacccgugagugguuuuuggauauucucacaguacugcuuucucgacuucuguaacgacccccagaaccgaggcuuauauaccccuuag

SEQ ID NO: 219097 - RNA, 678 nt, Artificial Sequence
  derived and/or modified sequence
uaggcagaucuaccuagcuguuggggagcagguccuuguuauacagggcacaaagugggagcccuuagacgagacaccgucauaugcuguugucgccauggugauuauucaacccccugccucuucacuccuggcaagccuucuagaaacccaaguccuuggaagcggacccucuggacccugagugcuccuugggccgggccugccggauggaccggggaagaacagaacgccaccaagaccggacugauuaccagaagaccccggccgcuacgacgccggccacacccugccccagcgagcccucugccagaaaucauuagggggaauauaccacgcaugcucggcaaguuuguccccgugaauugggagcccccacagccacugccauucccuaaauauuuacgcugcuacaggugucugcucgagacaaaagaauugggcugccucuuaggguccgacaucugccuuacucccgccgguucguccugcauuacacuucacaagaaaaauuccuccgggucugauguuaugguuagcgacugcagaucaaaggagcagaugagcgacuguucuaauacccguacuucaccaguaagcggauuuuggaucuucucucaguauuguuuucucgacuuuuguaaugacccacagaauagaggccuguauacaccauag

SEQ ID NO: 219098 - RNA, 678 nt, Artificial Sequence
  derived and/or modified sequence
uaagcugauuugccuuccuguuggggagcggggcccugcuacacuggacacaaagucggagcccugagacgugacacugugauauguuguugcaggcacggagauuacuccacgcccugucuguucaccccuggcaaacccuccagaaacccuucaccguggaaaagaacucucuggacuuuaagugccccuugggccgggccugcuggcuggaccggcgaagagcagaaugcgaccaagaccggauugauuacucggcguccgaggccuuuacgacggagaccucauccugcgcccgcaagcccacuaccugagauuaucagagguaauauccccagaaugcugggcaaauucguuccugucaacugggaaccuccucagccauugccauuccccaaguaccugcgguguuaccggugccuccucgagacaaaggaauuagguugucuguugggaucugacauaugccucacaccugccggcucuuccuguaucacccuucauaaaaaaaacucuagcggaucagacgugaugguaucagacugccgcuccaaagaacagaugucagauuguagcaauacacgcaccucaccagucucugguuuuuggauauucucucaguauuguuuucuggacuucuguaacgacccucaaaaucgcggcuuauauacaccauag

SEQ ID NO: 219099 - RNA, 678 nt, Artificial Sequence
  derived and/or modified sequence
uaagccgaucugcccagcuguuggggugccggaccuuguuacacaggccauaaagugggcgcauugaggagggacacggugauauguugcugccgucacggugacuauagcacaccuuguuuauucacgccuggaaagcccucaagaaauccgucucccuggaaacgaaccuuguggacguugagugcucccugggcgggaccugcaggauggaccggagaagagcagaacgcaaccaagaccggucugaucacacggaggcccagaccucuccgaagaagaccccaucccgcuccugcuaguccccuuccagaaauuauuagaggaaacauuccccgcauguuaggaaaguuugugccaguuaauugggagcccccucagccacugccguucccuaaguaucucagaugcuaccggugucuccuggagaccaaggaacugggguguuugcucggaucugauauaugccugacuccagccggcucguccuguaucacccugcauaagaaaaauagcucaggguccgacgucaugguuagcgacugucgcagcaaggagcagaugagugacugcucuaauacucgaacaaguccagugaguggcuuuuggauuuucucucaauacugcuuccucgacuucugcaaugauccacaaaaccgcggacuguauaccccauag

SEQ ID NO: 219100 - RNA, 678 nt, Artificial Sequence
  derived and/or modified sequence
ugagcugaucuuccauccuguuggggggcaggaccauguuacacagggcacaaggugggagcucucaggcgggacaccgugauuugcugcugucggcacggggauuauagcacaccaugccuauuuacaccuggaaaaccaagcagaaaccccucuccauggaagagaacccuguggacccugagugcccccugggcugggcccgcuggauggacaggagaagaacaaaacgccacgaaaaccggccucauaacccgaaggcccagaccuuugagaaggagaccucauccagcaccagccagcccacugccagaaauuauacguggcaauauuccaagaauguuaggaaaauuuguucccgugaauugggaaccaccucaaccacuccccuucccaaaauaucuccguuguuaucgcugccuccuugagacaaaggaacuugguugucuccucggaucugacaucugccucaccccugcaggauccaguuguauuacuuugcacaaaaagaauagcagugggagugacgugaugguguccgauugucgaaguaaggaacagaugagugauuguucuaauacgaggaccuccccaguguccggauucuggauuuucucucaauacugcuuccuugacuuuuguaaugacccacaaaaccggggccuguauaccccuuag

SEQ ID NO: 219101 - RNA, 453 nt, Artificial Sequence
  derived and/or modified sequence
augcgcuuuauggccggccccgccgggucccaaagcuuagguccccucuguuuucauucuaguccccaggcacuguauaccgugcugcugauugugcucguuaugaugucacugguguucggaaaguuugugccagucaauugggagccuccccagccucugcccuucccaaaauaccuucgcuguuaucgcugucugcuggagacaaaagaacuuggcugccuccuuggcagcgacauuugccugacccccgccggaucaagcugcauuacucuccacaagaagaauuccucuggcuccgaugugauggucagcgacugucguuccaaagaacaaauguccgauugcagcaauacaagaaccuccccaguuagcgguuuuuggaucuucucucaauacugcuuuuuggauuucuguaaugauccccaaaaccgcggguuguauacacccuag

SEQ ID NO: 219102 - RNA, 453 nt, Artificial Sequence
  derived and/or modified sequence
augcgguuuauggcaggaccagcugguucccagagucuuggaccucuguguuuccauucuuccccccaggcucuguauaccgugcuccucauagugcucguuaugaugucacucguguuuggcaaguuugugcccgugaacugggaacccccccagccucugcccuuuccuaaguauuuacgcugcuacagauguuuguuggaaaccaaagagcuaggcugccuucuuggauccgacauauguuuaaccccugccggcagcagcugcauuacacuacacaaaaaaaauucgucaggaucugauguuaugguauccgacugcaggucuaaagaacaaaugagugauugcagcaauacacgaaccucuccuguuucaggcuucuggauuuuuucgcaguacugcuuccuggauuuuuguaaugauccccagaaccgaggauuauauacucccuag

SEQ ID NO: 219103 - RNA, 447 nt, Artificial Sequence
  derived and/or modified sequence
augcagaccuuucccguggccggagcauuagacccugcaauucucgacacuuccuccccucaggcuuuauacacuguacuccugaucguguugguuaugaugagccugguguucggcaaauucguaccugugaauugggaaccuccucagccgcugccauuuccaaaauaucugcgaugcuaucgcugccucuuagaaaccaaagagcugggcugucuucucggaucugauaucugucugacaccagccggcuccucauguauuaccuugcauaaaaagaacucaaguggauccgacgugauggucucugauugccgcucuaaagaacagaugagcgauugcucgaauacccgaaccucucccgucucuggauuuuggaucuucucacaauacuguuuccucgauuuuugcaacgacccccagaauaggggccucuacacaccuuag

SEQ ID NO: 219104 - RNA, 447 nt, Artificial Sequence
  derived and/or modified sequence
augcagacauuuccuguagccggcgcccuggacccagccauccucgacaccuccagcccccaggccuuauauacaguauuacuaaucguucucgugaugaugagccuuguuuucggaaaguuugucccaguuaauugggagcccccccagccccuaccauuccccaaauaucugagguguuauaggugccucuuggagaccaaggaauugggaugccuacuuggaagcgacaucugucucacucccgcuggaagcucauguauuaccuugcacaaaaagaacucaucaggcucugacguaauggucuccgauugucgauccaaagagcaaauguccgauuguagcaacacucgcacuucgccugugucuggcuucuggauuuuuucccaguauuguuuucuugauuucugcaaugauccacaaaauaggggcuuauacacuccauag

SEQ ID NO: 219105 - RNA, 447 nt, Artificial Sequence
  derived and/or modified sequence
augcaaaccuuucccguugcuggagcuuuagaccccgccaucuuagacacuaguucuccccaagcccuguacacaguccuguuaaucguauugguuaugaugucccugguuuucgguaaauucguccccgugaauugggagccaccccagccucugccguuuccaaaauauuuacgguguuaccggugccuccucgagacgaaggaacucggcugucugcuaggauccgauaucugucuuacccccgccgguaguucuugcaucacuuuacauaagaaaaauucguccggcuccgaugugaugguguccgauuguagauccaaggagcagaugagcgauugcaguaauacaaggaccagucccgugucaggguuuuggauuuucucccaauauuguuuuuuagauuuuuguaacgauccucagaacagaggacuuuauaccccuuag

SEQ ID NO: 219106 - RNA, 447 nt, Artificial Sequence
  derived and/or modified sequence
augcaaaccuuccccguggccggagcccucgacccagcaauucuggacacaucaagcccucaagcucucuacacuguucugcugaucguucuugucaugaugucccugguguucggaaaguuugugcccgugaauugggaaccaccacagccccuucccuuuccaaaguaucugcgcugcuaucgaugucuuuuagagacaaaagagcugggaugucuguuagggagugauauuugccugacacccgccgguucuaguugcaucacuuuacacaagaagaauuccagcggaagugacgugaugguauccgacuguagaucuaaagaacagauguccgacugcucaaacaccagaacuucacccgucucaggauuuuggauuuucucgcaguacugcuuccuugauuuuugcaaugauccacagaacaggggguuguacacaccauag

SEQ ID NO: 219107 - RNA, 447 nt, Artificial Sequence
  derived and/or modified sequence
augcaaaccuuucccguugccggagcccuggauccugccauccuugacacaaguuccccccaagcccuuuacacagucuuguuaauugugcucgugaugaugucacugguuuucggaaaguucgugcccgucaacugggaaccaccacaaccccugcccuuucccaaauaucuaagguguuacagaugucuucucgagaccaaagagcuuggaugucugcuugguucagacauaugccuaacaccugcuggaucaagcuguaucacacuccauaagaaaaacaguucagguagcgaugugaugguuuccgauugucgcucaaaagagcaaauguccgacugcagcaauacacgaaccucaccuguguccggguucuggauuuuuucucaauacuguuuccucgacuucugcaacgauccucaaaaccgaggccuuuacaccccguag

SEQ ID NO: 219108 - RNA, 447 nt, Artificial Sequence
  derived and/or modified sequence
augcagaccuuuccagucgcaggugcacuggacccagcuauacuggacacaaguucaccacaggcccucuauaccguguuacugauuguccucgugaugaugagucucguuuucggaaaauucgugcccgucaacugggagccuccucaaccucugcccuuuccuaaauaucuuaggugcuaucgaugccuccuggaaaccaaagagcugggcugccucuugggcucagacaucugccucaccccugcagguucaagcuguauuacacuucauaagaagaacucauccgguucggaugugauggugagcgacugucgcuccaaagaacagaugagugacuguuccaacacacgcacuuccccaguuucaggauuuuggaucuuuucucaguacuguuuucucgacuuuuguaaugacccucagaaccgcgguuuauauaccccuuag

SEQ ID NO: 219109 - protein, 253 aa, Artificial Sequence
  derived and/or modified sequence
MPGRTEGGSWLRNAAAADVLRNLPEVEWREPQHCCPPTPRKRKQNPRVPLPHYPPNPAAAIAADTMPKRKKQNHHQPPTQQQPPLPEREETGDEEDGSPIGPPSLLGPPPMANGKPGDPKSALHRGPPGSRGPLIPPLLSLPPPPWGRGPIRRGLGPRSSPYGRGWWGVNAEPPFPGPGHGGPTRGSFHKEQRNPRRLKSWSLIKNTCPPKDDPQVMEDKSDRPVCRHFAKKGHCRYEDLCAFYHPGVNGPPL

SEQ ID NO: 219110 - protein, 188 aa, Artificial Sequence
  derived and/or modified sequence
MPKRKKQNHHQPPTQQQPPLPEREETGDEEDGSPIGPPSLLGPPPMANGKPGDPKSALHRGPPGSRGPLIPPLLSLPPPPWGRGPIRRGLGPRSSPYGRGWWGVNAEPPFPGPGHGGPTRGSFHKEQRNPRRLKSWSLIKNTCPPKDDPQVMEDKSDRPVCRHFAKKGHCRYEDLCAFYHPGVNGPPL

SEQ ID NO: 219111 - DNA, 762 bp, Artificial Sequence
  derived and/or modified sequence
atgcccggacggactgaaggtggctcatggctccggaacgctgccgccgcggatgttttgaggaacctcccagaagtggagtggagagagcctcaacactgctgcccacctacacctagaaagagaaagcagaatccccgcgtgccactgccgcattatccacccaacccagccgccgccatcgctgccgacactatgccaaagcgtaagaagcaaaaccaccaccagcctccaacacagcagcagccgccactgcccgagcgggaagagactggtgatgaggaagacgggtcccctattggtccaccaagtctgttgggtcctcctcctatggctaacggcaagcccggggacccaaagagtgctctccatcgtggacctcctggctctagggggccgcttataccaccactgctgtcattgcctccgccaccgtggggacgggggccaatcagaaggggacttggccctagatcaagcccttacggccggggctggtggggggtgaacgccgagcccccgtttccaggccctgggcatggcggaccaacccgtggatcgtttcacaaggaacagagaaatcccaggcggttgaagtcctggtcactcataaaaaatacctgcccccccaaagacgatccccaagtgatggaagataaatccgacaggccagtgtgcagacattttgcgaagaaggggcactgtaggtatgaggacctctgcgccttttatcatccaggcgttaacggaccccccctttag

SEQ ID NO: 219112 - DNA, 567 bp, Artificial Sequence
  derived and/or modified sequence
atgcctaagcgaaaaaaacagaaccatcaccagccacctacccagcagcagcctcctctcccagaacgggaggagacaggcgacgaagaggatgggtccccaatcgggccaccttctctcctagggccccctcctatggccaatggcaaacccggcgacccaaaaagcgcccttcacagggggccgcctggctcccgaggcccgctgattccacccctgctgtccctcccaccccccccatgggggaggggccctatacgcaggggactcggcccacgatcttccccttacggtcgcggatggtggggagtaaatgccgagcccccttttccaggaccagggcatggaggtccaactcgcggttctttccacaaggagcagcgcaacccccgtaggctgaagtcttggtcattgatcaaaaacacgtgtccgccaaaggacgatccacaggtcatggaggacaagtcagacagacctgtgtgtaggcactttgcgaagaagggacattgccgctacgaagacctttgtgctttttatcaccctggcgttaacgggccgcccctctag

SEQ ID NO: 219113 - DNA, 567 bp, Artificial Sequence
  derived and/or modified sequence
atgcccaaaaggaaaaagcagaaccatcaccagccccccacacagcagcagcctccactgccagagagggaagagacgggcgacgaagaagacgggtcaccgatcgggcctccatccctactgggcccgcctccgatggctaatggaaaacccggggatccaaaatcggcgctccacaggggccctcctggtagccggggccccctgatcccaccactcttatcactcccccctccaccgtgggggcgtggccctatcaggcgaggcctcggccccagaagcagtccgtacggaagaggctggtggggagtgaatgccgagccaccttttccagggcccggacacgggggccccactagggggtcgttccataaggagcaacgtaatccacggcgtctgaagtcgtggtcacttattaaaaatacatgtcccccaaaagacgacccacaggttatggaggacaaaagcgaccggccggtctgccgacacttcgccaaaaagggccattgtaggtacgaggacctctgcgcattttaccaccctggtgtcaacggtccacccctctag

SEQ ID NO: 219114 - DNA, 567 bp, Artificial Sequence
  derived and/or modified sequence
atgcctaaacgcaagaagcagaatcatcatcagccacccacccagcagcagccacctctgccagagagagaggaaaccggcgatgaggaggatggatctccaatcggccccccgagtctcctgggccctccgcctatggcaaatggtaaaccgggggatcctaagagcgcccttcatcgggggccccccggtagcagggggcccctaatccctccactgctctccctccctccccctccttggggacgcggaccgatcaggagagggctgggccctcgatcctctccgtacggccgggggtggtggggcgtcaacgctgaacctccttttcctggaccagggcacggcggcccaacacgaggtagctttcataaggaacagcgcaatccacgccgacttaaatcctggagcctgatcaagaatacttgcccaccgaaagatgaccctcaggtgatggaggacaagtctgatcgtccagtctgcaggcactttgccaagaagggccactgcagatacgaggacctctgcgcattctaccatcccggtgtgaatggcccacctctctag

SEQ ID NO: 219115 - DNA, 567 bp, Artificial Sequence
  derived and/or modified sequence
atgccaaaacggaagaagcagaaccatcaccagcctcctacccagcagcagccacccctgcctgagagagaagagacgggagatgaagaggatggcagccctattggcccgccatctttgctgggccccccacctatggccaacggcaagcccggggacccaaaatcagctctgcacagagggccgccaggaagtcggggacctcttattcccccactcctctccctaccacctcccccgtggggaaggggaccaatcagacgcggactgggacccagaagttctccttacgggcgaggctggtggggcgtgaacgccgaacccccctttcccgggccgggccacggcgggccgacccgaggaagcttccacaaggaacagagaaaccctaggagactgaaaagttggagtctcattaaaaacacttgcccacccaaggacgatccacaagtcatggaggataaatcagatcgccctgtctgtagacattttgcaaaaaagggccattgtcgttatgaggatttgtgtgctttctatcatcccggtgtgaacgggccacctctgtag

SEQ ID NO: 219116 - DNA, 567 bp, Artificial Sequence
  derived and/or modified sequence
atgccgaagaggaagaagcagaaccaccaccagccacctactcagcagcagcctccccttcctgaaagagaggagacaggagatgaagaggatggttctcccatcggaccaccctccctcctagggcctccccccatggccaatggcaaacccggcgaccctaaatccgctttacaccggggaccacctggcagccgcggccccctgattcctccactgctgagcctgccaccacccccatgggggcggggccccattagacggggccttgggccaaggtcaagcccttatggaagaggatggtggggagttaacgcagaaccccccttcccaggacctgggcacgggggacctacacgcggatcctttcataaggagcagaggaatcccaggcgcttgaaaagctggtccctgatcaagaacacatgtccacccaaggatgaccctcaggtaatggaggataagtccgatcggcccgtgtgccgccacttcgccaagaaaggccactgcagatacgaggacttgtgcgccttttaccacccgggagtgaacgggcccccactgtag

SEQ ID NO: 219117 - DNA, 567 bp, Artificial Sequence
  derived and/or modified sequence
atgccaaaacggaagaagcagaaccaccaccagccaccaactcagcaacaaccccccctcccagaaagggaggagacgggtgatgaggaagatgggagccctattgggccaccctcactgctcgggccacccccaatggcaaatgggaagccgggcgaccccaagtctgcacttcaccgcgggcctccgggatcgcgggggcccttgattcccccgctcctgtccctgcctccccccccttggggaagaggcccaattcgacgtggcttgggcccgcgctcctcaccatacggacggggatggtggggtgtaaatgccgagcccccgtttccagggcctggccacggaggacctaccagagggagcttccataaagaacaacggaatcctcgtaggttaaagtcctggtccttgattaagaacacgtgcccccctaaggacgatccccaagtcatggaagacaagagcgatagaccagtgtgtaggcactttgccaagaagggccattgccggtacgaggatttatgcgcattttaccatcctggggttaacggccccccactttag

SEQ ID NO: 219118 - DNA, 567 bp, Artificial Sequence
  derived and/or modified sequence
atgcccaagcgtaaaaaacagaaccaccaccaaccacccactcagcagcagcctccattgcctgaacgggaggaaactggagacgaggaagacggctctcccatcggccccccttcactgctgggtcctccccctatggctaatggcaagcccggcgacccaaaatccgccctccatcgcggccccccaggatcacggggtccccttataccgcccctgctctcactgcccccccccccctgggggcggggcccaattagacgaggactgggacctagaagttccccttatggacggggctggtggggggtgaacgccgagcctccgtttcccgggcccgggcatgggggtcccactcgcggttcctttcacaaggaacaacgcaatccaaggagattaaaatcctggtccctcatcaagaacacgtgtcctcccaaagacgacccacaggtaatggaagataagagcgacaggcccgtctgcagacatttcgccaagaagggacactgccgatatgaggacctgtgtgcattctatcaccccggcgttaacggtccacccctgtag

SEQ ID NO: 219119 - DNA, 762 bp, Artificial Sequence
  derived and/or modified sequence
atgccggggcgcacggagggtggcagctggttacgcaacgcagcggcagccgacgtgttgcggaacctaccagaagtggagtggcgtgagccacagcactgctgtccacctactcccaggaaacggaaacagaaccctcgggtacctctgcctcactaccctccgaatcctgccgccgccatcgccgcagataccatgccgaagaggaagaaacagaatcatcaccagccacccacacagcagcagccaccgctgcccgaacgagaagagacaggagacgaggaagacgggagtcctatcgggcctcccagtctccttgggcccccccctatggcaaacggaaaaccgggagacccaaagagtgccctgcatagagggccaccaggcagccgcggcccactgatcccgcccctcctgagcctacctcctccaccttggggcaggggccctatccggcgggggttaggtccaaggagctctccttacggacggggatggtggggagtgaatgctgagcccccctttcctggccctggccacggggggcctacacgaggctcttttcacaaggaacagaggaatccccgcaggctgaagtcctggagcctgatcaagaatacctgccctccaaaggacgacccccaggtcatggaggataaaagtgatcgcccagtatgcaggcactttgcaaagaaaggacattgtagatatgaggatctgtgcgcattctaccatcctggcgtgaatggcccgcccctgtag

SEQ ID NO: 219120 - DNA, 762 bp, Artificial Sequence
  derived and/or modified sequence
atgcccggtaggacagagggaggctcttggctgagaaatgccgctgccgctgatgttctcagaaatttgcccgaagtcgagtggcgggaacctcagcactgctgcccacctacaccacgaaaacgcaagcagaacccaagagtcccactgcctcattacccgccgaacccagcggcagcgattgccgcggacactatgcccaaaaggaaaaaacagaaccaccatcaaccgccgacccaacagcaacctcccctcccagagagggaagagacaggagacgaagaggacgggagtcccattggcccaccttccctgctgggacccccccccatggccaacggcaagcctggcgatccgaaaagtgcactccaccgcggccctcccggcagtagaggcccacttattcctcctctcttgagcttgcctcctcccccctggggtcgtggccctattcgacgaggtttaggacctaggagttcaccttacggtcgcggatggtggggggtgaacgccgagccccccttccctggacctggacacgggggcccaacccggggctcttttcacaaggaacagcggaatccacgccgactcaaaagctggagcctgataaagaacacctgtcccccaaaggacgatccgcaggttatggaagacaagagcgaccgccctgtctgtcggcacttcgctaagaaaggacattgccggtacgaagatctgtgtgcattttaccatcccggggtgaatgggccaccattatag

SEQ ID NO: 219121 - DNA, 762 bp, Artificial Sequence
  derived and/or modified sequence
atgccaggtcgcacagaaggcggttcgtggttgcggaatgcagcggcagcggacgttctgcgaaacctgcccgaggttgagtggagagagccgcagcattgctgtccccccacccccaggaagcgcaaacaaaatccacgggtgcctctccctcattatcccccaaaccctgccgcggccatagccgccgacacgatgccaaagagaaagaaacaaaaccaccaccagcctcccacgcaacagcagcctcctctacctgagcgcgaagagaccggggatgaagaggacggatctccaataggccctccttccttgctggggccacccccaatggccaacggaaagcctggagacccaaagtctgctctccacaggggtcctcccggttcacgaggacccttgatacctcctcttctgtctctgcctcctccgccgtgggggcgtggcccaattcgaaggggactggggccaagatcatccccctatggccggggttggtggggcgtcaatgccgagccccctttccccggtcctggccatggcggccctacccggggtagcttccacaaagagcagcggaatccccgacgtctaaagtcatggtcattaatcaagaacacttgccctccaaaggacgatccccaggttatggaggataaatcagatcgcccagtttgccgccactttgccaagaaagggcattgccgctacgaggatttgtgcgcgttttaccatcctggggttaatggtccgccactctag

SEQ ID NO: 219122 - DNA, 762 bp, Artificial Sequence
  derived and/or modified sequence
atgccaggacggaccgagggcgggtcatggctcagaaacgcggccgcagcggatgtactgaggaacctgccggaggtggagtggcgagagcctcagcattgttgtcctcccactccccggaagaggaagcagaaccctcgggtgcccttacctcattatccgcccaatcccgcggccgccatcgccgccgataccatgccaaagaggaaaaaacaaaaccatcatcagccaccaacccaacagcagcctcctttgcccgagcgggaggaaacaggtgacgaggaggatggtagccccattggccctccctcactcctggggcccccacctatggcaaacggcaaaccaggagatcccaaaagtgccctgcatcggggaccaccaggcagtcgtggacctcttatccctccactcctaagccttccaccccccccttggggtcgcggccctattagaaggggcctgggcccacgcagttctccctatggacgcggatggtggggtgtcaatgccgaaccaccattccctggtccgggtcacggggggccgactcgagggagctttcacaaggaacagagaaatccccgtcgcttgaagtcttggagtctcattaagaatacctgtccccccaaggatgacccccaggtaatggaggataagagtgataggcccgtgtgtcgacacttcgccaagaaaggccactgtagatacgaggacctgtgcgccttttaccaccccggggtaaatgggccccctctgtag

SEQ ID NO: 219123 - DNA, 762 bp, Artificial Sequence
  derived and/or modified sequence
atgcccggacggaccgagggtggatcctggctcaggaatgctgccgctgctgatgtgctgaggaatttaccagaagtggaatggcgggagccgcaacactgttgtcctccgacaccccgaaagaggaaacaaaacccccgtgtgccacttcctcattatcccccaaaccccgctgctgctatcgcggctgatactatgcccaagcgcaagaagcagaaccaccaccagccaccaacacagcaacagccgccgctgcccgagcgggaggagacaggtgatgaggaggacgggtccccaattggcccgccaagcctgctgggaccacctccaatggcgaatggtaaaccaggagaccccaagtccgctctgcaccgcggcccccccggatctcggggcccactcatcccccctttgttatcgttacccccccccccttggggcaggggacccatccgccggggcctgggccctcgttctagcccatatggtcgcggctggtggggcgtcaacgcagagcctcctttccctggacccggccacggcggccccactcggggatcctttcacaaagagcaaagaaatccccgcagactcaagtcctggtcccttatcaagaatacctgcccccctaaggatgatcctcaggtgatggaagataagagcgataggcctgtctgtcgacattttgccaaaaaggggcattgcagatacgaagacctgtgtgctttttaccaccccggcgtgaacggcccccccctatag

SEQ ID NO: 219124 - DNA, 762 bp, Artificial Sequence
  derived and/or modified sequence
atgccggggaggaccgaaggcggatcctggctaaggaacgccgcagcagcagatgttctgcgcaatctgcccgaggtggaatggcgagaaccacagcattgttgtccccccacacctagaaagcgtaaacagaaccctcgggtcccgctgcctcattaccccccgaatccagctgctgctatcgccgccgatactatgcccaaacgtaagaagcagaatcatcaccagcctcccacccagcagcagccgcccctgcctgagcgcgaagagaccggcgacgaagaggatgggtctcctattgggccaccttcactgctggggcctcctcctatggctaatggaaagcctggcgatcccaaaagtgccctgcaccgaggcccccctggcagtcgaggacctctcattccccctctcctgtctttaccccctccaccatgggggagaggtccaattcgacggggcctgggtccacggtctagcccctacggaagaggctggtggggggtcaatgcggagccccccttccctggacctggccatggaggacccacccgcggttccttccacaaagagcaacgaaaccctcggcgcctgaagagttggtcgttgattaagaacacatgtcctccgaaagacgatccacaggtgatggaggacaaatcggacagacctgtttgccgccattttgccaagaagggccactgtaggtacgaagatctgtgtgcattctaccaccccggggtaaatggcccgccactgtag

SEQ ID NO: 219125 - DNA, 762 bp, Artificial Sequence
  derived and/or modified sequence
atgcctggccgcacagaaggaggctcctggctgagaaatgctgctgctgctgatgtgctgaggaacctgcctgaggtggagtggagggagccccagcactgctgcccccccacccccaggaagaggaagcagaacccccgggtgcccctgccccactacccacccaacccagctgctgccatcgctgctgacaccatgcccaagaggaagaagcagaaccaccaccagccccccacccagcagcagccccccctgcctgagcgggaggagactggagatgaagaagatggcagccccatcggcccccccagcctgctgggccccccacccatggccaacgggaagccaggggaccccaagagcgccctgcaccggggccccccaggcagccggggccccctcatcccccccctgctgagcctgcccccaccaccctggggccggggccccatccggcggggcctgggccccaggagcagcccctacggccggggctggtggggcgtgaatgctgagccccccttccctggccctggccacggcggccccacccggggcagcttccacaaggagcagaggaacccccggcggctgaagtcctggagcctcatcaagaacacctgcccccccaaggatgacccccaggtgatggaggacaagagtgacaggcctgtgtgccgccactttgccaagaagggccactgccgctatgaggacctgtgtgccttctaccaccctggggtgaatggaccacccctgtag

SEQ ID NO: 219126 - DNA, 567 bp, Artificial Sequence
  derived and/or modified sequence
atgcccaagaggaagaagcagaaccaccaccagccccccacccagcagcagccccccctgcctgagcgggaggagactggagatgaggaggatggcagccccatcggcccccccagcctgctgggccccccacccatggccaacgggaagccaggggaccccaagagcgccctgcaccggggccccccaggcagccggggccccctcatcccccccctgctgagcctgcccccaccaccctggggccggggccccatcagaagaggcctgggccccaggagcagcccctacggccggggctggtggggcgtgaatgctgagccccccttccctggccctggccatggaggccccacccggggcagcttccacaaggagcagaggaacccccggcggctgaagtcctggagcctcatcaagaacacctgcccccccaaggatgacccccaggtgatggaggacaagagtgacaggcctgtgtgccgccactttgccaagaagggccactgccgctatgaggacctgtgtgccttctaccaccctggggtgaatggcccccccctgtag

SEQ ID NO: 219127 - DNA, 762 bp, Artificial Sequence
  derived and/or modified sequence
atgcccggccggaccgagggcggcagctggctgcggaacgccgccgccgctgacgtcctgcgtaatctgccggaggttgaatggagggagcctcagcactgctgccccccgactccccgcaagagaaagcaaaaccccagggtgcctttaccccattatccgccaaaccctgccgctgccatcgccgctgacactatgccaaagagaaaaaaacagaaccaccatcagccaccgacacagcagcagcccccactcccagagcgagaggaaaccggagatgaggaggacggcagccctattggccctccctcactgttgggtccacccccgatggccaatggtaagcctggggatccgaaatcagccctgcatagaggtccacctggatcaagagggccgctgattcccccattgctgagtttgccccccccaccctggggtaggggacctattaggcgcgggctggggccgaggtctagcccttatggcaggggatggtggggcgtgaatgctgagcccccgttccctggaccgggccacggaggacccacacggggatcattccacaaggaacagagaaacccccgcagactcaaaagctggagccttattaagaatacctgccccccaaaagacgacccccaggtcatggaggacaaatccgacagacctgtgtgtcgtcactttgccaagaagggccactgtcgctatgaggatctctgcgccttttatcatccgggagtgaacggccctccactttag

SEQ ID NO: 219128 - DNA, 567 bp, Artificial Sequence
  derived and/or modified sequence
atgcccaagcggaagaagcagaaccaccaccagccccccacccagcagcagccacctttacctgagagagaggaaacaggcgatgaagaagatggcagcccaattgggcctcctagtctgctgggccctccgccaatggccaacgggaaacctggcgatcctaaatctgccctccatcgcggccctcctggcagcaggggacctctcataccccctctactgtccctccccccacctccttgggggagggggccaatacggagaggcctcggaccgaggtcttccccgtatggtcgcggctggtggggggtgaatgccgaaccgccgttccccgggcctgggcacggcggcccaacacgaggatcatttcacaaagaacagcgaaatcctagaaggctgaaatcatggagtctgatcaaaaacacatgtcctcctaaagatgacccccaagtcatggaagataaaagtgaccgccccgtgtgtaggcacttcgccaaaaaaggacattgtcgctatgaagacctttgtgctttttaccatccaggtgtcaatggacccccactgtag

SEQ ID NO: 219129 - DNA, 567 bp, Artificial Sequence
  derived and/or modified sequence
atgcccaagcggaagaagcagaaccaccaccagccccccacccagcagcagccaccccttcctgaaagggaagaaacgggcgacgaagaagacggcagcccgattggacccccatccctgcttgggccccctcccatggccaacggtaagccaggcgacccgaaaagcgctctacatcgtggtccccctggcagcaggggccctctgatcccccccctgctcagccttccccccccaccttggggccgcggtcccatccgccggggacttggccctcggtcctcgccttacggaaggggctggtggggggtgaacgccgaacctccatttccaggacccggacatggaggacctactcgtggttctttccacaaggaacagcgcaatccgcgaagactgaaatcttggagcctcattaaaaacacgtgtcccccaaaggatgatccccaggtgatggaagataaatcagataggcccgtttgcaggcatttcgctaagaagggacattgcaggtatgaggatctgtgtgctttctaccatcctggcgttaatggacctcccctgtag

SEQ ID NO: 219130 - DNA, 567 bp, Artificial Sequence
  derived and/or modified sequence
atgcccaagcggaagaagcagaaccaccaccagccccccacccagcaacaaccccctcttcccgagcgcgaggagactggggatgaggaagacggatctccgatcggaccaccgtctcttctcgggcccccacccatggcaaacggcaagcccggcgacccgaaaagcgctcttcacagaggtccaccggggtcacgcggtccactcataccccctttgcttagcctgcctcccccaccctggggacgcggaccgatcaggcgcggattaggaccgaggtcctccccatacggccgggggtggtggggggtaaatgcagaacccccctttccaggaccaggtcatggtggaccgacaaggggatcgtttcacaaggaacagaggaacccccgaaggttgaaatcctggagcttgatcaagaatacatgcccgcccaaggatgatccccaagtcatggaggacaaatctgatagacctgtgtgtcgtcatttcgctaaaaagggccactgtcggtacgaggatctgtgcgctttttaccatccaggcgtcaatgggcctcccctgtag

SEQ ID NO: 219131 - DNA, 567 bp, Artificial Sequence
  derived and/or modified sequence
atgcccaagcggaagaagcagaaccaccaccagccccccacccagcagcagccacccctgccagaacgagaggaaactggggatgaagaggacggttctcctatcgggcccccctccctgttaggcccccccccaatggcgaatggcaaacccggcgacccaaaatccgccttgcataggggtcctcctgggtctagggggcccttgattccacccctgcttagtctgccacctcccccctggggcaggggtcctatccggcgcggcttaggaccacgcagctcaccctatggaagagggtggtggggcgtgaacgccgagccaccttttcccggacccgggcatggcggacctacccgcgggagcttccataaggagcaacggaaccctaggcggctgaagagttggagtctcatcaagaatacttgcccccctaaagacgatcctcaggtcatggaggataagtcagatcggcccgtatgtcgccacttcgctaagaaggggcactgtcgctatgaggatctctgtgcattctaccatccaggcgttaacgggccaccactctag

SEQ ID NO: 219132 - DNA, 567 bp, Artificial Sequence
  derived and/or modified sequence
atgcccaagcggaagaagcagaaccaccaccagccccccacccagcagcagccccctcttcccgaacgcgaagagacaggggatgaagaggatggatccccaattggaccaccatcgctgctgggaccccctcccatggcaaatggaaagccaggtgatccgaaaagtgcccttcacaggggcccccccggatccagaggcccactgattccgccgcttctctcgctcccacctccgccctggggtagaggtccgataagacggggactgggccccagatcttctccttatgggcgaggctggtggggggttaatgccgagcccccctttcccggccccggccacggaggccctacaaggggctctttccataaggagcagagaaatccccgccgattaaagtcttggtcactgatcaaaaatacttgcccccctaaagacgacccccaggtgatggaagacaaaagtgacagacctgtttgtaggcacttcgccaaaaaaggacactgcaggtatgaggatctttgcgcattttaccaccccggcgttaatgggccaccactgtag

SEQ ID NO: 219133 - DNA, 567 bp, Artificial Sequence
  derived and/or modified sequence
atgcccaagcggaagaagcagaaccaccaccagccccccacccagcagcagcctcccttacctgagagagaagaaaccggcgacgaggaggatggcagtcccataggccctccttcactgctaggtccccctcccatggcgaatggaaagcccggtgaccccaaaagcgctttgcacagaggtcccccaggtagtaggggcccactgatacctcctctgctcagtctgcccccaccaccttggggccgcggacctattcgcagaggcctcggtcccagaagttctccctacggaagaggttggtggggcgttaacgccgaaccccctttccctggccctggtcacggtggacccactcgagggtcattccataaagagcagcggaacccccgacgcttgaaaagctggagtctgataaaaaacacttgtccgccaaaggacgacccacaagtgatggaggataagtccgaccgccctgtatgtagacatttcgcaaagaaaggccattgtcgttacgaagatctgtgtgccttctaccacccaggagttaatggacctccactgtag

SEQ ID NO: 219134 - DNA, 567 bp, Artificial Sequence
  derived and/or modified sequence
atgcccaagcggaagaagcagaaccaccaccagccccccacccagcagcagccacccttgccggaaagggaggagacgggggatgaggaagacggatctcccataggtcccccgagtcttcttggccctcctcccatggccaacgggaaacccggagatcccaaatccgctctccacagagggcctccaggatctagaggccccctaattccccctcttttatcactaccacccccaccatggggtcggggccccatcaggcgaggattagggcctcgttccagcccctatgggagaggatggtggggggtgaacgctgaaccacctttccctggccccggtcatggcggccccactaggggcagcttccataaagagcagaggaacccacgcagacttaaaagttggtctctgatcaagaacacgtgcccacccaaggacgatccacaggttatggaagacaagtcggatagacctgtttgccggcattttgctaaaaaggggcactgtcgctatgaggacctgtgtgcattctaccacccgggagtcaatggccctcctctgtag

SEQ ID NO: 219135 - DNA, 762 bp, Artificial Sequence
  derived and/or modified sequence
atgcccggccggaccgagggcggcagctggctgcggaacgccgccgctgcagacgtactgcggaacctacccgaggtggaatggagagagccccagcactgctgcccacccactccccgaaagaggaaacaaaatcccagggtgcccctgcctcactaccccccaaaccccgcagcagccattgctgccgatacaatgcctaagcgcaagaagcaaaaccaccaccagccccccacccagcagcagcccccacttccagagcgcgaggagactggcgacgaggaggacgggtctcccataggccccccgtcgctccttggaccgccacctatggcaaacgggaagccaggagaccccaaatcggccctccacaggggccctccagggagcagggggcccctgatccccccattgctgtcattgcccccccccccatggggacgcgggcccatccggcgtggactgggcccacgttcctccccttacggcagaggctggtggggcgtgaacgctgagccccctttccccggtccaggtcacggagggccgacacgtgggtccttccacaaggaacagcgcaatcccaggcgtctgaagtcttggagccttattaaaaacacctgtccacccaaggacgacccgcaggtcatggaggacaagagcgaccgccctgtgtgccgacacttcgcaaagaaaggtcactgccgctatgaggatctgtgcgctttctatcacccgggcgtcaacggtcccccactctag

SEQ ID NO: 219136 - DNA, 762 bp, Artificial Sequence
  derived and/or modified sequence
atgcccggccggaccgagggcggcagctggctgcggaacgccgccgctgccgatgtgcttcgaaaccttcccgaggtcgagtggagagaacctcaacattgctgccctccaacgccccgcaaacgaaaacaaaatcccagggttcctctgcctcactacccaccaaaccctgccgcagccatcgcggcagataccatgcctaagaggaaaaagcaaaaccaccaccagccccctacccaacagcagccaccactgcccgagcgcgaggaaaccggtgacgaggaggacggatcccccattggccctccatctctcctgggtcctcctcccatggcgaatggcaagcctggggatcccaagtctgccctgcataggggcccccctgggagccgaggacccctgatcccccctttactctctttgccaccccccccttggggtcgcggtcctatcagacggggtctgggtcctagaagcagcccctatggcaggggctggtggggggtgaacgcagaacccccattcccgggccctggtcacggagggccgacaaggggatctttccacaaagaacagcgtaacccccgcaggctgaaaagctggtctctgataaagaacacctgccctcccaaggatgatccacaggtgatggaggataaatcggatcggccagtttgcagacactttgcaaaaaagggacattgccggtatgaggatttgtgcgcattctaccacccaggtgttaacggcccacccctatag

SEQ ID NO: 219137 - DNA, 762 bp, Artificial Sequence
  derived and/or modified sequence
atgcccggccggaccgagggcggcagctggctgcggaacgccgccgcagcggatgttctcaggaatctgcctgaggtggagtggcgcgagccacaacattgttgtccacccacaccacgcaagaggaaacagaatccgcgggtgcccttgcctcattatcctccaaatccagccgcagccatcgctgccgatacgatgcctaagcggaaaaagcagaaccaccaccagccacccacacagcagcagccaccattacccgaacgggaggaaactggggacgaggaagatgggtcccctataggacccccatcccttctgggtcctccacctatggccaatggcaaaccaggcgacccaaagtcggccctgcacagggggcctccggggtctagggggccgctgattccaccactgttgtccttgccccctcccccatggggtaggggtccaatccggcgcggattggggcctcgaagctccccgtacggcaggggctggtggggggtcaacgccgagcctccttttccgggacctggtcatggcggccccactcgcggctcatttcacaaggagcagaggaacccaagacgactgaaatcctggtcactaatcaagaacacatgccctcctaaagatgatccacaagtcatggaggacaaatctgatagacccgtttgccgtcatttcgccaagaaaggtcactgccgctacgaagacttgtgcgccttctatcatcccggtgtgaacggtccacccctgtag

SEQ ID NO: 219138 - DNA, 762 bp, Artificial Sequence
  derived and/or modified sequence
atgcccggccggaccgagggcggcagctggctgcggaacgccgccgccgcagatgtgctcagaaacctgcctgaagtggaatggcgcgagccacagcactgctgtcctccaacccctagaaaaagaaagcaaaaccctagggtgcccctgcctcactatccgcctaaccccgcagctgccatcgctgccgacacgatgccgaagcgcaagaaacagaatcaccaccagccgcccactcagcaacagccaccccttcctgagcgagaagagaccggcgacgaagaggacggctcgcctattgggcccccttctctcctcggcccgcccccaatggccaatggcaagccgggggaccctaaaagcgccctccaccggggccctcctgggagtcgggggccactgattcctccactcctgtcactcccaccgccaccatggggaagagggccaatccgccgcggactgggacctcgttcatcgccttatggtaggggatggtggggggtgaacgcggaacccccctttcctggcccgggccacggcggaccaacacggggctcctttcataaagagcagcgaaacccccgcaggctcaagagctggagcctcataaagaatacttgtccccctaaggacgatccacaggttatggaagacaagtcagatcggcccgtttgccggcattttgcaaaaaaaggacattgcagatacgaggacctttgcgccttttaccatcctggagtgaacgggccgcctctgtag

SEQ ID NO: 219139 - DNA, 762 bp, Artificial Sequence
  derived and/or modified sequence
atgcccggccggaccgagggcggcagctggctgcggaacgccgccgccgccgacgtgctccgtaacctgcccgaggtggagtggcgggaaccccaacactgttgcccccctacacctcgtaagcgcaagcagaatccgcgagtaccgctgcctcattatcctccaaatcctgcggcggcgatcgcggccgacacaatgcccaagcgaaaaaagcagaaccaccatcagccacctacacagcagcaacctccactgcctgagagagaagaaactggcgacgaggaggacggtagtcctataggtccgccctctcttctgggcccccctccaatggcgaatggcaaacccggcgacccaaagtccgcactccataggggacccccaggaagccggggtccattaattccaccactgctaagcctgccaccaccaccttgggggcgtggcccaattcggcgggggctggggccacggtcctctccttatggacggggatggtggggagtaaacgctgagccccctttccctgggccgggccatggtgggcctacgcggggcagctttcataaggagcagcgtaatccccgacgtcttaaatcctggtccctcattaagaacacttgtccaccaaaggacgatcctcaggttatggaagataaaagtgataggccagtctgtaggcacttcgctaagaaggggcattgtaggtatgaagacctgtgtgctttctatcatccaggggtgaatggaccacctctttag

SEQ ID NO: 219140 - DNA, 762 bp, Artificial Sequence
  derived and/or modified sequence
atgcccggccggaccgagggcggcagctggctgcggaacgccgccgctgctgacgtcctgcgtaacctccctgaagttgagtggcgagaacctcagcactgttgtcctcccaccccacgcaagcgaaagcaaaatccaagggtgcccctgccgcactaccctcccaaccccgccgctgctatagccgcagacacaatgcctaaacggaagaagcaaaatcaccaccaacccccaacccagcagcagcctcccttaccggaacgggaggaaacaggggacgaagaagacgggtcacctattggcccaccatcgctcctggggcctcccccaatggctaatggaaaaccgggggaccctaagtctgcccttcatcgggggcctcccgggagccgaggaccactaatcccccctttactgagcctcccgcccccaccctggggaagagggccaatcaggcggggattggggcccaggagctccccatatgggcggggatggtggggagtcaacgcagaaccgccgttcccgggtcctggacatgggggccctactcgtggctcgtttcataaagagcagcggaacccccggcggctgaagagctggagtttaataaaaaacacatgtccaccaaaggacgatcctcaggtgatggaggacaagtccgatcgccctgtgtgcaggcactttgcaaagaagggccactgcagatatgaggatctgtgcgcattttatcaccctggggtgaacggaccacctttgtag

SEQ ID NO: 219141 - DNA, 762 bp, Artificial Sequence
  derived and/or modified sequence
atgcctgggaggacagagggtgggagctggttgcgtaatgccgcagctgccgacgtcctcaggaatcttcccgaagttgaatggagggagccccagcactgttgcccacctaccccgcgtaagcggaaacagaacccacgcgtgcctctgccccattacccccctaacccagcggcagcaatcgccgcagataccatgcctaagaggaaaaaacagaaccaccatcaacccccaactcaacaacaacccccactgcctgagcgggaagaaactggagacgaggaagatgggtcccccattggaccgccttcgctgctggggcctccacccatggccaacggtaagcccggagatcccaagagcgctctacatcggggtccaccgggatcccgcggacctcttataccgcctctgctcagccttccaccaccgccatggggcagagggccaattcggcgaggcttagggccaaggtcctcaccctatggtcggggttggtggggggtaaacgctgagccaccctttcccggacctggtcatggcggaccaacccgaggatcatttcataaggaacagcgaaatccaagaagactgaagagctggtccctaatcaaaaatacgtgtccgccaaaggacgacccacaggtgatggaagacaagtccgatagaccggtgtgtaggcatttcgctaagaaaggccactgtagatacgaggacctgtgcgcattttaccacccaggggtaaatggcccacccttatag

SEQ ID NO: 219142 - DNA, 567 bp, Artificial Sequence
  derived and/or modified sequence
atgcccaaaaggaagaaacaaaatcatcatcagccacccacccagcagcagccccctctgcccgagagggaggagaccggcgatgaagaagacgggagtccaatcggccctccttctctgctcggcccacccccaatggctaacggcaagccaggtgaccccaagagcgccctgcataggggccctccaggttcacgtggaccactgatcccgcctctgctgtccctgcctcccccaccatgggggcgagggcctattcggaggggcctggggcctcgcagctctccttatggcaggggttggtggggcgtgaatgcagagcccccttttcccggaccagggcatggcggacccactcgtgggtcttttcacaaggaacagaggaatccacggaggctgaagtcctggtcattgatcaagaacacctgtcctcccaaagatgacccacaggtcatggaggacaagtctgatcggcctgtctgccgccacttcgcaaaaaaaggtcactgcaggtatgaggatctttgtgcattctaccaccctggcgtgaacggccctcccctatag

SEQ ID NO: 219143 - DNA, 567 bp, Artificial Sequence
  derived and/or modified sequence
atgcctaaaaggaaaaaacaaaatcaccaccagcctcctacacaacagcagcctcccttgccagagagagaggaaactggggacgaagaagacggcagtccaatcggacctccatctttactgggcccaccacccatggccaatggaaagccaggcgacccaaaatctgcgttacatagaggtcctcccggatcacggggacctctcattcctcctctgctgagtctgcctccaccaccatggggtcggggaccaatcaggagagggctgggacctcgatctagcccctatggacgtggatggtggggcgtgaatgcagaacctccctttcccggtccgggtcacggcggtccgactagaggttcattccataaggagcagagaaacccccgaaggctaaaatcatggtccctcataaagaatacgtgtccacccaaggatgatcctcaggtcatggaagacaaatcggaccgcccagtgtgtaggcactttgcaaagaagggtcactgcaggtacgaggacctctgtgccttttaccatccaggcgtgaacggaccgcctttgtag

SEQ ID NO: 219144 - DNA, 567 bp, Artificial Sequence
  derived and/or modified sequence
atgcctaagcgtaagaaacagaatcaccaccagcctcccactcagcagcagccacccctgccagagcgcgaggaaacgggcgacgaagaggatggcagcccaattggccctccctccctccttggccctccacccatggcaaatggaaagcccggagatccgaaatctgctctgcaccggggaccacccggtagccggggaccactaatccctcccctactgtccttaccgcctccaccctgggggagaggccctattcgcagagggctggggcctcgttcctccccctacggccgtggctggtggggagttaacgctgaacctccctttcccggtcctggccatggtggcccaacacgcggatccttccacaaggaacagcggaaccctcgcagacttaaatcatggtccctcataaaaaatacctgtccccctaaggatgaccctcaggtgatggaggataagtcagatagacctgtgtgccgacacttcgccaaaaaaggtcactgtaggtacgaggacctttgtgccttttatcatcccggtgtaaatgggccaccgctgtag

SEQ ID NO: 219145 - DNA, 567 bp, Artificial Sequence
  derived and/or modified sequence
atgccgaagagaaagaaacaaaatcatcatcagccccctactcagcagcaaccccctttacctgagagggaggagaccggagacgaggaagacggatcccccatcggccctccttctctactgggcccaccacctatggctaatggcaagcctggggatcccaaatcagccctccatcgcggacccccaggctcaagaggccctttaattccacctcttctgtccctgcctccacccccatggggtcgtggtcctattaggcgaggcctcggccctcgtagttccccttacggcaggggctggtggggagtgaacgcggagccccctttccccggaccaggccacggcggtcctaccaggggaagctttcacaaagagcaaaggaatccgagacgcctgaagagttggtcccttataaagaacacctgtcctcctaaagatgaccctcaggtgatggaagacaagagcgacaggcccgtatgtagacactttgccaaaaagggccactgtcggtacgaggacctctgtgcattttatcaccccggtgtgaacgggcctccactgtag

SEQ ID NO: 219146 - DNA, 567 bp, Artificial Sequence
  derived and/or modified sequence
atgcctaaacgtaagaagcagaatcatcaccaacccccaactcagcaacagcccccactacccgaaagagaagagacaggagatgaagaagacggatcccccataggtcctccctctctgctcggccctccccctatggccaatgggaagcctggagatccaaagtccgccctccaccgtggaccaccaggtagccgaggccctctaatacctcctcttctgtctttgcctcctcccccttggggtcgcggacctatccgacgtggactgggtccgcgatcttccccttacgggaggggctggtggggcgtcaatgccgagcccccattcccaggaccagggcatggcggaccgactagagggtccttccacaaggagcagagaaacccacgcaggctgaaaagctggagcctcattaaaaacacctgtcctcccaaggacgacccacaggttatggaggacaagagtgatcggccagtgtgccgtcactttgctaaaaagggacattgccgctacgaagatctttgcgccttttaccatcctggggtcaatggaccgcctctgtag

SEQ ID NO: 219147 - DNA, 567 bp, Artificial Sequence
  derived and/or modified sequence
atgccaaaaaggaaaaagcagaatcatcaccaacctcctacccagcaacagccgccacttccagaaagggaagagacaggggacgaagaggacggaagtcccatagggcctccatcgttgctcggccctccgccaatggcaaatggaaagcccggagaccctaagtctgctctacaccgtgggccaccagggtctaggggcccattgattccaccactgctaagcctccccccacctccctggggacgtggccctatccgacgcggacttggccctcgaagtagcccctacggccgtggctggtggggcgtgaacgccgagcctccgttccccggacctgggcatggcggaccaacacggggatctttccataaagagcaaaggaatccccgacggctgaagagctggagcctgattaagaatacatgccctcctaaagacgacccacaagttatggaagataagtcagatcgcccagtgtgtcggcatttcgccaagaagggtcactgtcgctacgaggacctgtgtgcgttctatcatcctggagtgaacggaccaccattatag

SEQ ID NO: 219148 - DNA, 567 bp, Artificial Sequence
  derived and/or modified sequence
atgcccaagcgaaagaaacagaaccaccatcagcccccaacacagcagcagccaccactgccagaacgagaagagaccggtgacgaagaggacggttcacctattggccctccttccctcctgggaccgccacctatggccaacggcaaaccaggggatcccaagtccgccctgcataggggaccacccggatccagggggccactaatccccccattgctttctctccctcctcctccttggggcagagggcctataagaaggggcctcggcccaagatcttctccatatgggagaggatggtggggtgtgaacgccgagcccccatttcctggtccagggcacggcggacctaccagagggtccttccacaaggaacagcgtaacccaaggaggcttaagagttggagcctgatcaagaatacatgccctccgaaagatgaccctcaggtcatggaggacaagtcagatcgaccggtatgccggcacttcgccaaaaaggggcattgccggtacgaggacctatgtgccttctaccatccgggtgtgaatggccctcccctgtag

SEQ ID NO: 219149 - DNA, 762 bp, Artificial Sequence
  derived and/or modified sequence
atgccagggaggacggagggtggtagctggctccggaatgctgccgctgcagacgttctgcggaaccttccagaagtggaatggagagagccccagcactgctgcccacctacccccaggaagcgcaagcagaacccaagagtaccactgccacactatccacccaatcccgctgctgccatcgccgcagacaccatgcctaaacggaaaaagcagaatcaccaccagccccctacgcaacaacagcccccacttcctgagcgggaggagaccggggacgaagaagatggatcccctatcggtccgccatccttactaggacctcccccaatggcgaatgggaaacccggtgaccccaagtccgccctgcacagaggcccacccggatcccggggtcctctgatccctccattgctctctctccccccacccccatggggcagaggtccaattcggagggggttaggtccacgatccagcccttatggacgcggttggtggggtgtgaacgccgagcccccatttcctggaccaggccacgggggtcctacccgaggctccttccacaaagagcaaaggaacccgagaaggttaaagagctggagcctgatcaagaatacatgccctccaaaagatgatccacaggtgatggaggataaaagtgaccgcccagtctgtaggcattttgcaaagaaagggcattgtcggtacgaggatttatgcgcattctaccacccaggcgtgaatggacccccattgtag

SEQ ID NO: 219150 - DNA, 762 bp, Artificial Sequence
  derived and/or modified sequence
atgccagggaggaccgaaggcggatcctggctgaggaacgctgccgcagccgacgtcctgcgcaatctgcccgaggtggagtggcgggaaccacagcactgctgccctcccacccctaggaaaagaaagcagaatcctcgggtaccccttcctcactatccacccaatccagcagcggcaatcgctgctgacaccatgccaaagcggaagaagcagaaccaccaccaacccccaactcaacagcagccaccactgcctgagcgcgaggagacaggggatgaagaggatggctctcccattgggcctccctcccttctgggccctccccctatggccaacggcaaacctggggatccgaagtcagcgctccatcgcggaccacctgggtcacggggaccactcattccccctctcctgtcgttgccaccccctccatgggggagggggcctatccggagaggccttgggcctcgcagctccccttatggaaggggttggtggggtgtgaacgctgaacccccttttccaggaccgggacacggcggaccgacacgtggtagtttccacaaagagcaacggaacccaagacgactcaaaagctggagccttataaagaatacttgtccccctaaagatgatccacaagttatggaagacaagtctgatcggccagtgtgtcgtcacttcgctaaaaagggacactgcaggtatgaggatctctgtgcattttaccatcctggtgtgaacggaccgccactgtag

SEQ ID NO: 219151 - DNA, 762 bp, Artificial Sequence
  derived and/or modified sequence
atgccgggtcgcactgaaggagggtcttggctgcgcaatgccgctgcagcggacgtattgagaaacctgcccgaagttgaatggcgggaaccccagcactgctgcccaccgaccccgcgaaaacggaaacagaacccgcgagtaccgttgccgcattatcccccaaatccggctgccgcaatcgctgccgacaccatgccaaagcggaagaaacagaaccaccaccagccccctacccagcaacagcctcccttacccgaacgagaggagactggagacgaagaggatggtagcccgatcggacctccttctttgctcgggccacctcctatggctaacggaaagcctggggatcccaagtccgccctgcaccgaggtccacccggttctagaggccctctgatcccgccacttctttctcttccaccacctccgtggggcagaggaccaatcagacgtggcctggggcctagaagctccccatatggccgtgggtggtggggcgtgaatgctgagccgccatttcccggtcccggtcacgggggtcctacaagaggctccttccataaagagcagaggaaccctcggagactcaaaagctggagcctgataaagaacacatgccctcccaaggatgatccacaggtgatggaggataaaagcgatagacccgtctgccgccactttgcaaaaaaagggcactgtcgttatgaggacctgtgcgctttctaccatcctggggttaatggaccacctctctag

SEQ ID NO: 219152 - DNA, 762 bp, Artificial Sequence
  derived and/or modified sequence
atgccaggccgaactgaaggagggtcgtggcttcggaatgccgctgccgcagatgtcttacggaaccttcccgaggtcgagtggcgagagcctcagcactgctgcccaccaactcccaggaagcgtaaacagaatccacgggttcccctgccccattatccaccaaatcccgcagcagccattgccgctgacacgatgcccaaacgtaagaagcagaaccaccaccagcctcccacacagcagcagccacctctcccagagcgggaagaaactggcgatgaagaagacggctcaccgattggacctccctccctgcttggccctcccccaatggcaaacgggaaacctggagatccaaaatccgcactacaccggggacctcctggcagccgcggaccactgattccccctctgctatccctccctcctccaccctggggaagaggaccaatccgcagaggattgggacctaggagctcaccatacggcagagggtggtggggagtgaatgcagagccaccatttcctggacccggacacggcggacccactaggggatcattccacaaggagcagcgtaatcccagacgattgaaaagttggtccttgatcaaaaacacttgcccgcctaaggacgacccccaagtaatggaagataagtccgatcgccctgtctgtcgacactttgccaaaaagggccactgtaggtacgaggatctctgcgccttttatcacccaggtgtgaacggtccaccactatag

SEQ ID NO: 219153 - DNA, 762 bp, Artificial Sequence
  derived and/or modified sequence
atgccaggcaggactgagggaggctcctggctgaggaacgccgctgcagccgacgtgttgcgcaacctgccggaggtggaatggagagagcctcagcactgctgcccccctacaccccgaaagaggaaacagaaccccagagttccgctgccccactatcctccaaaccccgcagctgcaattgccgcagacacgatgccgaagcgcaagaaacagaaccaccaccagcccccaacccagcagcagccacccctcccagagcgcgaggagactggcgatgaagaggacggaagcccaatcggcccaccctccctgctgggtcctccacctatggctaatggcaagcctggtgacccaaagtccgctttgcatcgcggtccccctggaagcagaggtcccctgatcccaccactgctgagtctgccaccgccaccatgggggagaggaccgatacgcagaggcctggggcctcggtcatctccgtacgggcgtggatggtggggggtcaacgctgagccaccatttcctggcccagggcatgggggtccgacaagaggctccttccacaaggagcagaggaaccctaggcgacttaagagctggagcctgattaagaatacatgtccacccaaggacgatcctcaagtgatggaggacaaatccgaccgccctgtttgtaggcacttcgccaagaagggacattgccgctacgaggacctctgtgccttctaccaccccggtgtgaacggtccacctctgtag

SEQ ID NO: 219154 - DNA, 762 bp, Artificial Sequence
  derived and/or modified sequence
atgcctggaagaacggaaggagggagctggctacgtaacgccgctgcagccgatgtgctcaggaatctgccagaggtggaatggagggagcctcaacactgttgcccacccacccccaggaagaggaaacagaaccctagggttccactcccgcactaccctccaaatcctgcagcggctattgcagcagacaccatgccaaaaagaaaaaaacagaaccaccatcagccacccacccagcagcagcctccacttccggagagggaagagacaggtgacgaagaggacgggtcgcccatagggccaccttctctcctcggccctccccctatggccaacggtaaacccggtgaccctaagtctgctttacatcggggaccaccaggatcaagaggaccactcattccacccctgttaagtctcccacctccgccatggggaagagggccaatacgccgtgggctgggccctcggagctcaccatacggtaggggctggtggggggttaatgccgagccaccttttcctggtccaggccatgggggaccgactaggggctcattccataaggagcagaggaaccccagaaggctcaaatcatggagcctgatcaaaaatacttgccctccgaaggatgacccgcaggttatggaagataaaagcgatcggccagtctgccggcatttcgcaaagaaaggccactgtaggtatgaagatctctgtgctttctaccatcctggtgtgaacggccctccactgtag

SEQ ID NO: 219155 - DNA, 932 bp, Artificial Sequence
  derived and/or modified sequence
gatcttacggtgcgacagtcctcttctcaggccctctggcccgagagcctgttgactctgtgacacactctgaggagctggttgtggtgttttccagcgagggaagaaaagagtaattttttcaaagcatttatagaaacgcagcaaagggaaggtgtgaggttgccgccatgcctggcagaacggagggaggcagttggctccggaatgcggccgccgcagatgttctccgcaaccttccggaagtggaatggcgggagcctcagcattgctgcccaccgaccccccggaagcggaaacagaatccccgcgtgccccttcctcactaccctccaaatcccgctgcagccattgccgcagacacgatgccgaaacgaaagaagcagaatcatcaccagccaccgacacagcagcagcccccgctgcccgagcgggaagagactggagatgaggaggatgggagtcccatcggaccacccagccttctgggccctccccccatggccaatggaaaacctggcgaccctaagtcagctcttcacagaggtcctccaggatcaaggggaccactgattccaccactgctgagtctcccacctcctccttggggtagaggcccaattcggagagggcttggccccaggtctagcccatatggtcgtggttggtggggagtcaatgcagaacctccttttccggggccaggccatgggggtcccaccaggggaagctttcacaaggaacagagaaaccctcgaaggctcaaaagctggtctcttatcaagaatacctgcccgcccaaggatgacccccaggttatggaagacaaatccgaccgccctgtctgccgacattttgccaaaaagggccactgtcgatatgaggacctctgtgccttctaccatccaggcgtcaatggacctcctctgtga

SEQ ID NO: 219156 - DNA, 2254 bp, Artificial Sequence
  derived and/or modified sequence
aacccaagcgggacaaggacttttggggggaggtcaaagggcacgaagttgtgcctgcagctgttaccatagtaaccgaggaccggatgtggcgatcttacggtgcgacagtcctcttctcaggccctctggcccgagagcctgttgactctgtgacacactctgaggagctggttgtggtgttttccagcgagggaagaaaagagtaattttttcaaagcatttatagaaacgcagcaaagggaaggtgtgaggttgccgccatgcctggcagagacggagggaggcagttggctccggaatgcggccgccgcagatgttctccgcaaccttccggaagtggaatggcgggagcctcagcattgctgcccaccgaccccccggaagcggaaacagaatccccgcgtgccccttcctcactaccctccaaatcccgctgcagccattgccgcagacacgatgccgaaacgaaagaagcagaatcatcaccagccaccgacacagcagcagcccccgctgcccgagcgggaagagactggagatgaggaggatgggagtcccatcggaccacccagccttctgggccctccccccatggccaatggaaaacctggcgaccctaagtcagctcttcacagaggtcctccaggatcaaggggaccactgattccaccactgctgagtctcccacctcctccttggggtagaggcccaattcggagagggcttggccccaggtctagcccatatggtcgtggttggtggggagtcaatgcagaacctccttttccggggccaggccatgggggtcccaccaggggaagctttcacaaggaacagagaaaccctcgaaggctcaaaagctggtctcttatcaagaatacctgcccgcccaaggatgacccccaggttatggaagacaaatccgaccgccctgtctgccgacattttgccaaaaagggccactgtcgatatgaggacctctgtgccttctaccatccaggcgtcaatggacctcctctgtgagactgtgccttcccatccaggctggaaggagctctctgtgacctagcggccatttatttctctgtagccctatgatggctactgtgaggctcttctaacaccctcagtcagtgacacacccatcccatccaccacttcccccgtgtggggtccagagtggtgttgcatcactggtgcgcggcatacgcgctttcttctgatccagcctgtagagactcgcctttgggacccatctttgcttcctttcagttgcctcctggatcttctttcccgtcatcaaatgactgctgaacaggaaacctctttggtgctgtttcttgtgcatctgtccacctgttccccagtattgccctcaattcctgagagccctggagcggtttcctaccattcccttcttttagctgcttgttttaagtcctttttatgtgacattccctacccccaatgttgtcagctgcttgtgaaactcagccaggttgtctaacctggggtcaagtttgggtgactggtgcagagttacttcctaaaaggccactctccctgcctttggatttcatagtttctctgtcagtagcatgatccccaccgctatggtctatctatgatcaccgtgctttgtgaaactgtgcatccccttgtagcctttctcagtgtccgtggcatttttgtgacttcccagcactagaataagttttcctgccaaaatgagtgaggcgcttggtgccctctggactttcccacttcccaacatgggagaattgtgaactttccatcagactgcctccctggccctccccattcttctcctgttggttattctgagtctgacacagacccatgacatgtcttataaagcctccaatggctttatcctacctagatcccttccagcccattttaattagactatgtcattgtgaggccaccagtccattcatttgaattctgtgaatctccaccttgcctatctttgggtagaagctggacagtactgttgccctcttccaatcctcttcccctacatccctggcactggttgttttctgtgaaaacagcagtgaacaggttcagttttgaactggccctgaggaaatgggtcaggagttgtattggcaagagggaggggtgagagctgttggagaactgagaatgaggttttttttttttttttctttttaactttttttatattagtaataaatgcagtggaaaccagcattttatttaa

SEQ ID NO: 219157 - DNA, 2254 bp, Artificial Sequence
  derived and/or modified sequence
aacccaagcgggacaaggacttttggggggaggtcaaagggcacgaagttgtgcctgcagctgttaccatagtaaccgaggaccggatgtggcgatcttacggtgcgacagtcctcttctcaggccctctggcccgagagcctgttgactctgtgacacactctgaggagctggttgtggtgttttccagcgagggaagaaaagagtaattttttcaaagcatttatagaaacgcagcaaagggaaggtgtgaggttgccgccatgcctggcagagacggagggaggcagttggctccggaatgcggccgccgcagatgttctccgcaaccttccggaagtggaatggcgggagcctcagcattgctgcccaccgaccccccggaagcggaaacagaatccccgcgtgccccttcctcactaccctccaaatcccgctgcagccattgccgcagacacgatgccgaaacgaaagaagcagaatcatcaccagccaccgacacagcagcagcccccgctgcccgagcgggaagagactggagatgaggaggatgggagtcccatcggaccacccagccttctgggccctccccccatggccaatggaaaacctggcgaccctaagtcagctcttcacagaggtcctccaggatcaaggggaccactgattccaccactgctgagtctcccacctcctccttggggtagaggcccaattcggagagggcttggccccaggtctagcccatatggtcgtggttggtggggagtcaatgcagaacctccttttccggggccaggccatgggggtcccaccaggggaagctttcacaaggaacagagaaaccctcgaaggctcaaaagctggtctcttatcaagaatacctgcccgcccaaggatgacccccaggttatggaagacaaatccgaccgccctgtctgccgacattttgccaaaaagggccactgtcgatatgaggacctctgtgccttctaccacccaggcgtcaatggacctcctctgtgagactgtgccttcccatccaggctggaaggagctctctgtgacctagcggccatttatttctctgtagccctatgatggctactgtgaggctcttctaacaccctcagtcagtgacacacccatcccatccaccacttcccccgtgtggggtccagagtggtgttgcatcactggtgcgcggcatacgcgctttcttctgatccagcctgtagagactcgccttcgggacccatctttgcttcctttcagttgcctcctggatcttctttcccgtcatcaaatgactgctgaacaggaaacctctttggtgctgtttcttgtgcatctgtccacctgttccccagtattgccctcaattcctgagagccctggagcggtttcctaccattcccttcttttagctgcttgttttaagtcctttttatgtgacattccctacccccaatgttgtcagctgcttgtgaaactcagccaggttgtctaacctggggtcaagtttgggtgactggtgcagagttacttcctaaaaggccactctccctgcctttggatttcatagtttctctgtcagtagcatgatccccaccgctatggtctatctatgatcaccgtgctttgtgaaactgtgcatccccttgtagcctttctcagtgtccgtggcatttttgtgacttcccagcactagaataagttttcctgccaaaatgagtgaggcgcttggtgccctctggactttcccacttcccaacatgggagaattgtgaactttccatcagactgcctccctggccctccccattcttctcctgttggttattctgagtctgacacagacccatgacatgtcttataaagcctccaatggctttatcctacctagatcccttccagcccattttaattagactatgtcattgtgaggccaccagtccattcatttgaattctgtgaatctccaccttgcctatctttgggtagaagctggacagtactgttgccctcttccaatcctcttcccctacatccctggcactggttgttttctgtgaaaacagcagtgaacaggttcagttttgaactggccctgaggaaatgggtcaggagttgtattggcaagagggaggggtgagagctgttggagaactgagaatgaggttttttttttttttttctttttaactttttttatattagtaataaatgcagtggaaaccagcattttatttaa

SEQ ID NO: 219158 - DNA, 932 bp, Artificial Sequence
  derived and/or modified sequence
gatcttacggtgcgacagtcctcttctcaggccctctggcccgagagcctgttgactctgtgacacactctgaggagctggttgtggtgttttccagcgagggaagaaaagagtaattttttcaaagcatttatagaaacgcagcaaagggaaggtgtgaggttgccgccatgcctggcagaacggagggaggcagttggctccggaatgcggccgccgcagatgttctccgcaaccttccggaagtggaatggcgggagcctcagcattgctgcccaccgaccccccggaagcggaaacagaatccccgcgtgccccttcctcactaccctccaaatcccgctgcagccattgccgcagacacgatgccgaaacgaaagaagcagaatcatcaccagccaccgacacagcagcagcccccgctgcccgagcgggaagagactggagatgaggaggatgggagtcccatcggaccacccagccttctgggccctccccccatggccaatggaaaacctggcgaccctaagtcagctcttcacagaggtcctccaggatcaaggggaccactgattccaccactgctgagtctcccacctcctccttggggtagaggcccaattcggagagggcttggccccaggtctagcccatatggtcgtggttggtggggagtcaatgcagaacctccttttccggggccaggccatgggggtcccaccaggggaagctttcacaaggaacagagaaaccctcgaaggctcaaaagctggtctcttatcaagaatacctgcccgcccaaggatgacccccaggttatggaagacaaatccgaccgccctgtctgccgacattttgccaaaaagggccactgtcgatatgaggacctctgtgccttctaccacccaggcgtcaatggacctcctctgtga

SEQ ID NO: 219159 - DNA, 762 bp, Artificial Sequence
  derived and/or modified sequence
atgcccggcagaaccgagggcggcagctggctgagaaacgccgccgccgccgacgtgctgagaaacctgcccgaggtggagtggagagagccccagcactgctgcccccccacccccagaaagagaaagcagaaccccagagtgcccctgccccactacccccccaaccccgccgccgccatcgccgccgacaccatgcccaagagaaagaagcagaaccaccaccagccccccacccagcagcagccccccctgcccgagagagaggagaccggcgacgaggaggacggcagccccatcggcccccccagcctgctgggccccccccccatggccaacggcaagcccggcgaccccaagagcgccctgcacagaggcccccccggcagcagaggccccctgatcccccccctgctgagcctgcccccccccccctggggcagaggccccatcagaagaggcctgggccccagaagcagcccctacggcagaggctggtggggcgtgaacgccgagccccccttccccggccccggccacggcggccccaccagaggcagcttccacaaggagcagagaaaccccagaagactgaagagctggagcctgatcaagaacacctgcccccccaaggacgacccccaggtgatggaggacaagagcgacagacccgtgtgcagacacttcgccaagaagggccactgcagatacgaggacctgtgcgccttctaccaccccggcgtgaacggcccccccctgtag

SEQ ID NO: 219160 - DNA, 567 bp, Artificial Sequence
  derived and/or modified sequence
atgcccaagagaaagaagcagaaccaccaccagccccccacccagcagcagccccccctgcccgagagagaggagaccggcgacgaggaggacggcagccccatcggcccccccagcctgctgggccccccccccatggccaacggcaagcccggcgaccccaagagcgccctgcacagaggcccccccggcagcagaggccccctgatcccccccctgctgagcctgcccccccccccctggggcagaggccccatcagaagaggcctgggccccagaagcagcccctacggcagaggctggtggggcgtgaacgccgagccccccttccccggccccggccacggcggccccaccagaggcagcttccacaaggagcagagaaaccccagaagactgaagagctggagcctgatcaagaacacctgcccccccaaggacgacccccaggtgatggaggacaagagcgacagacccgtgtgcagacacttcgccaagaagggccactgcagatacgaggacctgtgcgccttctaccaccccggcgtgaacggcccccccctgtag

SEQ ID NO: 219161 - protein, 465 aa, Artificial Sequence
  derived and/or modified sequence
MAEAVFHAPKRKRRVYETYESPLPIPFGQDHGPLKEFKIFRAEMINNNVIVRNAEDIEQLYGKGYFGKGILSRSRPSFTISDPKLVAKWKDMKTNMPIITSKRYQHSVEWAAELMRRQGQDESTVRRILKDYTKPLEHPPVKRNEEAQVHDKLNSGMVSNMEGTAGGERPSVVNGDSGKSGGVGDPREPLGCLQEGSGCHPTTESFEKSVREDASPLPHVCCCKQDALILQRGLHHEDGSQHIGLLHPGDRGPDHEYVLVEEAECAMSEREAAPNEELVQRNRLICRRNPYRIFEYLQLSLEEAFFLVYALGCLSIYYEKEPLTIVKLWKAFTVVQPTFRTTYMAYHYFRSKGWVPKVGLKYGTDLLLYRKGPPFYHASYSVIIELVDDHFEGSLRRPLSWKSLAALSRVSVNVSKELMLCYLIKPSTMTDKEMESPECMKRIKVQEVILSRWVSSRERSDQDDL

SEQ ID NO: 219162 - protein, 448 aa, Artificial Sequence
  derived and/or modified sequence
MAEAVFHAPKRKRRVYETYESPLPIPFGQDHGPLKEFKIFRAEMINNNVIVRNAEDIEQLYGKGYFGKGILSRSRPSFTISDPKLVAKWKDMKTNMPIITSKRYQHSVEWAAELMRRQGQDESTVRRILKDYTKPLEHPPVKRNEEAQVHDKLNSGMVSNMEGTAGGERPSVVNGDSGKSGGVGDPREPLGCLQEGSGCHPTTESFEKSVREDASPLPHVCCCKQDALILQRGLHHEDGSQHIGLLHPGDRGPDHEYVLVEEAECAMSEREAAPNEELVQRNRLICRRNPYRIFEYLQLSLEEEPLTIVKLWKAFTVVQPTFRTTYMAYHYFRSKGWVPKVGLKYGTDLLLYRKGPPFYHASYSVIIELVDDHFEGSLRRPLSWKSLAALSRVSVNVSKELMLCYLIKPSTMTDKEMESPECMKRIKVQEVILSRWVSSRERSDQDDL

SEQ ID NO: 219163 - protein, 378 aa, Artificial Sequence
  derived and/or modified sequence
MAEAVFHAPKRKRRVYETYESPLPIPFGQDHGPLKEFKIFRAEMINNNVIVRNAEDIEQLYGKGYFGKGILSRSRPSFTISDPKLVAKWKDMKTNMPIITSKRYQHSVEWAAELMRRQGQDESTVRRILKDYTKPLEHPPVKRNEEAQVHDKLNSGMVSNMEGTAGGERPSVVNGDSGKSGGVGDPREPLGCLQEGSGCHPTTESFEKSVREDASPLPHVCCCKQDALILQRGLHHEDGSQHIGLLHPGDRGPDHEYVLVEEAECAMSEREAAPNEELVQRNRLICRRNPYRIFEYLQLSLEEAFFLVYALGCLSIYYEKEPLTIVKLWKAFTVVQPTFRTTYMAYHYFRSKGWVPKVGLKYGTDLLLYRKGPPFYHA

SEQ ID NO: 219164 - protein, 438 aa, Artificial Sequence
  derived and/or modified sequence
MAEAVFHAPKRKRRVYETYESPLPIPFGQDHGPLKEFKIFRAEMINNNVIVRNAEDIEQLYGKDMKTNMPIITSKRYQHSVEWAAELMRRQGQDESTVRRILKDYTKPLEHPPVKRNEEAQVHDKLNSGMVSNMEGTAGGERPSVVNGDSGKSGGVGDPREPLGCLQEGSGCHPTTESFEKSVREDASPLPHVCCCKQDALILQRGLHHEDGSQHIGLLHPGDRGPDHEYVLVEEAECAMSEREAAPNEELVQRNRLICRRNPYRIFEYLQLSLEEAFFLVYALGCLSIYYEKEPLTIVKLWKAFTVVQPTFRTTYMAYHYFRSKGWVPKVGLKYGTDLLLYRKGPPFYHASYSVIIELVDDHFEGSLRRPLSWKSLAALSRVSVNVSKELMLCYLIKPSTMTDKEMESPECMKRIKVQEVILSRWVSSRERSDQDDL

SEQ ID NO: 219165 - DNA, 1398 bp, Artificial Sequence
  derived and/or modified sequence
atggccgaggccgtgttccacgcccccaagagaaagagaagagtgtacgagacctacgagagccccctgcccatccccttcggccaggaccacggccccctgaaggagttcaagatcttcagagccgagatgatcaacaacaacgtgatcgtgagaaacgccgaggacatcgagcagctgtacggcaagggctacttcggcaagggcatcctgagcagaagcagacccagcttcaccatcagcgaccccaagctggtggccaagtggaaggacatgaagaccaacatgcccatcatcaccagcaagagataccagcacagcgtggagtgggccgccgagctgatgagaagacagggccaggacgagagcaccgtgagaagaatcctgaaggactacaccaagcccctggagcacccccccgtgaagagaaacgaggaggcccaggtgcacgacaagctgaacagcggcatggtgagcaacatggagggcaccgccggcggcgagagacccagcgtggtgaacggcgacagcggcaagagcggcggcgtgggcgaccccagagagcccctgggctgcctgcaggagggcagcggctgccaccccaccaccgagagcttcgagaagagcgtgagagaggacgccagccccctgccccacgtgtgctgctgcaagcaggacgccctgatcctgcagagaggcctgcaccacgaggacggcagccagcacatcggcctgctgcaccccggcgacagaggccccgaccacgagtacgtgctggtggaggaggccgagtgcgccatgagcgagagagaggccgcccccaacgaggagctggtgcagagaaacagactgatctgcagaagaaacccctacagaatcttcgagtacctgcagctgagcctggaggaggccttcttcctggtgtacgccctgggctgcctgagcatctactacgagaaggagcccctgaccatcgtgaagctgtggaaggccttcaccgtggtgcagcccaccttcagaaccacctacatggcctaccactacttcagaagcaagggctgggtgcccaaggtgggcctgaagtacggcaccgacctgctgctgtacagaaagggcccccccttctaccacgccagctacagcgtgatcatcgagctggtggacgaccacttcgagggcagcctgagaagacccctgagctggaagagcctggccgccctgagcagagtgagcgtgaacgtgagcaaggagctgatgctgtgctacctgatcaagcccagcaccatgaccgacaaggagatggagagccccgagtgcatgaagagaatcaaggtgcaggaggtgatcctgagcagatgggtgagcagcagagagagaagcgaccaggacgacctgtag

SEQ ID NO: 219166 - DNA, 1347 bp, Artificial Sequence
  derived and/or modified sequence
atggccgaggccgtgttccacgcccccaagagaaagagaagagtgtacgagacctacgagagccccctgcccatccccttcggccaggaccacggccccctgaaggagttcaagatcttcagagccgagatgatcaacaacaacgtgatcgtgagaaacgccgaggacatcgagcagctgtacggcaagggctacttcggcaagggcatcctgagcagaagcagacccagcttcaccatcagcgaccccaagctggtggccaagtggaaggacatgaagaccaacatgcccatcatcaccagcaagagataccagcacagcgtggagtgggccgccgagctgatgagaagacagggccaggacgagagcaccgtgagaagaatcctgaaggactacaccaagcccctggagcacccccccgtgaagagaaacgaggaggcccaggtgcacgacaagctgaacagcggcatggtgagcaacatggagggcaccgccggcggcgagagacccagcgtggtgaacggcgacagcggcaagagcggcggcgtgggcgaccccagagagcccctgggctgcctgcaggagggcagcggctgccaccccaccaccgagagcttcgagaagagcgtgagagaggacgccagccccctgccccacgtgtgctgctgcaagcaggacgccctgatcctgcagagaggcctgcaccacgaggacggcagccagcacatcggcctgctgcaccccggcgacagaggccccgaccacgagtacgtgctggtggaggaggccgagtgcgccatgagcgagagagaggccgcccccaacgaggagctggtgcagagaaacagactgatctgcagaagaaacccctacagaatcttcgagtacctgcagctgagcctggaggaggagcccctgaccatcgtgaagctgtggaaggccttcaccgtggtgcagcccaccttcagaaccacctacatggcctaccactacttcagaagcaagggctgggtgcccaaggtgggcctgaagtacggcaccgacctgctgctgtacagaaagggcccccccttctaccacgccagctacagcgtgatcatcgagctggtggacgaccacttcgagggcagcctgagaagacccctgagctggaagagcctggccgccctgagcagagtgagcgtgaacgtgagcaaggagctgatgctgtgctacctgatcaagcccagcaccatgaccgacaaggagatggagagccccgagtgcatgaagagaatcaaggtgcaggaggtgatcctgagcagatgggtgagcagcagagagagaagcgaccaggacgacctgtag

SEQ ID NO: 219167 - DNA, 1137 bp, Artificial Sequence
  derived and/or modified sequence
atggccgaggccgtgttccacgcccccaagagaaagagaagagtgtacgagacctacgagagccccctgcccatccccttcggccaggaccacggccccctgaaggagttcaagatcttcagagccgagatgatcaacaacaacgtgatcgtgagaaacgccgaggacatcgagcagctgtacggcaagggctacttcggcaagggcatcctgagcagaagcagacccagcttcaccatcagcgaccccaagctggtggccaagtggaaggacatgaagaccaacatgcccatcatcaccagcaagagataccagcacagcgtggagtgggccgccgagctgatgagaagacagggccaggacgagagcaccgtgagaagaatcctgaaggactacaccaagcccctggagcacccccccgtgaagagaaacgaggaggcccaggtgcacgacaagctgaacagcggcatggtgagcaacatggagggcaccgccggcggcgagagacccagcgtggtgaacggcgacagcggcaagagcggcggcgtgggcgaccccagagagcccctgggctgcctgcaggagggcagcggctgccaccccaccaccgagagcttcgagaagagcgtgagagaggacgccagccccctgccccacgtgtgctgctgcaagcaggacgccctgatcctgcagagaggcctgcaccacgaggacggcagccagcacatcggcctgctgcaccccggcgacagaggccccgaccacgagtacgtgctggtggaggaggccgagtgcgccatgagcgagagagaggccgcccccaacgaggagctggtgcagagaaacagactgatctgcagaagaaacccctacagaatcttcgagtacctgcagctgagcctggaggaggccttcttcctggtgtacgccctgggctgcctgagcatctactacgagaaggagcccctgaccatcgtgaagctgtggaaggccttcaccgtggtgcagcccaccttcagaaccacctacatggcctaccactacttcagaagcaagggctgggtgcccaaggtgggcctgaagtacggcaccgacctgctgctgtacagaaagggcccccccttctaccacgcctag

SEQ ID NO: 219168 - DNA, 1317 bp, Artificial Sequence
  derived and/or modified sequence
atggccgaggccgtgttccacgcccccaagagaaagagaagagtgtacgagacctacgagagccccctgcccatccccttcggccaggaccacggccccctgaaggagttcaagatcttcagagccgagatgatcaacaacaacgtgatcgtgagaaacgccgaggacatcgagcagctgtacggcaaggacatgaagaccaacatgcccatcatcaccagcaagagataccagcacagcgtggagtgggccgccgagctgatgagaagacagggccaggacgagagcaccgtgagaagaatcctgaaggactacaccaagcccctggagcacccccccgtgaagagaaacgaggaggcccaggtgcacgacaagctgaacagcggcatggtgagcaacatggagggcaccgccggcggcgagagacccagcgtggtgaacggcgacagcggcaagagcggcggcgtgggcgaccccagagagcccctgggctgcctgcaggagggcagcggctgccaccccaccaccgagagcttcgagaagagcgtgagagaggacgccagccccctgccccacgtgtgctgctgcaagcaggacgccctgatcctgcagagaggcctgcaccacgaggacggcagccagcacatcggcctgctgcaccccggcgacagaggccccgaccacgagtacgtgctggtggaggaggccgagtgcgccatgagcgagagagaggccgcccccaacgaggagctggtgcagagaaacagactgatctgcagaagaaacccctacagaatcttcgagtacctgcagctgagcctggaggaggccttcttcctggtgtacgccctgggctgcctgagcatctactacgagaaggagcccctgaccatcgtgaagctgtggaaggccttcaccgtggtgcagcccaccttcagaaccacctacatggcctaccactacttcagaagcaagggctgggtgcccaaggtgggcctgaagtacggcaccgacctgctgctgtacagaaagggcccccccttctaccacgccagctacagcgtgatcatcgagctggtggacgaccacttcgagggcagcctgagaagacccctgagctggaagagcctggccgccctgagcagagtgagcgtgaacgtgagcaaggagctgatgctgtgctacctgatcaagcccagcaccatgaccgacaaggagatggagagccccgagtgcatgaagagaatcaaggtgcaggaggtgatcctgagcagatgggtgagcagcagagagagaagcgaccaggacgacctgtag

SEQ ID NO: 219169 - DNA, 1398 bp, Artificial Sequence
  derived and/or modified sequence
atggctgaggccgtttttcacgctcccaaaaggaaaaggagagtgtatgaaacttacgagagtcccttgccaatcccctttggacaagaccatggccctctgaaggaatttaaaatttttagagcggagatgatcaacaataatgtgattgtgagaaacgctgaagatatcgaacagctctacggaaagggctattttgggaaaggtatcctgagtagatccaggccctctttcacaatctcagacccaaaactggtggcaaagtggaaggatatgaagacgaacatgcccattattacatctaaaaggtatcagcacagcgtcgagtgggcggccgagctcatgagacggcagggccaggatgagtctacagtgaggagaattctgaaggactataccaagccccttgagcacccaccagtcaaacgaaatgaggaggcgcaggtacacgacaaattaaattccggaatggtcagcaatatggaggggactgctggaggcgagaggcctagcgtggtgaacggtgactccggcaagtccggtggagtgggagatcctcgtgaaccactgggatgcttacaggagggtagcggctgccatcccaccaccgagtccttcgaaaagagcgtgcgcgaggatgcctccccccttccacacgtgtgctgttgtaagcaagatgcgctgatcctgcaaagaggcctgcaccatgaggatggctcgcagcacatcggacttttgcatcccggcgaccgcggcccagatcatgaatacgttctggtggaggaggcagaatgtgcaatgtcagaacgggaggctgctcccaacgaagagctcgttcagaggaatcgcctcatatgtaggagaaatccatatcgcattttcgaatatctccaacttagcctggaggaggcatttttcttggtgtacgcacttggatgcctgagtatctactacgaaaaagagccactcacaatagtgaaactgtggaaagccttcacagtggtacagcctacattccggacaacctacatggcttatcactactttaggtccaagggttgggtgcccaaagtaggtctaaagtatggcactgacctgttgctttatcgtaaagggcctccattctaccacgctagctactcggtgattatcgaacttgttgacgatcactttgagggaagcctaagaaggccactgtcctggaaatcactggccgcattgagtagggtttctgtgaatgtgtctaaggaactcatgctgtgctatctgattaagccgagcacaatgacagacaaagaaatggagtcccctgaatgcatgaagaggattaaggtgcaagaagtaattttgtcccgctgggttagttcccgggaacgaagcgatcaggatgacctgtag

SEQ ID NO: 219170 - DNA, 1347 bp, Artificial Sequence
  derived and/or modified sequence
atggccgaagccgtgtttcacgcgcctaaacgcaaacgccgcgtttatgagacttacgagtctccgttaccgattcccttcggccaggaccatggacctttgaaggaattcaagatattcagagcagagatgatcaacaacaacgttatcgtgcgcaatgccgaagacatcgagcaactctatgggaagggctactttggcaaaggaatcctctcgagaagtagacccagctttacaatttctgatccaaaactcgtggcgaaatggaaggacatgaaaaccaacatgcctattatcaccagtaagcgctatcagcacagcgtcgaatgggctgcagagttgatgcgccgacaaggtcaggacgagtctactgtccgcaggatcttgaaggattatactaaacctttggagcatccccccgtcaagcggaatgaggaggcccaggtgcatgacaagctgaacagcgggatggtatcaaatatggaaggaaccgccggaggcgagaggcccagcgtcgtcaatggagattcggggaaatcggggggcgtcggagatccaagggagcccttaggttgcctccaagaggggtcaggatgtcatccgactactgaatcatttgagaaatccgtacgcgaggatgcatccccactcccacacgtgtgttgttgcaagcaggatgcccttatcctgcagaggggcctgcatcatgaggatgggagtcaacacattggtctgttgcatccgggcgaccgagggcccgatcacgaatatgtgttggttgaggaagccgagtgtgctatgtcagagcgggaggccgcccctaacgaagaactcgtgcaacgtaacagattaatttgcaggcgcaatccatacagaatattcgaatacctgcaactgagcctcgaggaggagcccttgacaatcgtcaagctctggaaagccttcaccgtggtccaacctacatttagaacgacttatatggcataccactacttcagatccaaaggctgggtgcctaaggtggggctgaaatacggcacggatctcctgctgtatcgaaaaggccctccattctatcacgcgtcttactccgtaattattgagctggtggatgatcactttgaggggtccctgaggcggccgttgagctggaaatcactggcagcgttaagtcgggtttccgtcaatgtgtcaaaagaactaatgttatgctatttgattaagccaagcacaatgaccgacaaggagatggaatcacccgaatgtatgaaaagaattaaagtccaggaggtgatcctttccagatgggtgtcaagccgggagcgctccgaccaagatgacctttag

SEQ ID NO: 219171 - DNA, 1398 bp, Artificial Sequence
  derived and/or modified sequence
atggctgaggccgtgttccatgcgcccaagcgaaaacgtcgggtgtacgaaacttatgagtctccactgccaattccgttcggccaggatcatggaccgctaaaggaatttaagattttccgcgctgaaatgatcaataacaacgttattgtgcgaaatgccgaggacattgaacaactgtatggcaaaggctactttgggaaaggaatcctctctagatcacgaccctctttcacaatttcagaccccaagctagtggctaagtggaaggatatgaaaaccaatatgccaataatcacatcaaagcgttatcagcacagtgtggaatgggcagctgaactgatgcggcgacaggggcaggacgaatcaactgtcaggcggattcttaaggattataccaagccattggaacaccctcctgtgaaaaggaacgaggaggcccaggttcacgataaactgaattccggtatggtctctaatatggaaggaacagccggtggcgagcgaccttccgtagtgaacggcgatagcggaaagagcggcggtgtcggtgacccgagggaacccctgggatgcctgcaggagggttctgggtgccacccaacgactgagagctttgagaagagcgtaagggaggacgcaagtcccctgcctcatgtgtgttgctgcaagcaggacgctctcatcctacagcgcggactgcaccatgaggatgggagccagcatattgggttgctgcaccctggagacagaggcccagaccatgaatatgtgcttgtggaagaggcagagtgcgcgatgtcagagcgcgaggcagctccaaatgaagagcttgttcagagaaaccgcctgatttgccgtcgcaacccataccgcatcttcgagtaccttcagctgtccctagaagaagccttctttctcgtttacgccctggggtgcctgagcatctattacgaaaaggaacccttaacaatagtgaagctatggaaggccttcacggtggtgcagcctacatttagaaccacctacatggcctatcattactttagaagcaaaggttgggtgcctaaagtgggccttaagtatggcaccgacctgctgctctataggaaaggtcctccattttaccatgccagctactccgtgattatcgaactggtggatgaccactttgaagggtcgctgcgccggccgctgagctggaagtctctggctgccctttcccgagtgagtgtgaacgtgagcaaggaactgatgttgtgctacctgatcaagcctagcacaatgacagataaggaaatggaatcccccgaatgcatgaaaaggatcaaagtccaggaggtcatcctcagcagatgggtctctagtcgcgaaaggagtgatcaggatgatctgtag

SEQ ID NO: 219172 - DNA, 1137 bp, Artificial Sequence
  derived and/or modified sequence
atggcagaggctgtcttccacgcccccaagcgtaagagacgggtttacgagacctatgagtccccactccccatacctttcggccaggaccacggccctttgaaagagtttaagatcttccgcgctgagatgattaataacaacgtcatcgtccgaaacgcggaggacatcgagcagctgtatggaaagggctactttgggaaggggattctttcaagatcccgcccctccttcacaatctccgaccctaaacttgttgcgaaatggaaggacatgaagactaacatgccaattattaccagcaaaaggtaccagcactctgttgaatgggcagccgagctgatgcggcgccaaggtcaggacgaaagcaccgtgcggaggatacttaaagactacaccaaacccctggagcacccccctgttaagagaaacgaagaggcgcaagtgcatgataagctcaatagtggcatggtgtccaacatggaaggcactgcgggaggggagagaccctctgttgttaacggagatagcggaaaaagcgggggcgtaggggatcctagagaaccacttggctgtctgcaggagggctccggctgtcatccaacaaccgagtccttcgaaaagtccgtccgtgaggatgcttcccccctcccccacgtttgctgctgcaagcaggacgcactaatccttcagaggggcctgcaccacgaggacgggagccagcacattgggttgctccaccccggcgatcgagggcccgatcacgaatatgtgctggttgaagaggccgagtgcgctatgtccgagagggaagctgccccaaatgaggaactggtgcagcggaaccggcttatttgcaggcggaatccgtaccgcattttcgaatacctgcagttgtcactcgaagaggcgttcttcctagtgtacgccctaggctgtctgagtatctattacgagaaggaacctctcactattgtgaagctctggaaggcgttcacggtagtgcaaccaacatttaggacaacatacatggcataccattatttccgatctaagggatgggtgccaaaggtgggcctcaaatatgggaccgatctgcttttgtatcgtaaaggaccacctttctaccatgcttag

SEQ ID NO: 219173 - DNA, 1317 bp, Artificial Sequence
  derived and/or modified sequence
atggccgaggccgtattccacgcacccaaaagaaaaagaagggtatacgaaacatatgaaagccccctcccaatcccctttggacaggaccacggtcctttgaaggagtttaagatttttagggccgaaatgattaataataacgttattgtgcgaaatgcagaggatatcgaacagctctacggcaaggacatgaaaaccaatatgccaatcataacatccaagagatatcagcactccgttgagtgggcggctgaattgatgcggcgacagggccaggacgagagcacagtacgacggattttaaaggactacacgaagccattggaacatccgcccgtgaagagaaatgaggaagcacaagtccacgacaagctaaatagcggaatggttagcaatatggagggcaccgctgggggagaacgcccatccgtcgtcaacggcgactcaggtaaaagcggcggggtgggcgaccccagggagccactgggatgtctgcaggaaggcagcgggtgccaccccacaacggagtctttcgagaaatcagtgcgggaggatgcttctcctctcccccatgtctgctgctgcaagcaagatgcacttattttgcagaggggcctccaccatgaagatggatcacagcacatcgggcttcttcaccccggcgatcgcggccctgaccacgagtacgtcctggtggaagaggcagaatgcgccatgtccgagagagaagctgcgcccaatgaggaactggttcagagaaatcggctgatctgcagacggaatccgtacaggatctttgaatacttgcagctcagcctcgaggaggctttcttcctggtatacgcgctcggttgcctcagcatttactatgagaaggagcctttgaccatagttaaactatggaaggcgtttactgtcgtacagcccacctttcgtaccacctacatggcatatcactactttcgatcaaagggctgggtgcccaaggtgggattgaagtacggtacagacctgctcctgtatcgtaaagggccacctttttaccatgccagctactccgttatcatcgagctggtggatgaccactttgaggggagccttaggaggccacttagctggaagtcgctggcagccctgagtagagtgtctgtaaatgtctccaaagagttaatgctgtgttacctaattaagccgtccaccatgaccgataaggagatggagtcccctgaatgtatgaagcgcatcaaggtccaagaggtaatcctgagccggtgggtgtcctcaagggagcgaagcgatcaggacgatctgtag

SEQ ID NO: 219174 - DNA, 1398 bp, Artificial Sequence
  derived and/or modified sequence
atggccgaggccgtgttccacgcccccaagaggaagagaagagtgtatgagacctatgagagccccctgcccatccccttcggccaggaccacggccccctgaaggagttcaagatcttccgggcagagatgatcaacaacaacgtcatcgtgagaaatgcagaagatattgagcagctgtatggcaagggctactttgggaagggcatcctgagccgcagccggcccagcttcaccatcagtgaccccaagctggtggccaagtggaaggacatgaagaccaacatgcccatcatcaccagcaagcgctaccagcacagcgtggagtgggccgctgagctgatgaggcggcagggccaggatgagagcacagtgcggcgcatcctgaaggactacaccaagcccctggagcacccccctgtgaagagaaatgaggaggcccaggtgcatgacaagctgaacagcggcatggtgagcaacatggagggcacagctggaggagagcggcccagcgtggtgaatggagacagcggcaagagcggcggcgtgggggacccccgggagcccctgggctgcctgcaggagggcagcggctgccaccccaccacagagagctttgagaagtctgtgcgggaggatgccagccccctgccccacgtgtgctgctgcaagcaggatgccctgatcctgcagaggggcctgcaccatgaagatggcagccagcacatcggcctgctgcaccctggggaccggggccctgaccatgaatatgtgctggtggaggaggccgagtgtgccatgtctgagcgggaggccgccccaaatgaggagctggtgcagaggaacagactcatctgcagaagaaacccctaccgcatctttgagtacctgcagctgagcctggaggaggccttcttcctggtgtatgccctgggctgcctgagcatctactatgagaaggagcccctgaccatcgtgaagctgtggaaggccttcaccgtggtgcagcccaccttccgcaccacctacatggcctaccactacttccgcagcaagggctgggtgcccaaggtgggcctgaagtatggaacagacctgctgctgtacagaaaaggaccacccttctaccacgccagctacagcgtcatcatcgagctggtggatgaccactttgagggcagcctgcggcggcccctgtcctggaagagcctggccgccctgagccgggtgtctgtgaatgtgtccaaggagctgatgctgtgctacctgatcaagcccagcaccatgacagacaaggagatggagagccctgagtgcatgaagaggatcaaggtgcaggaggtgatcctgagccgctgggtgagcagccgggagaggagtgaccaggatgacctgtag

SEQ ID NO: 219175 - DNA, 1347 bp, Artificial Sequence
  derived and/or modified sequence
atggccgaggccgtgttccacgcccccaagaggaagagaagagtgtatgagacctatgagagccccctgcccatccccttcggccaggaccacggccccctgaaggagttcaagatcttccgggcagagatgatcaacaacaacgtcatcgtgagaaatgcagaagatattgagcagctgtatggcaagggctactttgggaagggcatcctgagccgcagccggcccagcttcaccatcagtgaccccaagctggtggccaagtggaaggacatgaagaccaacatgcccatcatcaccagcaagcgctaccagcacagcgtggagtgggccgctgagctgatgaggcggcagggccaggatgagagcacagtgcggcgcatcctgaaggactacaccaagcccctggagcacccccctgtgaagagaaatgaggaggcccaggtgcatgacaagctgaacagcggcatggtgagcaacatggagggcacagctggaggagagcggcccagcgtggtgaatggagacagcggcaagagcggcggcgtgggggacccccgggagcccctgggctgcctgcaggagggcagcggctgccaccccaccacagagagctttgagaagtctgtgcgggaggatgccagccccctgccccacgtgtgctgctgcaagcaggatgccctgatcctgcagaggggcctgcaccatgaagatggcagccagcacatcggcctgctgcaccctggggaccggggccctgaccatgaatatgtgctggtggaggaggccgagtgtgccatgtctgagcgggaggccgccccaaatgaggagctggtgcagaggaacagactcatctgcagaagaaacccctaccgcatctttgagtacctgcagctgagcctggaggaggagcccctgaccatcgtgaagctgtggaaggccttcaccgtggtgcagcccaccttccgcaccacctacatggcctaccactacttccgcagcaagggctgggtgcccaaggtgggcctgaagtatggaacagacctgctgctgtacaggaagggcccccccttctaccacgccagctacagcgtcatcatcgagctggtggatgaccactttgagggcagcctgcggcggcccctgtcctggaagagcctggccgccctgagccgggtgtctgtgaatgtgtccaaggagctgatgctgtgctacctgatcaagcccagcaccatgacagacaaggagatggagagccctgagtgcatgaagaggatcaaggtgcaggaggtgatcctgagccgctgggtgagcagccgggagaggagtgaccaggatgacctgtag

SEQ ID NO: 219176 - DNA, 1137 bp, Artificial Sequence
  derived and/or modified sequence
atggccgaggccgtgttccacgcccccaagaggaagagaagagtgtatgagacctatgagagccccctgcccatccccttcggccaggaccacggccccctgaaggagttcaagatcttccgggcagagatgatcaacaacaacgtcatcgtgagaaatgcagaagatattgagcagctgtatggcaagggctactttgggaagggcatcctgagccgcagccggcccagcttcaccatcagtgaccccaagctggtggccaagtggaaggacatgaagaccaacatgcccatcatcaccagcaagcgctaccagcacagcgtggagtgggccgctgagctgatgaggcggcagggccaggatgagagcacagtgcggcgcatcctgaaggactacaccaagcccctggagcacccccctgtgaagagaaatgaggaggcccaggtgcatgacaagctgaacagcggcatggtgagcaacatggagggcacagctggaggagagcggcccagcgtggtgaatggagacagcggcaagagcggcggcgtgggggacccccgggagcccctgggctgcctgcaggagggcagcggctgccaccccaccacagagagctttgagaagtctgtgcgggaggatgccagccccctgccccacgtgtgctgctgcaagcaggatgccctgatcctgcagaggggcctgcaccatgaagatggcagccagcacatcggcctgctgcaccctggggaccggggccctgaccatgaatatgtgctggtggaggaggccgagtgtgccatgtctgagcgggaggccgccccaaatgaggagctggtgcagaggaacagactcatctgcagaagaaacccctaccgcatctttgagtacctgcagctgagcctggaggaggccttcttcctggtgtatgccctgggctgcctgagcatctactatgagaaggagcccctgaccatcgtgaagctgtggaaggccttcaccgtggtgcagcccaccttccgcaccacctacatggcctaccactacttccgcagcaagggctgggtgcccaaggtgggcctgaagtatggaacagacctgctgctgtacagaaaaggaccacccttctaccacgcctag

SEQ ID NO: 219177 - DNA, 1317 bp, Artificial Sequence
  derived and/or modified sequence
atggccgaggccgtgttccacgcccccaagaggaagagaagagtgtatgagacctatgagagccccctgcccatccccttcggccaggaccacggccccctgaaggagttcaagatcttccgggcagagatgatcaacaacaacgtcatcgtgagaaatgcagaagatattgagcagctgtatggcaaggacatgaagaccaacatgcccatcatcaccagcaagcgctaccagcacagcgtggagtgggccgctgagctgatgaggcggcagggccaggatgagagcacagtgcggcgcatcctgaaggactacaccaagcccctggagcacccccctgtgaagagaaatgaggaggcccaggtgcatgacaagctgaacagcggcatggtgagcaacatggagggcacagctggaggagagcggcccagcgtggtgaatggagacagcggcaagtctggaggagtgggggacccccgggagcccctgggctgcctgcaggagggcagcggctgccaccccaccacagagagctttgagaagtctgtgagagaagatgccagccccctgccccacgtgtgctgctgcaagcaggatgccctgatcctgcagaggggcctgcaccatgaagatggcagccagcacatcggcctgctgcaccctggggaccggggccctgaccacgagtatgtgctggtggaggaggctgaatgtgccatgtctgagcgggaggccgccccaaatgaggagctggtgcagaggaacagactcatctgcagaagaaacccctaccgcatctttgagtacctgcagctgagcctggaggaggccttcttcctggtgtatgccctgggctgcctgagcatctactatgagaaggagcccctgaccatcgtgaagctgtggaaggccttcaccgtggtgcagcccaccttccgcaccacctacatggcctaccactacttccgcagcaagggctgggtgcccaaggtgggcctgaagtatggaacagacctgctgctgtacaggaagggcccccccttctaccacgccagctacagcgtcatcatcgagctggtggatgaccactttgagggcagcctgcggcggcccctgtcctggaagagcctggccgccctgagccgggtgtctgtgaatgtgtccaaggagctgatgctgtgctacctgatcaagcccagcaccatgacagacaaggagatggagagccctgagtgcatgaagaggatcaaggtgcaggaggtgatcctgagccgctgggtgagcagccgggagaggagtgaccaggatgacctgtag

SEQ ID NO: 219178 - DNA, 1398 bp, Artificial Sequence
  derived and/or modified sequence
atggccgaggccgtgttccacgcccccaagcggaagcggcgggtgtacgagacatacgagtcccccctgccaatccccttcggacaggaccacggaccattgaaggagtttaaaattttccgagccgaaatgataaataacaatgttatagtgcgtaacgccgaagacattgagcagctgtacggaaaggggtattttggcaaagggatcctcagccggtcaaggccctcattcacaattagcgatcctaagctcgttgctaaatggaaggatatgaagacaaatatgccaatcattacatctaaacgctaccagcactcagttgagtgggctgcagaattgatgcgtagacaggggcaagatgaaagcaccgtgcggagaatcctgaaggactataccaaaccattggaacatccacccgtgaagcgtaacgaagaagcccaagtacatgataagctcaatagcggcatggtcagtaacatggagggtacagccggaggggaaagaccctctgtggtgaacggggactctggaaaaagcgggggcgtcggagacccacgggagcctctgggttgcctgcaagaaggctccggctgtcacccaactaccgagagtttcgagaaaagcgtgcgggaagacgcgagcccccttcctcacgtttgttgctgcaaacaggacgctctgatcctgcagcgcgggctccatcatgaggacggatctcagcacatcggcctgctgcatccaggagaccgcgggcctgatcacgaatacgtgttagtggaagaggcggagtgcgctatgagtgagagagaggcagcacctaatgaggaactggtgcagcgcaataggcttatttgtagacgcaacccatatagaatctttgagtacctgcagctcagcctagaggaggcgttcttcctggtgtatgccctggggtgcctatccatctattatgaaaaggagccactcaccattgtgaaactctggaaggcattcacagtggtgcagccaactttccggactacctacatggcatatcactacttccggagcaagggatgggtcccgaaagtaggtctaaagtatggaacggacctcctcctctatcgcaaagggccccctttttaccatgctagctattctgtgatcatcgagctggtcgacgaccactttgagggctccctgcgacgcccgctcagttggaagtcgctcgctgcactgagccgggttagcgtgaacgtgagcaaggaactgatgttgtgttacctgattaagccatctaccatgactgacaaagagatggaatcgccagagtgtatgaagcgaatcaaggtgcaggaagtcatcctcagccgatgggtctccagcagagagagaagcgaccaggacgatttgtag

SEQ ID NO: 219179 - DNA, 1347 bp, Artificial Sequence
  derived and/or modified sequence
atggccgaggccgtgttccacgcccccaagcggaagcggcgggtgtatgaaacgtatgagtccccgctcccgatcccattcggtcaagaccatggcccgcttaaagagttcaagatatttagggctgaaatgatcaacaacaatgtgattgttcgcaacgcagaggatatagaacagctgtacggtaaggggtacttcgggaagggcattctgtctcgctcccggccttctttcaccatttcagatcctaagcttgtcgcaaagtggaaggacatgaaaactaatatgcctatcatcacaagcaaaagataccagcattctgtggaatgggcagcggagctgatgcgcaggcagggtcaggatgagtcgactgtccgaaggattcttaaagattacacaaagcctctggagcacccgcccgtcaagcgcaacgaagaagcacaggtccacgataagctgaacagcggcatggtttctaacatggaaggcaccgcggggggcgagaggccctccgttgtcaatggtgattctggcaagagcggcggggtcggggatccccgtgaacctctgggttgtcttcaagaagggagtggctgtcacccaaccacagagagttttgaaaaatcagttagagaagacgccagtcccctgcctcacgtgtgctgctgtaaacaggatgccctgatcttacagaggggtctgcatcacgaggatgggagccaacatataggcctgttgcatccaggggatagaggcccagatcatgaatacgtcctggttgaagaggctgaatgcgcaatgagtgaacgcgaggccgcgccaaacgaggaactagtgcagcgaaacagattgatttgtaggagaaacccatatagaatatttgaatacttgcagctgagtctcgaagaagagcccctgaccatcgtaaagctttggaaagcattcacagtggtgcaacccactttccgcacaacatatatggcttaccactacttccgctctaaagggtgggtccccaaagtgggacttaagtacggtacagatctgttgctgtaccgtaaaggcccacctttttaccacgccagttattctgtcatcattgagctggtggatgaccactttgaggggtctcttcgccgacctcttagttggaaatcacttgccgccttgtcgcgggtaagcgtcaacgtttctaaagagctgatgctatgttacctcattaagccatcaaccatgactgacaaagaaatggagtcccctgaatgcatgaagagaattaaagtccaggaggtgattctgagccgctgggtttcctcccgggagcgatccgatcaggatgacttgtag

SEQ ID NO: 219180 - DNA, 1398 bp, Artificial Sequence
  derived and/or modified sequence
atggccgaggccgtgttccacgcccccaagcggaagcggcgggtgtacgagacctacgaaagtcccctgccaatcccctttgggcaggatcacggacccctgaaggagttcaagattttccgtgcagagatgatcaataacaacgtcatagtgcggaacgccgaggacatcgaacagctctatggcaaaggctacttcggcaagggaattctgagccggagcaggccttccttcactatttcggaccccaaattagtcgccaagtggaaggacatgaaaacaaacatgcccatcattacctcaaaacggtatcaacatagcgttgagtgggccgctgagttgatgcgccggcaggggcaggatgaaagcacggtcagaaggatcctcaaggattacacgaaacctctcgaacacccgcccgtcaagcgtaacgaggaagcacaggtacacgacaagctgaattccggtatggtatctaatatggaaggtacggctggcggagagagaccaagtgttgtgaatggcgactcagggaaatccgggggtgtcggcgacccccgcgagcccttgggctgccttcaggaaggcagcggctgtcacccgacaacagaaagctttgagaagtcggttcgtgaagatgcgtcgccgctgccccatgtctgctgttgcaagcaagacgccctcattctgcagaggggtttgcaccacgaagatggctcccagcacattggcctcctgcatcccggagatcgtggccccgaccatgagtacgtgctggtcgaggaggccgagtgcgccatgtccgagagggaagccgccccaaacgaggaactggttcagcgtaatcgcctgatctgccgacgaaatccgtatcgcatatttgagtacctccagttatccctggaagaggctttctttctcgtgtatgcgcttggttgcctgagcatctattatgaaaaagagccactgacaattgtgaaactttggaaggctttcacagtggtacagcctaccttccggacaacttatatggcctaccactacttccggtccaaaggctgggtccccaaagtgggactgaagtatggaactgatctgctgctctaccggaagggtccccctttctatcatgcttcgtatagtgtcattatcgagttagtggatgatcacttcgaggggagtctgcgaaggccactatcatggaaatctcttgccgctctcagccgtgtcagcgtgaatgtctcgaaagaattgatgctctgttaccttattaaaccctccacaatgaccgataaagagatggaatcccctgaatgtatgaagcgcatcaaggtccaggaggtaatcttgtctagatgggtgtccagtcgggagaggagcgaccaggatgatttatag

SEQ ID NO: 219181 - DNA, 1137 bp, Artificial Sequence
  derived and/or modified sequence
atggccgaggccgtgttccacgcccccaagcggaagcggcgggtgtatgaaacgtatgagagcccccttcctatcccattcggacaggaccacggcccactcaaggagtttaagatcttccgggcggagatgataaataataacgtgatcgtgagaaatgccgaggacattgaacagctgtatgggaaaggctactttggcaaggggattctcagcagatcacgaccttcattcaccattagcgatccaaaactcgtagctaaatggaaggacatgaagaccaacatgcccataattacgtctaaaaggtatcagcactcggtggaatgggcagctgaactcatgcggagacaaggtcaggacgagagcacagtgcgcagaatcttgaaggattataccaaacccctggagcatccgcccgtgaagcgcaatgaagaggcccaggtccatgacaaactcaatagtggcatggtgagcaatatggaagggaccgccggcggcgaacgtccctctgtggtcaatggcgactcaggcaagagcggcggcgtgggagatccaagagagcctctgggatgcctccaagagggtagcggctgtcatcccacaaccgagtcgttcgaaaagtctgtgagagaggacgctagtcccttgccccatgtgtgctgttgcaagcaggatgctctgatactacagcgggggctacaccatgaggatggcagccagcacattggcctgttacatcctggggataggggtcctgatcatgagtacgtgctcgtggaggaagccgagtgcgccatgtccgagagagaagccgcacccaacgaagaacttgtgcaacgcaaccgtctgatttgtaggcggaacccctatcgtatctttgaatatttgcaattgtccctggaagaagcgttcttcctggtgtatgccctgggttgtctgtctatatattacgaaaaggagcccctcaccatcgtgaaattgtggaaagcttttacagtcgtacagcctacatttcgcactacctacatggcttatcattactttcgcagcaaaggctgggtgcctaaagtcggtctgaagtacggtaccgatctgctgctgtatagaaaggggccccccttctatcacgcctag

SEQ ID NO: 219182 - DNA, 1317 bp, Artificial Sequence
  derived and/or modified sequence
atggccgaggccgtgttccacgcccccaagcggaagcggcgggtgtatgaaacctatgaatcccctttgcccatcccattcggccaggaccacggtcccctcaaggaattcaagatcttcagggccgaaatgatcaacaacaacgtgattgtccgtaacgcagaggatatagaacaactgtatggcaaggacatgaaaactaatatgccaattatcacgagcaagaggtatcagcatagtgtcgaatgggcggccgaactcatgcgccggcaggggcaggacgagtccaccgtgcgccgcatcctgaaagattacaccaagccactggagcacccacctgtcaaacgcaacgaggaagcgcaggtccatgataagcttaactcgggaatggtgtccaacatggagggcacggcaggcggcgagaggccttctgtggttaatggggacagtggcaaaagcggaggggttggtgatccccgcgaaccactgggatgtctgcaagagggtagtggctgtcaccctacaaccgagtctttcgagaagtcagtccgggaagatgctagtcctcttccgcacgtgtgctgctgcaagcaggatgcactcattctccaaaggggacttcatcacgaggatggtagccagcacattggcctgctacacccaggcgaccgagggcccgatcacgaatatgtgcttgtggaagaggctgagtgcgccatgagcgagagagaggctgctcctaacgaggaattggtccagaggaacagactcatatgccgccgcaatccatataggatttttgagtatttgcagctttcccttgaagaagccttcttcctggtgtatgcactgggctgtctatccatatactatgagaaagagcctttgacaattgtcaaactgtggaaggcattcaccgtggtgcagcctacctttcgaaccacatacatggcctaccactacttccggtccaaagggtgggtgccaaaagtgggactgaaatatggcacagacctccttctgtacaggaaggggccgccattttatcatgccagctactcagtgatcattgagttggtggacgaccattttgagggctccctgcgccgccctctctcctggaaaagcctggccgccttaagccgggtgagtgtgaacgtctctaaggagctcatgctctgctatctcattaaaccgagtaccatgactgacaaggaaatggagagcccagaatgcatgaaaaggattaaggtgcaggaggtgattttgagcaggtgggtgagctctagagagcgatctgaccaagacgacctgtag

SEQ ID NO: 219183 - DNA, 1398 bp, Artificial Sequence
  derived and/or modified sequence
atggctgaagccgtgttccatgcgccaaaacgtaaaagaagagtgtacgagacgtatgaatcccccctccctatcccatttggtcaggatcacggacccttgaaggaattcaagatctttagggcagagatgatcaacaataatgtcattgtgcggaatgcagaggacatcgaacagctgtatggcaaaggatacttcggaaaaggaattttgagcagaagccgcccatcatttacaatcagtgatcccaagttggtggccaaatggaaagacatgaaaacaaatatgccgattatcactagtaagcgataccaacacagtgtggaatgggcagctgaactcatgcgcaggcaaggccaggacgagtcaacggtccgacggattctaaaagattatactaagccattagaacatcctccggtgaagcgcaatgaggaagctcaggttcacgataaacttaatagcggtatggtgagtaatatggagggcacagctggtggggaacgtccttcggtagtgaacggtgatagtggaaagagtggtggtgttggcgaccctagagaacctttgggctgccttcaggagggctctggctgccaccccactacggaaagttttgaaaagtcagtcagggaagatgcgtcacctttaccacatgtatgttgttgtaaacaggatgctttgatcctgcaacggggattgcaccatgaggacgggtctcaacatattgggctcctccaccccggagatcggggtccagatcacgagtatgtgctcgtcgaggaagccgagtgtgctatgagtgagagggaagcagcaccaaatgaagagctggtacagagaaatcggttgatctgtcgtaggaacccatatcgcatttttgagtatctccaactgtcactggaagaggccttctttctggtatacgctttaggctgcctctctatatactatgagaaagagcccctgaccattgtgaagttgtggaaagcctttacggtggtccagcctacattccgaacaacctatatggcatatcattattttagatcaaaaggatgggtccccaaggtagggctcaagtacggtaccgaccttctgctgtaccggaaaggtccacccttctaccacgcgagctacagcgttatcatagagcttgtagatgatcacttcgagggttcccttaggcgtcccctcagctggaagtcactcgccgcactgtcccgtgtgtcagttaatgtaagtaaggaacttatgctgtgctatttaatcaaaccctccacaatgacagataaggaaatggagagccccgaatgtatgaaaagaatcaaggttcaggaggttattctctcccgctgggtgtcttcccgggaaaggtccgaccaggatgacctgtag

SEQ ID NO: 219184 - DNA, 1347 bp, Artificial Sequence
  derived and/or modified sequence
atggcagaggcagtatttcatgcacccaagcgcaagaggcgcgtttatgagacatacgagagtcctttaccgattccctttggccaggaccacggccctcttaaggaattcaaaatcttcagggctgagatgataaacaataatgtgatagtgcgaaatgccgaagatattgagcagctgtatggcaagggttatttcgggaagggaattttgtcacgcagtagacccagttttactattagcgatccaaaactcgtagccaaatggaaagacatgaaaaccaatatgcctatcattacatctaagaggtatcagcattctgtggaatgggcggctgaactgatgcgtcggcagggccaggacgaatccacagtgcggaggattctgaaagactatactaaacctctcgagcatccgcctgtgaaacgtaatgaagaagcccaggtacacgacaaactgaattcggggatggtgagcaacatggagggcaccgcaggcggagaaaggcccagtgtggtgaacggtgatagtggaaagtcaggtggcgtcggtgatcctagagaacctctcggctgtctgcaggagggatccggctgtcatcccacaaccgaaagttttgaaaagtctgtgcgcgaagatgcgagtccactgccgcatgtgtgttgctgtaagcaagacgctctgatcctgcaaagaggactgcaccatgaagacggcagccagcatatcggattattacaccctggcgacaggggcccagatcatgaatatgtcctggtggaagaagctgagtgcgctatgtcagagagagaagctgcccctaacgaggaactagtgcagcgcaatcgcctcatttgtcgacgcaatccttataggatttttgaataccttcagctttccttggaggaggagcccctgactatagtgaaattatggaaagctttcactgttgtacagccaaccttccggacaacgtacatggcatatcactactttcgcagcaagggatgggttcccaaagtgggacttaagtatggtactgacttgttgctttacagaaaagggcctccattctatcacgcaagttacagcgtgatcatagaattagtggatgatcatttcgaaggatcgctgaggcgacccctgtcttggaagtctctcgctgcgctgtcacgggtatccgttaatgtcagtaaggaactgatgctgtgttacttaatcaagccctccacaatgaccgacaaagaaatggaaagccctgagtgtatgaagagaatcaaagtccaagaggtaatactttccaggtgggtgtcctctcgggagcggagtgatcaagacgacctctag

SEQ ID NO: 219185 - DNA, 1398 bp, Artificial Sequence
  derived and/or modified sequence
atggccgaagccgttttccatgcgccaaagcggaagcgacgcgtttatgagacatacgagtccccccttccaataccgtttgggcaggaccatgggccactcaaagagtttaaaatcttccgagcagagatgattaataacaatgtcattgtccgtaatgcagaggatattgagcaattatatggaaaaggctacttcggtaagggaatcctatccaggtcccgcccaagttttaccatcagcgaccctaaacttgttgccaaatggaaggatatgaaaaccaacatgccaattattacctccaagcggtatcagcactcagtggaatgggctgccgagctcatgcggagacagggacaggatgagtcaacagtccggaggatactgaaagactataccaaaccactcgaacatccacctgtcaaacggaatgaggaggctcaggtgcacgacaaattgaactctgggatggtttccaatatggagggtactgctggaggggaaagaccctcagttgtgaatggtgacagcggcaaatcaggtggggtgggagaccccagggagccactaggatgcctgcaggaaggcagcggctgtcaccctaccacagagtcctttgagaagagtgtgcgcgaggatgccagccccttgccccacgtgtgttgctgcaaacaggacgccctcattctccaacggggactgcaccacgaggacgggagccagcatattgggcttctgcaccccggtgatagaggacctgaccacgaatacgtgttggtggaagaagccgagtgtgcgatgagcgaacgagaggcagcccctaacgaggaacttgtccagagaaatcggctcatatgccggaggaacccttaccggatcttcgagtatctccagctgagcttagaagaggcgtttttcctggtttacgccctgggttgcctatcaatttactacgaaaaggaaccgctgacaatcgtgaaactctggaaggcatttaccgtggtccagccaacattcagaacgacttatatggcctatcattatttccgcagcaagggttgggtgcctaaagtgggccttaagtatggcacagacctgctgttatatcgaaaaggccctcctttctatcacgcgagttacagtgtgattatcgagctggtggacgaccacttcgagggctcccttcgacgccctttgagttggaagtccctggccgctttgtcgcgcgttagcgtgaacgtgagcaaagagctgatgctgtgttatctgataaagcccagtacaatgaccgataaggagatggagtccccagagtgcatgaagcgaataaaggtccaggaggtgatcctgtccagatgggtcagctcaagagagcggtcagaccaggacgatttatag

SEQ ID NO: 219186 - DNA, 1137 bp, Artificial Sequence
  derived and/or modified sequence
atggccgaggctgttttccacgcccctaagagaaagcgcagagtgtacgagacctatgaaagccccctgccaatcccattcgggcaagatcatgggcctctgaaggaattcaagattttccgcgcagagatgatcaacaataacgtaattgtcagaaacgcagaggatattgagcagctgtatggcaagggatacttcggaaaggggatcctcagtcgctccagaccaagtttcacaatctccgatccaaagttggtggcaaaatggaaggacatgaagacgaacatgcccatcattacatcgaaaaggtaccagcactcagtggagtgggccgcagagttgatgaggcggcagggccaggacgaaagtacggttcgacggattttaaaggattacacaaagcccctcgagcaccccccagtaaagcgaaacgaagaagctcaggtgcacgataagctcaactctggaatggtctccaatatggagggaacagctggtggcgaacggccttccgtggtgaacggagacagcggcaagtcaggaggtgttggagatccgagggaacctctggggtgccttcaggagggtagcggctgtcaccccaccaccgagtccttcgaaaagtccgtgcgcgaggacgcctcacctctcccccatgtgtgttgttgcaagcaggacgcgctcatacttcagcgaggtcttcatcatgaagacgggagccaacatattggcctactgcaccctggggatcgcggaccagaccacgaatatgtgctcgtggaagaggccgagtgtgctatgtccgagcgagaggccgctccgaacgaggagctggttcagagaaatcgacttatttgtcggaggaatccttaccgaatcttcgagtacttacaacttagcctggaggaggcgttcttcctcgtatacgctctaggttgtctgtcgatttattatgagaaggagcccctgacaattgtaaagctgtggaaagccttcacggtcgtgcagcctacgtttaggaccacatacatggcctaccactactttcgaagtaagggctgggttcccaaagtgggccttaagtatggcacggatctgctgctgtatagaaagggacctcccttctatcacgcgtag

SEQ ID NO: 219187 - DNA, 1317 bp, Artificial Sequence
  derived and/or modified sequence
atggccgaggcagtgttccatgctcccaaacggaagcgccgagtttatgagacctacgagtcccctcttccgatccccttcggccaggatcatggccctctgaaggagttcaagatattccgggctgagatgatcaacaacaacgttattgtccgcaacgctgaggatattgaacaactttacgggaaagacatgaagacaaatatgcctattattacctcgaagcgctaccagcattccgttgagtgggccgcagagctcatgaggcgtcaaggtcaggacgaatcaaccgtgagacgaatactcaaggattatacaaagccactagaacaccctcctgtaaagaggaatgaagaggcccaagtgcacgacaagctcaatagtggaatggtgagcaatatggaaggcaccgctggcggtgaacggcctagtgttgttaacggagactctggcaagtctggtggtgtaggagacccaagggagcctctcggctgcctccaggaaggatctggatgtcacccaactactgagagcttcgagaaatcggtacgagaagacgcttctcctcttccgcacgtatgctgttgtaaacaggatgctctgatcctgcagcgcggtcttcaccacgaagatggaagtcagcatatcgggctgttacaccctggcgatagagggcctgaccacgaatacgtcctcgtcgaggaggccgagtgtgcaatgtcagagagagaagccgctccaaatgaagaacttgtgcagcgaaaccggttgatatgccggcgaaatccttatcggattttcgagtacctgcagctatcgctcgaggaagcctttttcctcgtttacgcattgggctgtttaagcatttattatgaaaaagagccactcaccatagttaagctgtggaaggcttttactgtagttcagccaacatttcgaactacgtacatggcataccattacttccggagcaagggctgggttcctaaagtgggcctgaaatacggcaccgatctgctgctctataggaagggccctccgttctaccacgccagctactctgtaataatcgaactggtcgacgatcatttcgagggctcgcttagacgtcccctgagctggaagtcactcgcagcattaagccgcgtgtcagttaacgtctccaaagaactcatgctttgctacttgattaagcccagtacaatgacggataaggagatggagtcccctgaatgcatgaaacggattaaagtccaagaggtgattctctcccgctgggtttcatcaagggagcgatcggaccaggacgatttgtag

SEQ ID NO: 219188 - DNA, 2381 bp, Artificial Sequence
  derived and/or modified sequence
aagaaaggtaagggccctgggcgaggaaagcgcggccctttccgagtttggtgttttgcagcgaaaggaaatctcgctcttccgaaagtcctccagggcgagagaggaaagggcctaggtactgtgctggggtcgcacagccggccgagacagtgccgggacggggagccaggcttccgagtgcgcccggtcactgactcctccgcgctttcctcgtgcgcctgcagcccttggttcttggaaacgccggcgccttgttcagggctggtggggctggggcgcaaggtgcagctgacaatgcccgagaggagccgcagcctctggtggagttcggtcgggtgtgggggtagtcaaggaaagaagcaaagggaatacctcctctgaaaaatggcagaagcagttttccatgccccaaagaggaaaagaagagtgtatgagacttacgagtctccattgccaatcccttttggtcaggaccatggtcctctgaaagaattcaagatattccgtgctgaaatgattaacaacaatgtgattgtgaggaatgcggaggacattgagcagctctatgggaaaggttattttggaaaaggtattctttcaagaagccgtccaagcttcacaatttcagatcctaaactggttgctaaatggaaagatatgaagacaaacatgcctatcatcacatcaaagaggtatcagcatagtgttgagtgggcagcagagctgatgcgtagacaggggcaggatgagagtacagtgcgcagaatcctcaaggattacacgaaaccgcttgagcatcctcctgtgaaaaggaatgaagaggctcaagtgcatgacaagcttaactctggaatggtttccaacatggaaggcacagcagggggagagagaccttctgtggtaaacggggactctggaaagtcaggtggtgtgggtgatccccgtgagccattaggctgcctgcaggagggctctggctgccacccaacaacagagagctttgagaaaagcgtgcgagaggatgcctcacctctgccccatgtctgttgctgcaaacaagatgctctcatcctccagcgtggccttcatcatgaagacggcagccagcacatcggcctcctgcatcctggggacagagggcctgaccatgagtacgtgctggtcgaggaagcggagtgtgccatgagcgagagggaggctgccccaaatgaggaattggtgcaaagaaacaggttaatatgcagaagaaatccatataggatctttgagtatttgcaactcagcctagaagaggcctttttcttggtctatgctctgggatgtttaagtatttactatgagaaggagcctttaacgatagtgaagctctggaaagctttcactgtagttcagcccacgttcagaaccacctacatggcctaccattactttcgaagcaagggctgggtgcccaaagtgggactcaagtacgggacagatttactgctatatcggaaaggccctccattttaccatgcaagttattctgtcattatcgagctagttgatgaccattttgaaggctctctccgcaggcctctcagttggaagtccctggctgccttgagcagagtttccgttaatgtctctaaggaacttatgctgtgctatttgattaaaccctctactatgactgacaaggaaatggagtcaccagaatgtatgaaaaggattaaagttcaggaggtgattctgagtcgatgggtttcttcacgagagaggagtgaccaagacgatctttaacaattcaacctcaaatttctaatttcaccaacaactatttattgagggctaggtaaaaagttctttttgttgtaatcgtccattaattcataagttttaaagggcatggtgctcccagcaccagaaaactatcagtgtttttaaagataaattacacaagggaggagaaagatccctgtgctaggactgcagattctatacttgcgttggcctctaactctccaatccagagcctcctgcctctggcgtcagtcttttccctcatccactcactggggagattggactagaggagtcctgagaggacacttccaacaagagacatttattctctgattttacctgaaaatggtagtagtttacatttatacagtacagtttatgaagcactttcatacgcaggcatctcttgttacctacatctaagctgttcccgaaagagtgttacagaacacaacagtattgtacaatattcgataagcatatcttcactgcacttgttataaaaatgagtggtgaaataatgtttggagacataatgaaagcgattaacatttggcaaaatataataaagcctttttgtaattggtgagaaa

SEQ ID NO: 219189 - DNA, 2028 bp, Artificial Sequence
  derived and/or modified sequence
actgcttgacggcagcggtgtccgccccacggccggcgttgccggggtaacggcgagcgcgtggggccaagaaagaatacctcctctgaaaaatggcagaagcagttttccatgccccaaagaggaaaagaagagtgtatgagacttacgagtctccattgccaatcccttttggtcaggaccatggtcctctgaaagaattcaagatattccgtgctgaaatgattaacaacaatgtgattgtgaggaatgcggaggacattgagcagctctatgggaaaggttattttggaaaaggtattctttcaagaagccgtccaagcttcacaatttcagatcctaaactggttgctaaatggaaagatatgaagacaaacatgcctatcatcacatcaaagaggtatcagcatagtgttgagtgggcagcagagctgatgcgtagacaggggcaggatgagagtacagtgcgcagaatcctcaaggattacacgaaaccgcttgagcatcctcctgtgaaaaggaatgaagaggctcaagtgcatgacaagcttaactctggaatggtttccaacatggaaggcacagcagggggagagagaccttctgtggtaaacggggactctggaaagtcaggtggtgtgggtgatccccgtgagccattaggctgcctgcaggagggctctggctgccacccaacaacagagagctttgagaaaagcgtgcgagaggatgcctcacctctgccccatgtctgttgctgcaaacaagatgctctcatcctccagcgtggccttcatcatgaagacggcagccagcacatcggcctcctgcatcctggggacagagggcctgaccatgagtacgtgctggtcgaggaagcggagtgtgccatgagcgagagggaggctgccccaaatgaggaattggtgcaaagaaacaggttaatatgcagaagaaatccatataggatctttgagtatttgcaactcagcctagaagaggagcctttaacgatagtgaagctctggaaagctttcactgtagttcagcccacgttcagaaccacctacatggcctaccattactttcgaagcaagggctgggtgcccaaagtgggactcaagtacgggacagatttactgctatatcggaaaggccctccattttaccatgcaagttattctgtcattatcgagctagttgatgaccattttgaaggctctctccgcaggcctctcagttggaagtccctggctgccttgagcagagtttccgttaatgtctctaaggaacttatgctgtgctatttgattaaaccctctactatgactgacaaggaaatggagtcaccagaatgtatgaaaaggattaaagttcaggaggtgattctgagtcgatgggtttcttcacgagagaggagtgaccaagacgatctttaacaattcaacctcaaatttctaatttcaccaacaactatttattgagggctaggtaaaaagttctttttgttgtaatcgtccattaattcataagttttaaagggcatggtgctcccagcaccagaaaactatcagtgtttttaaagataaattacacaagggaggagaaagatccctgtgctaggactgcagattctatacttgcgttggcctctaactctccaatccagagcctcctgcctctggcgtcagtcttttccctcatccactcactggggagattggactagaggagtcctgagaggacacttccaacaagagacatttattctctgattttacctgaaaatggtagtagtttacatttatacagtacagtttatgaagcactttcatacgcaggcatctcttgttacctacatctaagctgttcccgaaagagtgttacagaacacaacagtattgtacaatattcgataagcatatcttcactgcacttgttataaaaatgagtggtgaaataatgtttggagacataatgaaagcgattaacatttggcaaaatataataaagcctttttgtaattgg

SEQ ID NO: 219190 - DNA, 2149 bp, Artificial Sequence
  derived and/or modified sequence
aacggcgagcgcgtggggccaagaaaggtaagggccctgggcgaggaaagcgcggccctttccgagtttggtgttttgcagcgaaaggaaatctcgctcttccgaaagtcctccagggcgagagaggaaagggcctagaatacctcctctgaaaaatggcagaagcagttttccatgccccaaagaggaaaagaagagtgtatgagacttacgagtctccattgccaatcccttttggtcaggaccatggtcctctgaaagaattcaagatattccgtgctgaaatgattaacaacaatgtgattgtgaggaatgcggaggacattgagcagctctatgggaaaggttattttggaaaaggtattctttcaagaagccgtccaagcttcacaatttcagatcctaaactggttgctaaatggaaagatatgaagacaaacatgcctatcatcacatcaaagaggtatcagcatagtgttgagtgggcagcagagctgatgcgtagacaggggcaggatgagagtacagtgcgcagaatcctcaaggattacacgaaaccgcttgagcatcctcctgtgaaaaggaatgaagaggctcaagtgcatgacaagcttaactctggaatggtttccaacatggaaggcacagcagggggagagagaccttctgtggtaaacggggactctggaaagtcaggtggtgtgggtgatccccgtgagccattaggctgcctgcaggagggctctggctgccacccaacaacagagagctttgagaaaagcgtgcgagaggatgcctcacctctgccccatgtctgttgctgcaaacaagatgctctcatcctccagcgtggccttcatcatgaagacggcagccagcacatcggcctcctgcatcctggggacagagggcctgaccatgagtacgtgctggtcgaggaagcggagtgtgccatgagcgagagggaggctgccccaaatgaggaattggtgcaaagaaacaggttaatatgcagaagaaatccatataggatctttgagtatttgcaactcagcctagaagaggcctttttcttggtctatgctctgggatgtttaagtatttactatgagaaggagcctttaacgatagtgaagctctggaaagctttcactgtagttcagcccacgttcagaaccacctacatggcctaccattactttcgaagcaagggctgggtgcccaaagtgggactcaagtacgggacagatttactgctatatcggaaaggccctccattttaccatgcaagttattctgtcattatcgagctagttgatgaccattttgaaggctctctccgcaggcctctcagttggaagtccctggctgccttgagcagagtttccgttaatgtctctaaggaacttatgctgtgctatttgattaaaccctctactatgactgacaaggaaatggagtcaccagaatgtatgaaaaggattaaagttcaggaggtgattctgagtcgatgggtttcttcacgagagaggagtgaccaagacgatctttaacaattcaacctcaaatttctaatttcaccaacaactatttattgagggctaggtaaaaagttctttttgttgtaatcgtccattaattcataagttttaaagggcatggtgctcccagcaccagaaaactatcagtgtttttaaagataaattacacaagggaggagaaagatccctgtgctaggactgcagattctatacttgcgttggcctctaactctccaatccagagcctcctgcctctggcgtcagtcttttccctcatccactcactggggagattggactagaggagtcctgagaggacacttccaacaagagacatttattctctgattttacctgaaaatggtagtagtttacatttatacagtacagtttatgaagcactttcatacgcaggcatctcttgttacctacatctaagctgttcccgaaagagtgttacagaacacaacagtattgtacaatattcgataagcatatcttcactgcacttgttataaaaatgagtggtgaaataatgtttggagacataatgaaagcgattaacatttggcaaaatataataaagcctttttgtaattggtgagaaa

SEQ ID NO: 219191 - DNA, 1239 bp, Artificial Sequence
  derived and/or modified sequence
tttgcggccgcactgcttgacggcagcggtgtccgccccacggccggcgttgccggggtaacggcgagcgcgtggggccaagaaagaatacctcctctgaaaaatggcagaagcagttttccatgccccaaagaggaaaagaagagtgtatgagacttacgagtctccattgccaatcccttttggtcaggaccatggtcctctgaaagaattcaagatattccgtgctgaaatgattaacaacaatgtgattgtgaggaatgcggaggacattgagcagctctatgggaaaggttattttggaaaaggtattctttcaagaagccgtccaagcttcacaatttcagatcctaaactggttgctaaatggaaagatatgaagacaaacatgcctatcatcacatcaaagaggtatcagcatagtgttgagtgggcagcagagctgatgcgtagacaggggcaggatgagagtacagtgcgcagaatcctcaaggattacacgaaaccgcttgagcatcctcctgtgaaaaggaatgaagaggctcaagtgcatgacaagcttaactctggaatggtttccaacatggaaggcacagcagggggagagagaccttctgtggtaaacggggactctggaaagtcaggtggtgtgggtgatccccgtgagccattaggctgcctgcaggagggctctggctgccacccaacaacagagagctttgagaaaagcgtgcgagaggatgcctcacctctgccccatgtctgttgctgcaaacaagatgctctcatcctccagcgtggccttcatcatgaagacggcagccagcacatcggcctcctgcatcctggggacagagggcctgaccatgagtacgtgctggtcgaggaagcggagtgtgccatgagcgagagggaggctgccccaaatgaggaattggtgcaaagaaacaggttaatatgcagaagaaatccatataggatctttgagtatttgcaactcagcctagaagaggcctttttcttggtctatgctctgggatgtttaagtatttactatgagaaggagcctttaacgatagtgaagctctggaaagctttcactgtagttcagcccacgttcagaaccacctacatggcctaccattactttcgaagcaagggctgggtgcccaaagtgggactcaagtacgggacagatttactgctatatcggaaaggccctccattttaccatgcaag

SEQ ID NO: 219192 - DNA, 1712 bp, Artificial Sequence
  derived and/or modified sequence
agtttggtgttttgcagcgaaaggaaatctcgctcttccgaaagtcctccagggcgagagaggaaagggcctaggtactgtgctggggtcgcacagccggccgagacagtgccgggacggggagccaggcttccgagtgcgcccggtcactgactcctccgcgctttcctcgtgcgcctgcagcccttggttcttggaaacgccggcgccttgttcagggctggtggggctggggcgcaaggtgcagctgacaatgcccgagaggagccgcagcctctggtggagttcggtcgggtgtgggggtagtcaaggaaagaagcaaagggaatacctcctctgaaaaatggcagaagcagttttccatgccccaaagaggaaaagaagagtgtatgagacttacgagtctccattgccaatcccttttggtcaggaccatggtcctctgaaagaattcaagatattccgtgctgaaatgattaacaacaatgtgattgtgaggaatgcggaggacattgagcagctctatgggaaagatatgaagacaaacatgcctatcatcacatcaaagaggtatcagcatagtgttgagtgggcagcagagctgatgcgtagacaggggcaggatgagagtacagtgcgcagaatcctcaaggattacacgaaaccgcttgagcatcctcctgtgaaaaggaatgaagaggctcaagtgcatgacaagcttaactctggaatggtttccaacatggaaggcacagcagggggagagagaccttctgtggtaaacggggactctggaaagtcaggtggtgtgggtgatccccgtgagccattaggctgcctgcaggagggctctggctgccacccaacaacagagagctttgagaaaagcgtgcgagaggatgcctcacctctgccccatgtctgttgctgcaaacaagatgctctcatcctccagcgtggccttcatcatgaagacggcagccagcacatcggcctcctgcatcctggggacagagggcctgaccatgagtacgtgctggtcgaggaagcggagtgtgccatgagcgagagggaggctgccccaaatgaggaattggtgcaaagaaacaggttaatatgcagaagaaatccatataggatctttgagtatttgcaactcagcctagaagaggcctttttcttggtctatgctctgggatgtttaagtatttactatgagaaggagcctttaacgatagtgaagctctggaaagctttcactgtagttcagcccacgttcagaaccacctacatggcctaccattactttcgaagcaagggctgggtgcccaaagtgggactcaagtacgggacagatttactgctatatcggaaaggccctccattttaccatgcaagttattctgtcattatcgagctagttgatgaccattttgaaggctctctccgcaggcctctcagttggaagtccctggctgccttgagcagagtttccgttaatgtctctaaggaacttatgctgtgctatttgattaaaccctctactatgactgacaaggaaatggagtcaccagaatgtatgaaaaggattaaagttcaggaggtgattctgagtcgatgggtttcttcacgagagaggagtgaccaagacgatctttaacaattcaacctcaaatttctaatttcaccaacaactatttattgagggctag

SEQ ID NO: 219193 - protein, 956 aa, Artificial Sequence
  derived and/or modified sequence
MLLLLGLCLGLSLCVGSQEEAQSWGHSSEQDGLRVPRQVRLLQRLKTKPLMTEFSVKSTIISRYAFTTVSCRMLNRASEDQDIEFQMQIPAAAFITNFTMLIGDKVYQGEITEREKKSGDRVKEKRNKTTEENGEKGTEIFRASAVIPSKDKAAFFLSYEELLQRRLGKYEHSISVRPQQLSGRLSVDVNILESAGIASLEVLPLHNSRQRGSGRGEDDSGPPPSTVINQNETFANIIFKPTVVQQARIAQNGILGDFIIRYDVNREQSIGDIQVLNGYFVHYFAPKDLPPLPKNVVFVLDSSASMVGTKLRQTKDALFTILHDLRPQDRFSIIGFSNRIKVWKDHLISVTPDSIRDGKVYIHHMSPTGGTDINGALQRAIRLLNKYVAHSGIGDRSVSLIVFLTDGKPTVGETHTLKILNNTREAARGQVCIFTIGIGNDVDFRLLEKLSLENCGLTRRVHEEEDAGSQLIGFYDEIRTPLLSDIRIDYPPSSVVQATKTLFPNYFNGSEIIIAGKLVDRKLDHLHVEVTASNSKKFIILKTDVPVRPQKAGKDVTGSPRPGGDGEGDTNHIERLWSYLTTKELLSSWLQSDDEPEKERLRQRAQALAVSYRFLTPFTSMKLRGPVPRMDGLEEAHGMSAAMGPEPVVQSVRGAGTQPGPLLKKPYQPRIKISKTSVDGDPHFVVDFPLSRLTVCFNIDGQPGDILRLVSDHRDSGVTVNGELIGAPAPPNGHKKQRTYLRTITILINKPERSYLEITPSRVILDGGDRLVLPCNQSVVVGSWGLEVSVSANANVTVTIQGSIAFVILIHLYKKPAPFQRHHLGFYIANSEGLSSNCHGLLGQFLNQDARLTEDPAGPSQNLTHPLLLQVGEGPEAVLTVKGHQVPVVWKQRKIYNGEEQIDCWFARNNAAKLIDGEYKDYLAFHPFDTGMDTWPGNVQGALKLAALKMQVHEGQ

SEQ ID NO: 219194 - protein, 723 aa, Artificial Sequence
  derived and/or modified sequence
DSGPPPSTVINQNETFANIIFKPTVVQQARIAQNGILGDFIIRYDVNREQSIGDIQVLNGYFVHYFAPKDLPPLPKNVVFVLDSSASMVGTKLRQTKDALFTILHDLRPQDRFSIIGFSNRIKVWKDHLISVTPDSIRDGKVYIHHMSPTGGTDINGALQRAIRLLNKYVAHSGIGDRSVSLIVFLTDGKPTVGETHTLKILNNTREAARGQVCIFTIGIGNDVDFRLLEKLSLENCGLTRRVHEEEDAGSQLIGFYDEIRTPLLSDIRIDYPPSSVVQATKTLFPNYFNGSEIIIAGKLVDRKLDHLHVEVTASNSKKFIILKTDVPVRPQKAGKDVTGSPRPGGDGEGDTNHIERLWSYLTTKELLSSWLQSDDEPEKERLRQRAQALAVSYRFLTPFTSMKLRGPVPRMDGLEEAHGMSAAMGPEPVVQSVRGAGTQPGPLLKKPYQPRIKISKTSVDGDPHFVVDFPLSRLTVCFNIDGQPGDILRLVSDHRDSGVTVNGELIGAPAPPNGHKKQRTYLRTITILINKPERSYLEITPSRVILDGGDRLVLPCNQSVVVGSWGLEVSVSANANVTVTIQGSIAFVILIHLYKKPAPFQRHHLGFYIANSEGLSSNCHGLLGQFLNQDARLTEDPAGPSQNLTHPLLLQVGEGPEAVLTVKGHQVPVVWKQRKIYNGEEQIDCWFARNNAAKLIDGEYKDYLAFHPFDTGMLGRGMSREL

SEQ ID NO: 219195 - DNA, 2871 bp, Artificial Sequence
  derived and/or modified sequence
atgctactacttctcgggctctgccttggactctccctgtgtgtgggctcccaggaagaggcccaaagctggggccatagctctgaacaggatggccttcgagttcccaggcaagtgagactgttgcagcggcttaagaccaagcccctgatgaccgaatttagcgtgaagtcaactatcattagccggtatgcattcacgaccgtgtcatgccgcatgctaaacagagcgagcgaggaccaggatatcgagttccagatgcagatccctgcggcggcttttatcactaatttcacaatgttaataggggacaaagtgtatcaaggcgagattacggagcgggagaagaaaagcggcgacagagtgaaggagaaaaggaataagaccacagaggaaaatggggaaaagggtactgagattttccgggccagtgctgtgatccccagcaaagataaagccgctttttttctttcctatgaagagctcctgcaacgccggctaggtaagtatgagcacagtatctccgttcgcccacagcagttaagcggtagactgtcagtggatgtgaacatactcgaaagtgcaggcatagcctctctcgaagtgctgccattacacaattctagacagcgcggatctggtcgcggcgaagatgatagtggcccaccaccatctactgtcattaaccagaacgaaacttttgctaatataatttttaaaccgacggtggtgcagcaggcaaggatagcgcagaatggcatactgggggactttatcattaggtacgatgtaaatagggagcagagtatcggcgacatacaagtccttaacggatacttcgtccactactttgctcccaaggatctgccccctctgccgaaaaatgtggtattcgtgctggattcatccgccagtatggtgggcacgaagttacggcagactaaggatgcgttgttcaccatcttacatgatttacggccgcaggacagattcagcataatcggcttctctaacaggattaaggtctggaaagaccatctgatttcggtgacacctgacagcattagggatggcaaggtttatatccaccacatgagtccaacaggcggaaccgatataaatggtgcactccagagggcaattagactgctaaataaatatgtggcccactctgggataggggatagatccgtctctcttattgtattcctgacggatggtaaaccaactgtcggcgaaacccatacactgaagattttaaacaatactcgcgaggctgcacgcggccaagtctgtatcttcacaataggcattgggaacgatgtcgacttccgtcttctagaaaagctgtctttggaaaactgcggactgaccagaagggtacacgaagaagaggacgctgggtcccagctgattggattctacgacgaaatacggacaccgcttctttcggatattagaatcgattacccccccagctctgtagttcaggcaaccaaaacgttattccccaattattttaatggatcggaaattatcattgcaggcaagttggtcgacagaaagctggatcatttgcacgtggaagtgactgctagcaatagcaaaaaatttataatcctgaagaccgatgtccccgtgcggcctcagaaggcaggcaaagatgtaacaggatccccacgccccgggggcgatggggagggggataccaatcacatcgaacgactctggtcttacttaaccaccaaggaattgttgtcctcctggcttcagtctgatgacgagccagagaaggaacggttgagacagagagcccaggccctcgcagtgtcctatcgtttcttaacgccattcacctccatgaaactgagaggcccggtgccaagaatggatggcctggaggaagcacatggcatgagcgccgcaatggggccagaaccagtcgtgcagtctgtcaggggggctgggacccaacccgggccactgctgaagaagccttatcagccaagaataaagatcagcaagaccagcgtggacggcgatccacactttgttgtggacttcccactctctaggctgacagtttgtttcaatattgatggccagccgggggacatcctgcggctggtgtccgaccatagagattccggagtgaccgtcaacggtgaacttataggtgctccggcccctcctaacggacacaagaagcagcggacctacctccgcacaataactatcctgatcaataagcccgagcgctcttatctggagattacacccagccgagtgatcttagatggcggtgaccgactggtgctcccatgtaatcagagtgtggttgttggttcttggggactggaagtatcagtttctgctaacgcaaatgtgactgtcaccatccagggcagtattgctttcgtgattctgatccatttgtataagaaaccagcaccttttcagaggcatcacttgggcttttacattgcaaactcagaaggcctaagctctaactgccacgggctgctgggccagttccttaatcaggacgccagactcacggaagatccggccggtcccagccagaacctgacacatccactgctccttcaggtcggagaaggccccgaggccgtgctcacagtcaagggccaccaagtccctgtagtttggaaacagaggaaaatttacaatggcgaggagcagatcgactgctggttcgccaggaacaatgccgccaagctgattgacggcgagtataaggattatttggcgttccacccattcgacaccggtatggacacttggcctgggaatgtccagggcgccctgaaattggccgccctgaaaatgcaggtccacgagggacagtag

SEQ ID NO: 219196 - DNA, 2172 bp, Artificial Sequence
  derived and/or modified sequence
gattcaggtcctcctccctccacggtgataaaccagaatgagacttttgcaaacattattttcaaacccaccgttgtgcagcaagcccggatagcgcagaatggtatcctaggggattttatcatccggtacgatgtaaaccgtgagcaatccatcggtgatatacaagtgctgaatggatacttcgtgcactacttcgcacccaaggacctgcccccactgcccaagaacgtggtctttgtcctggactcttcggcttcgatggtgggcacgaagctgcgccaaaccaaagatgccttgtttacaatccttcacgatttgcggccccaggataggttcagcatcatcggtttcagtaacagaataaaagtgtggaaggatcatctaatctctgtgacccctgactccattcgtgacggtaaagtatacatacaccatatgagcccaaccggcgggactgacatcaacggcgccctgcagagggccattcggttgctgaataaatacgtcgcccatagcggaatcggcgataggtccgtttccctgattgtattcctgacagacgggaagccaacggtcggggaaacccatacgttgaaaatcctcaataacactagagaagctgcacgcggtcaagtatgtatttttaccatcgggataggaaacgatgtagactttcggttgcttgagaaacttagtctcgagaactgtggcctgaccaggagggtgcatgaggaggaagatgcaggcagtcagctgattggtttctacgatgagattagaacgcctctccttagcgacatccgaatcgactatccaccctcctcagtcgtgcaggcaaccaagaccctgttcccaaactactttaacggctctgagatcatcatcgcgggtaaactagttgatcgcaagctcgatcaccttcacgttgaggttaccgcctctaattccaaaaagtttattattctaaaaacagacgtacccgtgagacctcagaaagccggcaaggacgtcacaggatctccgaggcccgggggagatggcgagggcgacacaaatcatatcgaaaggctgtggtcttatctgacaaccaaggagttactctcttcctggctgcagagcgacgacgaacctgagaaagagcgcttgagacagcgggctcaggccctggccgtaagctatcgatttcttacaccgttcacatctatgaagcttcgtgggccagttccgaggatggacgggctcgaagaagcccatggtatgtccgcggcgatgggtcctgaacctgttgttcagtctgttcgtggtgctggtactcagcccggtccgctacttaagaaaccttaccagccaaggattaaaatcagtaagactagcgtggatggcgaccctcatttcgtggtggattttccactgtcccgacttaccgtgtgcttcaatatcgacggacagcccggggatattctgagacttgtctctgaccaccgcgatagtggcgtgacagtaaacggcgaactcatcggagctcccgctcctcccaatggacacaaaaaacagcgaacctatctcagaacaattacgatcttgataaataaacctgaaaggtcctacctagagataactccgtcaagagtcatcctcgacggtggtgaccgactcgtgctaccttgcaatcaatcagtggttgttggctcatggggtctcgaggtgtctgtgagtgctaacgcaaacgtgacagtgacaattcaggggagtatcgcatttgttatcctgattcacttgtacaaaaaaccagctccttttcagaggcaccacctgggcttctacatcgccaatagcgagggactgtcaagcaattgccacggcctcctcggccagttcctgaaccaggacgcccgtctgacagaggatccagccgggcccagtcagaacctgacacaccctttactgttacaggtcggcgagggacccgaggccgttcttaccgtgaaaggccatcaggttccagtggtctggaaacagcgcaagatctacaatggagaggagcagatcgactgctggttcgcgagaaacaatgccgcgaaactgatcgacggggaatacaaagactaccttgcattccacccttttgacaccggcatgttgggcagagggatgtcaagagagctttag

SEQ ID NO: 219197 - DNA, 6722 bp, Artificial Sequence
  derived and/or modified sequence
gtcccgcagtggctggagccctgggcgctgcaaagcgtgtcccgccgggtccccgagcgtcccgcgccctcgccccgccatgctcctgctgctggggctgtgcctggggctgtccctgtgtgtggggtcgcaggaagaggcgcagagctggggccactcttcggagcaggatggactcagggtcccgaggcaagtcagactgttgcagaggctgaaaaccaaacctttgatgacagaattctcagtgaagtctaccatcatttcccgttatgccttcactacggtttcctgcagaatgctgaacagagcttctgaagaccaggacattgagttccagatgcagattccagctgcagctttcatcaccaacttcactatgcttattggagacaaggtgtatcagggcgaaattacagagagagaaaagaagagtggtgatagggtaaaagagaaaaggaataaaaccacagaagaaaatggagagaaggggactgaaatattcagagcttctgcagtgattcccagcaaggacaaagccgcctttttcctgagttatgaggagcttctgcagaggcgcctgggcaagtacgagcacagcatcagcgtgcggccccagcagctgtccgggaggctgagcgtggacgtgaatatcctggagagcgcgggcatcgcatccctggaggtgctgccgcttcacaacagcaggcagaggggcagtgggcgcggggaagatgattctgggcctcccccatctactgtcattaaccaaaatgaaacatttgccaacataatttttaaacctactgtagtacaacaagccaggattgcccagaatggaattttgggagactttatcattagatatgacgtcaatagagaacagagcattggggacatccaggttctaaatggctattttgtgcactactttgctcctaaagaccttcctcctttacccaagaatgtggtattcgtgcttgacagcagtgcttctatggtgggaaccaaactccggcagaccaaggatgccctcttcacaattctccatgacctccgaccccaggaccgtttcagtatcattggattttccaaccggatcaaagtatggaaggaccacttgatatcagtcactccagacagcatcagggatgggaaagtgtacattcaccatatgtcacccactggaggcacagacatcaacggggccctgcagagggccatcaggctcctcaacaagtacgtggcccacagtggcattggagaccggagcgtgtccctcatcgtcttcctgacggatgggaagcccacggtcggggagacgcacaccctcaagatcctcaacaacacccgagaggccgcccgaggccaagtctgcatcttcaccattggcatcggcaacgacgtggacttcaggctgctggagaaactgtcgctggagaactgtggcctcacacggcgcgtgcacgaggaggaggacgcaggctcgcagctcatcgggttctacgatgaaatcaggaccccgctcctctctgacatccgcatcgattatccccccagctcagtggtgcaggccaccaagaccctgttccccaactacttcaacggctcggagatcatcattgcggggaagctggtggacaggaagctggatcacctgcacgtggaggtcaccgccagcaacagtaagaaattcatcatcctgaagacagatgtgcctgtgcggcctcagaaggcagggaaagatgtcacaggaagccccaggcctggaggcgatggagagggggacaccaaccacatcgagcgtctctggagctacctcaccacaaaggagctgctgagctcctggctgcaaagtgacgatgaaccggagaaggagcggctgcggcagcgggcccaggccctggctgtgagctaccgcttcctcactcccttcacctccatgaagctgagggggccggtcccacgcatggatggcctggaggaggcccacggcatgtcggctgccatgggacccgaaccggtggtgcagagcgtgcgaggagctggcacgcagccaggacctttgctcaagaagccataccagccaagaattaaaatctctaaaacatcagtggatggtgatccccactttgttgtggatttccccctgagcagactcaccgtgtgcttcaacattgatgggcagcccggggacatcctcaggctggtctctgatcacagggactctggtgtcacagtgaacggagagttaattggggcacccgcccctccaaatggccacaagaaacagcgcacttacttgcgcactatcaccatcctcatcaacaagccagagagatcttatctcgagatcacaccgagcagagtcatcttggatggtggggacagactggtgctcccctgcaaccagagtgtggtggtggggagctgggggctggaggtgtccgtgtctgccaacgccaatgtcaccgtcaccatccagggctccatagcctttgtcatcctcatccacctctacaaaaagccggcgcccttccagcgacaccacctgggtttctacattgccaacagcgagggcctttccagcaactgccacggactgctgggtcagttcctgaatcaggatgccagactcacagaagaccctgcagggcccagccagaacctcactcaccctctgctccttcaggtgggagaggggcctgaggccgtcctaacagtgaaaggccaccaagtcccagtggtctggaagcaaaggaagatttacaacggggaagagcagatagactgctggtttgccaggaacaatgccgccaaactgattgacggggagtacaaggattacctggcattccatccatttgacacagggatggacacttggccggggaatgtccagggagctctgaagctggcagccttaaagatgcaagtgcatgaaggacagtgatgtggggaggccgtggggcagctcttttcatggcttgtacacgcctcagctcctggcaattagctggactccatgacccacccctggtgcagcatagatccgacgtctgtctgggcgaagggtaggggtgggtaggggcgggaagcctgagtgcaaatgtcatttccctctactgcctcttcctgcctctccccaccctgcccacatccacagaggggagagaagggtcatagctaaatgcaacaaagtctgtatcttgtcccaacctgcttttctgttctgttagcatatcataaagtaagcctttctggtgaaggaaggttgctatgaaactttttttcttggtggaaatggacaagtttaggcactctgctttttgccttacactaatgcttagaaagctgtcttttcagtggtgttgcagcccccagatgtgtggccaacctctgctgcaaaggaatctcttgctgagtccaggccaccaatcaggcaaatagcccatacatttgatcgttgtaaaccatgaagtcttttcttgcaagacgtttttcttctgctgtggtatcttgcccttaaaaattagttttcattaaaaagaaatttgattgaaaatagaaacatctacagctcagatactgatctctttctaatgggctttgtaaaccacttgactttgctaatggctattctccaatttgttccaataagctaagggcttttcatacacaggacaactccatgtggttgattttactggcatgtcttggtgacgaagagttggccaagtgaatgatgcatcttttacttggagctctccagcctttgtcatagttcccagaccttttttccttgtggtcatccaggaggtgatcaattacatgtgcacagtgctaggacgggaggcagagccggctcagagcaggtccaccagcccacctatagcaggaagcgtgtcggtgcttaggaaatctaggacttccagcttccctcatgtcagatagaaaaaaagtcaggaaaccagctcgtggacaggggctttggttccaaaacttggacaaacctgatgccttaaggaaaaggttaagatgagaggggacttccagagtcaatgaacgtcacccttcagcggacggataccgggagcgcttgggcgaaacagcagagaaagaaagactgtggtcggggaagtggaatgcttcgatgcaggccagagttcaaggctctggggctggcctcacaagaggcttcttccacggggcttgacaccagagcagcccccgcgtgaaatgagaaggcatgcttagcactgggaggaaaagctgagttaagaaaattctttatcatgtttgccttccctggggaaacattcaggcagtaaaatgacatccacgtgttcctgtcggacgcagcggcttcgggaacaagttagcgctgggggactatctgggctcgtctctctctgcttcgtgaacccaccacaccagggcctgtctgctgtgctatttatttgccttccgtcttcccaacctcagctgcctgtattcatgccagaggtgcaaaggctgccagccagtgctgctgacagatgctttcagactgtagagctcagagaaagggagcggcagctagaggtagccagggagctggccaggctccccggggccttcctattatgtaaatcccagctggacagacagccctggagccaggtggccctgtcccctgtggagcacttggagcagtgatctgttgttccaggtgtaagtctcgacactgcagaaatgaggacgttattaggaaagaccagttcctactgcctgtgttgctactttaagagctgagaaaaacattccaatgagctatccatagctaacttgcttgctcagaaaaacataagtaacaaagttgagctttcatttttaaaaattatattttactttagaaaaatatcaccttttttcttcctcttctttacgtgtagatcttttttttttttttcaaatggggtcagtacctgaaagcccgaaaccccataccaagcttatagttaggacctttgcatttgataaaaaaaaaatatagtattttctgttgtccagaaaatcttcccagatagggaaactgaggcagagagtgccgtggagtggtttttgccaagtcatacaacatacttaatgcagggctacactgaacctccagaatcattttgtttgctttgaccctgtttcaccatctgggcaatcatttattttccttgagcatttataaaccagggcgagggttgttccaaaatgagtaattgaatgagatgaagaaatatgtcataattagaggagataaatctccttgttatcacaatagttaatgtgtcatgatcactgactaactgggaccttgaacaagtcagcatctctgcctttcaaaatgaaggaacattgttctctatcctcccctgacccccgacggccccatgctaggtgcaccatcttcctccatttgactttttaatgctttacaacttcaggctaaagggaggggatgttgggaggagaaaccatcacaagattccctcggtgccacagctgtgctgaggaggccggggactgggaatcggagtgggcacctctgtgtttctctagggagtaacattcaacatttaattgaatcgtgtgtcctgataggtggattaggaacaggattcattcctttaactttaacttttggctaaacgacatgccttggattgagtgtatatgtcttccccaaattcatatgttgaagcttaaatcctgaatgtgatggttcttggaattgggacctttggaaggttattgggtcttgagggcagagccctcacgaatgggattaaggcccttataagaagagacatggggccaggtgcagtggctcacacctgtaatcccaacattttgggaggccgagaagggtggatcatgaggtcaggagatggagaccatcctggccaacatggtgaaacctcgtctctactaaaaatacaaaaattagctgggcgtggtggtgcgtgcctgtagttccagctacttgggaggctgaggcaggagaatcgcttgaaccaggcagtcggaacttgtagtgagccaagatcacgccactgcactccagctggagtgacagagccaaactccgtcaaaaaaaaacaaaacaaaacaaaaaaaagacatgggagagatggtgtttttcctctccaccacctggggatacgatgagaagatggccacctgcaagccaggaagacggccctcaccagacaccatgtctgctggcaccttgatcttggacctcccagcctccagaactgtgagaaataaatgtgttttgtttaagctactcaagtctgtggtattcttgttaaggcagcccaagctgactaagacaccaaatcattcaaaacgttaattctttttctgttctttaagcttcccagaatgtacacaaacaatgctgttattaaaatttaaaggactcttggaactgtaggacatgatccagctaaaataaataacaaataacacagctaagcaaatacttataaatgtagctttaaatatttattttagttttaaataattagtggggtacgagacagttcacattcaagagacattttacttagacaaaaaatttataagagaacgatgcataaaaacaaacaacatattggtctgtttatttttctaagggaaaatggaattggagctgttgagaataaaacttgaagaatctaactgca

SEQ ID NO: 219198 - DNA, 2932 bp, Artificial Sequence
  derived and/or modified sequence
gaccgcggggtgggcggccccgagagcgtcccgcagtggctggagccctgggcgctgcaaagcgtgtcccgccgggtccccgagcgtcccgcgccctcgccccgccatgctcctgctgctggggctgtgcctggggctgtccctgtgtgtggggtcgcaggaagaggcgcagagctggggccactcttcggagcaggatggactcagggtcccgaggcaagtcagactgttgcagaggctgaaaaccaaacctttgatgacagaattctcagtgaagtctaccatcatttcccgttatgccttcactacggtttcctgcagaatgctgaacagagcttctgaagaccaggacattgagttccagatgcagattccagctgcagctttcatcaccaacttcactatgcttattggagacaaggtgtatcagggcgaaattacagagagagaaaagaagagtggtgatagggtaaaagagaaaaggaataaaaccacagaagaaaatggagagaaggggactgaaatattcagagcttctgcagtgattcccagcaaggacaaagccgcctttttcctgagttatgaggagcttctgcagaggcgcctgggcaagtacgagcacagcatcagcgtgcggccccagcagctgtccgggaggctgagcgtggacgtgaatatcctggagagcgcgggcatcgcatccctggaggtgctgccgcttcacaacagcaggcagaggggcagtgggcgcggggaagatgattctgggcctcccccatctactgtcattaaccaaaatgaaacatttgccaacataatttttaaacctactgtagtacaacaagccaggattgcccagaatggaattttgggagactttatcattagatatgacgtcaatagagaacagagcattggggacatccaggttctaaatggctattttgtgcactactttgctcctaaagaccttcctcctttacccaagaatgtggtattcgtgcttgacagcagtgcttctatggtgggaaccaaactccggcagaccaaggatgccctcttcacaattctccatgacctccgaccccaggaccgtttcagtatcattggattttccaaccggatcaaagtatggaaggaccacttgatatcagtcactccagacagcatcagggatgggaaagtgtacattcaccatatgtcacccactggaggcacagacatcaacggggccctgcagagggccatcaggctcctcaacaagtacgtggcccacagtggcattggagaccggagcgtgtccctcatcgtcttcctgacggatgggaagcccacggtcggggagacgcacaccctcaagatcctcaacaacacccgagaggccgcccgaggccaagtctgcatcttcaccattggcatcggcaacgacgtggacttcaggctgctggagaaactgtcgctggagaactgtggcctcacacggcgcgtgcacgaggaggaggacgcaggctcgcagctcatcgggttctacgatgaaatcaggaccccgctcctctctgacatccgcatcgattatccccccagctcagtggtgcaggccaccaagaccctgttccccaactacttcaacggctcggagatcatcattgcggggaagctggtggacaggaagctggatcacctgcacgtggaggtcaccgccagcaacagtaagaaattcatcatcctgaagacagatgtgcctgtgcggcctcagaaggcagggaaagatgtcacaggaagccccaggcctggaggcgatggagagggggacaccaaccacatcgagcgtctctggagctacctcaccacaaaggagctgctgagctcctggctgcaaagtgacgatgaaccggagaaggagcggctgcggcagcgggcccaggccctggctgtgagctaccgcttcctcactcccttcacctccatgaagctgagggggccggtcccacgcatggatggcctggaggaggcccacggcatgtcggctgccatgggacccgaaccggtggtgcagagcgtgcgaggagctggcacgcagccaggacctttgctcaagaagccataccagccaagaattaaaatctctaaaacatcagtggatggtgatccccactttgttgtggatttccccctgagcagactcaccgtgtgcttcaacattgatgggcagcccggggacatcctcaggctggtctctgatcacagggactctggtgtcacagtgaacggagagttaattggggcacccgcccctccaaatggccacaagaaacagcgcacttacttgcgcactatcaccatcctcatcaacaagccagagagatcttatctcgagatcacaccgagcagagtcatcttggatggtggggacagactggtgctcccctgcaaccagagtgtggtggtggggagctgggggctggaggtgtccgtgtctgccaacgccaatgtcaccgtcaccatccagggctccatagcctttgtcatcctcatccacctctacaaaaagccggcgcccttccagcgacaccacctgggtttctacattgccaacagcgagggcctttccagcaactgccacggactgctgggtcagttcctgaatcaggatgccagactcacagaagaccctgcagggcccagccagaacctcactcaccctctgctccttcaggtgggagaggggcctgaggccgtcctaacagtgaaaggccaccaagtcccagtggtctggaagcaaaggaagatttacaacggggaagagcagatagactgctggtttgccaggaacaatgccgccaaactgattgacggggagtacaaggattacctggcattccatccatttgacacagggatgcttggccggggaatgtccagggagctctga

SEQ ID NO: 219199 - DNA, 2871 bp, Artificial Sequence
  derived and/or modified sequence
atgctgctgctgctgggcctgtgcctgggcctgagcctgtgtgtgggcagccaggaggaggcccagagctggggccacagcagcgagcaggacggcctgcgggtgccccggcaggtgcggctgctgcagaggctgaagaccaagcccctgatgacagagttctctgtgaagagcaccatcatcagccgctatgccttcaccaccgtgtcctgcaggatgctgaacagagccagcgaggaccaggacatcgagttccagatgcagatcccagctgctgccttcatcaccaacttcaccatgctgattggagacaaggtgtaccagggcgagatcacagagcgggagaagaagagcggggacagagtgaaggagaagaggaacaagaccacagaggagaatggagagaagggcacagagatcttccgggccagcgctgtgatccccagcaaggacaaggccgccttcttcctgtcctatgaggagctgctgcagaggcggctgggcaagtatgagcacagcatctctgtgcggccccagcagctgagcggccgcctgtctgtggatgtgaacatcctggagagcgctggcatcgccagcctggaggtgctgcccctgcacaacagccggcagaggggcagcggcagaggagaagatgacagcggccccccacccagcaccgtcatcaaccagaatgagacctttgccaacatcatcttcaagcccaccgtggtgcagcaggccagaattgcccagaatggcatcctgggggacttcatcatccgctatgatgtgaaccgggagcagagcatcggggacatccaggtgctgaatggctactttgtgcactactttgcccccaaggacctgccccccctgcccaagaatgtggtgtttgtgctggacagcagcgcctccatggtgggcaccaagctgcggcagaccaaggatgccctcttcaccatcctgcatgacctgcggccccaggaccgcttcagcatcatcggcttcagcaaccgcatcaaggtgtggaaggaccacctgatctctgtgaccccagacagcatcagagatggcaaggtgtacatccaccacatgagccccaccggcggcacagacatcaacggggccctgcagagggccatccggctgctgaacaagtatgtggcccacagcggcattggagacagatctgtgtccctgattgtgttcctgacagatggcaagcccaccgtgggggagacccacaccctgaagatcctgaacaacacccgggaggccgcccggggccaggtgtgcatcttcaccatcggcattggaaatgatgtggacttccggctgctggagaagctgagcctggagaactgtggcctgaccaggagagtgcatgaggaggaggatgctggcagccagctgattggcttctatgatgagatccgcacccccctgctgagtgacatcagaattgactacccacccagctctgtggtgcaggccaccaagaccctcttccccaactacttcaacggcagcgagatcatcatcgccggcaagctggtggacaggaagctggaccacctgcacgtggaggtgacagccagcaacagcaagaagttcatcatcctgaagacagatgtgcctgtgcggccccagaaggccggcaaggatgtgacaggcagccccaggcctggaggagatggagagggggacaccaaccacatcgagcggctgtggagctacctgaccaccaaggagctgctgagctcctggctgcagagtgatgatgagcctgagaaggagcggctgcggcagagggcccaggccctggccgtgtcctaccgcttcctgacccccttcacctccatgaagctgcggggccctgtgcccaggatggatggcctggaggaggcccacggcatgtctgctgccatgggccctgagcctgtggtgcagagcgtgagaggagctggcacccagcccggccccctgctgaagaagccctaccagccccgcatcaagatcagcaagacctctgtggatggagacccccactttgtggtggacttccccctgagccggctgactgtgtgcttcaacattgatggccagcccggggacatcctgcggctggtgtctgaccaccgggacagcggcgtgacagtgaatggagagctgattggagccccagccccacccaacggccacaagaagcagaggacctacctgcggaccatcaccatcctgatcaacaagccagagaggagctacctggagatcacccccagcagggtcatcctggatggaggagaccggctggtgctgccctgcaaccagagcgtggtggtgggctcctggggcctggaggtgtctgtgtctgccaatgccaacgtgacagtgaccatccagggcagcatcgccttcgtcatcctgatccacctgtacaagaagccagcccccttccagaggcaccacctgggcttctacatcgccaacagcgagggcctgagcagcaactgccacggcctgctgggccagttcctgaaccaggatgcccggctgacagaggaccctgctggccccagccagaacctgacccaccccctgctgctgcaggtgggggagggccctgaggccgtgctgactgtgaagggccaccaggtgcctgtggtgtggaagcagaggaagatctacaatggagaggagcagattgactgctggtttgccaggaacaatgctgccaagctgattgatggagagtacaaggactacctggccttccacccctttgacaccggcatggacacctggccaggaaatgtgcagggcgccctgaagctggccgccctgaagatgcaggtgcatgagggccagtag

SEQ ID NO: 219200 - DNA, 2172 bp, Artificial Sequence
  derived and/or modified sequence
gacagcggccccccacccagcaccgtcatcaaccagaatgagacctttgccaacatcatcttcaagcccaccgtggtgcagcaggccagaattgcccagaatggcatcctgggggacttcatcatccgctatgatgtgaaccgggagcagagcatcggggacatccaggtgctgaatggctactttgtgcactactttgcccccaaggacctgccccccctgcccaagaatgtggtgtttgtgctggacagcagcgcctccatggtgggcaccaagctgcggcagaccaaggatgccctcttcaccatcctgcatgacctgcggccccaggaccgcttcagcatcatcggcttcagcaaccgcatcaaggtgtggaaggaccacctgatctctgtgaccccagacagcatcagagatggcaaggtgtacatccaccacatgagccccaccggcggcacagacatcaacggggccctgcagagggccatccggctgctgaacaagtatgtggcccacagcggcattggagacagatctgtgtccctgattgtgttcctgacagatggcaagcccaccgtgggggagacccacaccctgaagatcctgaacaacacccgggaggccgcccggggccaggtgtgcatcttcaccatcggcattggaaatgatgtggacttccggctgctggagaagctgagcctggagaactgtggcctgaccaggagagtgcatgaggaggaggatgctggcagccagctgattggcttctatgatgagatccgcacccccctgctgagtgacatcagaattgactacccacccagctctgtggtgcaggccaccaagaccctcttccccaactacttcaacggcagcgagatcatcatcgccggcaagctggtggacaggaagctggaccacctgcacgtggaggtgacagccagcaacagcaagaagttcatcatcctgaagacagatgtgcctgtgcggccccagaaggccggcaaggatgtgacaggcagccccaggcctggaggagatggagagggggacaccaaccacatcgagcggctgtggagctacctgaccaccaaggagctgctgagctcctggctgcagagtgatgatgagcctgagaaggagcggctgcggcagagggcccaggccctggccgtgtcctaccgcttcctgacccccttcacctccatgaagctgcggggccctgtgcccaggatggatggcctggaggaggcccacggcatgtctgctgccatgggccctgagcctgtggtgcagagcgtgagaggagctggcacccagcccggccccctgctgaagaagccctaccagccccgcatcaagatcagcaagacctctgtggatggagacccccactttgtggtggacttccccctgagccggctgactgtgtgcttcaacattgatggccagcccggggacatcctgcggctggtgtctgaccaccgggacagcggcgtgacagtgaatggagagctgattggagccccagccccacccaacggccacaagaagcagaggacctacctgcggaccatcaccatcctgatcaacaagccagagaggagctacctggagatcacccccagcagggtcatcctggatggaggagaccggctggtgctgccctgcaaccagagcgtggtggtgggctcctggggcctggaggtgtctgtgtctgccaatgccaacgtgacagtgaccatccagggcagcatcgccttcgtcatcctgatccacctgtacaagaagccagcccccttccagaggcaccacctgggcttctacatcgccaacagcgagggcctgagcagcaactgccacggcctgctgggccagttcctgaaccaggatgcccggctgacagaggaccctgctggccccagccagaacctgacccaccccctgctgctgcaggtgggggagggccctgaggccgtgctgactgtgaagggccaccaggtgcctgtggtgtggaagcagaggaagatctacaatggagaggagcagattgactgctggtttgccaggaacaatgctgccaagctgattgatggagagtacaaggactacctggccttccacccctttgacaccggcatgctgggccggggcatgagccgggagctgtag

SEQ ID NO: 219201 - DNA, 2871 bp, Artificial Sequence
  derived and/or modified sequence
atgctgctgctgctgggcctgtgcctgggcctgagcctgtgcgtggggtcgcaggaggaggcacaatcctgggggcattctagcgagcaggatggtctcagagtcccccgtcaggtaagactgctgcagcgcttgaaaaccaaacctctcatgacagagttctcagtgaaatccaccatcatctctagatacgcctttaccaccgtttcatgccggatgctcaatcgagcatccgaggaccaggacattgagtttcaaatgcagattcctgccgctgcatttattacaaacttcactatgctgatcggtgacaaggtctatcagggagaaatcaccgagcgagaaaaaaagagcggagaccgagtaaaggagaagaggaataaaacgactgaggaaaatggcgagaagggtactgaaatcttccgagcctccgccgtcatcccctcaaaggacaaggccgccttcttcttgagctatgaggagctgctccaacggagattaggaaagtatgagcattcaatctccgtccgcccacagcagttgtccggccgcctgagcgtggacgtaaacatccttgagtctgccggaatagcctcacttgaagtgctgcccctccataactccagacagcgcggctccggtaggggggaggacgattctggccccccacccagcacggtgattaatcaaaacgagacattcgcaaatattatttttaagccgactgttgttcagcaggccagaatcgcccagaacggtattcttggcgatttcataatcaggtacgatgtgaatagggaacagtccatcggcgacatccaggtgttgaatggctatttcgtgcactacttcgcacctaaggacctgccccctttgccaaaaaatgtagtgttcgttctcgatagctccgcaagcatggtggggactaagctccgccaaacaaaagacgccctttttaccatcctgcatgatctccgaccccaggaccgttttagtatcatcggtttttcaaaccggatcaaagtgtggaaggaccacctgattagcgtaacgccggatagtataagggacggtaaagtttacatacatcatatgtcacctacaggtggtaccgacattaatggtgcgctccagcgcgcgatcagactcttaaataagtacgtagcacattcagggattggcgaccggagtgtgtctctgatcgtctttttaacagatgggaagcccacagtaggtgaaacccacactctcaaaatactcaataacactagagaagccgctcgcggccaggtgtgtatttttaccattggtatcgggaacgacgtagattttaggcttcttgaaaagctctctttggagaattgcgggctgacgaggagagtccacgaggaagaagatgctgggtctcagctgatcggattttacgacgagataagaacccctctgctgtcagacattaggattgattacccaccctcatccgtggtgcaagcgacaaaaaccctattcccgaattactttaatgggagtgagattatcattgctggcaagttagtcgaccggaagctggaccaccttcacgtggaggtcactgcttccaattcaaagaagtttatcattttgaaaaccgatgtacctgttcggccccaaaaagcgggaaaggacgtgactggatccccaagaccgggcggcgacggggaaggggacactaaccatattgagcggctgtggtcctatctgaccacaaaagaacttcttagttcctggttgcagagtgatgacgagcctgagaaggagaggttgaggcaacgcgcccaggctctcgccgtctcttaccgctttctgaccccgttcaccagcatgaagttgcgtgggcccgtgccacggatggatggcctagaggaagcccacggtatgagcgctgctatgggtcctgaacccgtggtgcagagcgtgcgcggtgcaggtactcagccgggccccctattgaagaaaccttaccaaccacgcatcaagatttcaaagacaagcgtggacggtgacccccacttcgtggtggactttcccttgtcaaggctgacggtttgtttcaacatcgacggacagccaggagacattctgagacttgtctctgatcaccgagattcaggcgtcactgttaacggggagctgatcggggcacccgccccacccaatggtcacaaaaaacagcgcacctatctaagaactatcacaatccttattaacaagccagagaggagctatcttgaaattactcctagtcgcgtgatcttggacggtggcgataggctcgtcctcccctgcaatcaatcagtggttgttggtagctgggggcttgaggtgtcagtgagtgcgaatgctaacgtcaccgtgacaatccagggctcaatagctttcgtgatactaattcacctttataagaagcctgctcccttccagagacatcatctgggcttttacatcgcgaatagtgagggtctttcttccaattgccatggactcctggggcagttcttgaaccaggacgctaggctgaccgaagatcccgccggtccctcccagaacctgacacatcccttactcctgcaggtcggtgagggcccagaagccgtgctgacagttaagggccatcaagttcccgtcgtgtggaaacagaggaagatttacaacggtgaagaacaaatcgactgctggtttgcccgcaataacgctgccaagctcatcgacggcgagtacaaggactatctcgcatttcacccgttcgatacaggcatggacacttggccagggaacgtccagggcgcacttaaacttgccgccttaaaaatgcaggtgcacgagggccaatag

SEQ ID NO: 219202 - DNA, 2172 bp, Artificial Sequence
  derived and/or modified sequence
gacagcggccccccccccagcaccgtgatcaaccagaacgagacctttgctaatattattttcaaaccgaccgtggtgcagcaggctaggattgcacagaatgggatcctgggcgattttatcataagatatgatgtcaatagagaacagtcaataggtgacatccaggtgctgaacgggtactttgtgcactacttcgcacccaaggatctcccaccactgcctaagaatgtggtgtttgtgctcgatagtagcgcctctatggtcgggactaagctgcgacagacaaaagatgctcttttcactatactgcatgatctgcggccacaagatcgattctctattataggattttccaaccgcatcaaagtctggaaagatcacctgattagtgttactcctgatagtattagagacggtaaggtgtacatccaccatatgtctccaaccggaggcacagatatcaatggtgcgctgcaaagggcaattaggctcttgaacaaatacgtagcccactcaggaatcggcgacaggtccgtgagcctgattgtgttcctgacagatggaaaacctaccgttggagagacccacaccctgaagatcctgaataatactcgcgaagccgcacgcggccaggtttgtatctttacaattggaatcggaaatgacgtggatttcaggctactagagaaactcagcctggagaattgcggcctgactagacgggttcatgaagaggaggatgccgggtcacagttgataggattctacgatgaaattcgaacccccctgctgtcagacatacggattgattaccccccctcctcggtggtgcaagccactaagacactgtttccaaactatttcaacggctctgagattatcattgctggcaagttggtcgacaggaagttggaccacctccacgtggaggtgacagcatcaaacagtaaaaagttcattatcctgaagactgatgtcccggtgcgcccccagaaggcaggcaaggatgtgacagggagtccccgcccaggaggggatggcgaaggagatactaaccatatcgagcggctgtggtcttacctgactacaaaggagttgctgagcagttggctacagtccgacgatgagccagaaaaggagcgtctgcgtcagagagcccaggcacttgctgtctcctacaggtttctaaccccgttcaccagcatgaagcttagggggccagtgcccagaatggacggcctcgaggaggcccacggaatgtctgctgctatgggccccgagcctgtcgtgcaatcagtccgcggtgccgggacccagcccggacctcttctcaagaagccctaccagcctcgtataaagatatctaagactagcgtcgatggagacccccactttgtcgtggactttcctctgtctcgtctgaccgtctgcttcaacatagacggtcaaccaggtgacatcctgcgcctggtgagcgaccaccgagattccggagtaactgtgaatggagaactgatcggagcgcctgccccaccaaacggacacaagaaacaacggacttacttgcggaccatcaccattctgattaataaaccggaaagatcctaccttgaaattaccccgagtcgtgtgattctagacggaggtgaccggttggtcctgccctgtaaccaatctgtggtggttggctcatggggcctggaggtatccgtatcggctaatgccaacgtgacagtcaccatccaggggtccatcgcttttgtgatactgattcacctttacaaaaagccggccccttttcaacggcaccaccttggcttctacattgccaattctgaagggttgtccagcaactgtcacggactcctgggacagttcctgaaccaagacgcgaggttgaccgaggacccagccggcccctcacagaatctgacccaccccttgcttttgcaggtgggtgaaggtcccgaggcagtcttgacagtcaaaggtcaccaggttcccgttgtgtggaagcagagaaaaatctataatggcgaggagcagatcgactgctggttcgcccggaacaacgcagcaaaactaattgacggtgaatacaaggattaccttgcatttcacccttttgatactgggatgttggggagagggatgtcaagagagttgtag

SEQ ID NO: 219203 - DNA, 2871 bp, Artificial Sequence
  derived and/or modified sequence
atgctgctcctgctcggactctgcctggggctgagtctgtgtgtgggttcccaggaggaagcgcagtcttggggccatagcagtgagcaggacggattacgggtcccaagacaggttaggttgctgcaaaggttgaaaacaaaaccccttatgacagagttcagtgtcaagtcaactattattagcagatacgccttcactactgtgtcctgtaggatgctcaaccgcgcatctgaggatcaggacattgagtttcagatgcagattcccgctgccgcttttatcaccaactttacaatgctgatcggcgataaggtgtaccagggtgagatcacagaacgggaaaagaagagcggagatagggtgaaagagaagagaaataagactacggaagagaatggggaaaaagggactgaaattttccgtgcttctgcagtaataccaagcaaagacaaggctgcttttttcttgagctacgaagaactactccagcggagactcggaaagtacgagcactcaattagtgtgcggccacagcagcttagcggaaggctcagcgtcgacgtgaatatcttggaaagcgctggaatcgccagcctggaagtgctccctctccataattcacgtcaacgcggatcgggaagaggagaagacgacagcggccctcctccgtctaccgtaatcaatcaaaacgaaacattcgcaaatatcatctttaaaccaacagtggttcagcaggccagaatagcccagaatggcatcctcggagacttcatcattaggtatgacgttaaccgggaacagagcataggtgatattcaggtattgaatggttatttcgtacactatttcgcacctaaagatttgccaccgttgcctaagaacgtggtgttcgtgttagattcaagcgcctccatggttggaacaaaactccggcagacaaaggatgcactgttcacaatccttcatgatctgaggcctcaggaccgcttttcaattattgggttttccaataggatcaaagtctggaaagaccacttgataagcgtgaccccagattctattagggatggaaaagtgtacatccaccacatgtctcctacagggggaacagacattaacggtgcactgcagagagctattcgactgttaaacaagtatgttgcccacagtggaattggagatcggagcgtcagcctcatcgtatttctgactgatggcaaacctacggtcggagagacacacacactaaaaatccttaataacacccgcgaagccgcaagagggcaggtctgcatcttcactattggaataggtaatgacgtcgacttcaggctgctggagaaactatccctggagaattgtggtctaacccggagagtgcacgaagaagaggatgccggatctcagctgataggattttatgatgagattaggaccccgcttctgtctgacatccggatagactacccaccaagcagcgtagtccaggcgacaaagacactattccctaattactttaacgggtcagagattattatagcaggcaaactggtagacaggaagctcgaccatttacacgtagaggtaaccgccagtaattctaagaagtttatcatcctgaaaactgatgtccccgttcggcctcagaaggccggaaaggacgtgaccggaagtccacggccagggggtgatggagagggagacaccaaccacatcgagcgactctggtcgtatctcacgacaaaggaactactttcttcctggcttcagtctgacgacgagcccgaaaaagagagactccgccaaagagcccaagcactcgctgtgagttatcgattcctgactcccttcacaagtatgaagttgaggggccctgtccccagaatggacgggctggaggaggcgcatggtatgtccgctgcgatgggacctgaacccgttgtccaaagtgtacgaggagcaggcacacagccaggacccttattgaagaaaccataccagcctcgcattaaaatcagtaaaacatctgtcgatggggatcctcacttcgtagtcgacttccccctgtcgagactgaccgtatgtttcaacattgatggacagcccggagacatcctccgccttgtgtctgaccatcgggattctggcgtgacagtcaatggtgagctgatcggtgctcccgctccccctaatggacacaaaaagcagcggacctatctgaggaccattacgatcctaatcaacaaaccggaacgctcctacctggagattactccatcccgcgtcatcctcgatggcggtgaccgcttggtgctaccctgcaaccaatccgtcgtggtggggtcctggggacttgaggtgtcagtgagcgcaaatgccaacgtgacagtaaccattcagggctcaattgccttcgttatcctgattcatctgtacaaaaagcctgcgccatttcaaaggcatcacctagggttctacatcgccaattccgagggactgagttcaaattgtcatggtctgctcggacagtttctgaatcaagacgcccgtctgacggaagatccggctggaccatcccaaaacttgacacacccactgctcctgcaagtgggagagggcccagaggccgtcctcactgtgaagggacaccaagtccctgtggtttggaaacagaggaaaatttataacggcgaggaacagatcgattgctggttcgctcgcaataatgccgctaagcttatcgatggagagtacaaggattatctcgccttccacccctttgatacgggcatggatacctggcccggaaatgtgcagggtgcactgaaactggccgcactgaaaatgcaagtacacgagggacagtag

SEQ ID NO: 219204 - DNA, 2172 bp, Artificial Sequence
  derived and/or modified sequence
gactctgggccaccccctagtacagtgatcaaccagaatgagacttttgcaaacataatcttcaagccaactgtggtgcagcaggcccgaatcgcccagaatggaatactgggggactttataattcggtacgatgtgaaccgtgaacagtcaattggggacatccaggtgttaaatgggtattttgttcattacttcgcaccaaaagatcttccacctctgccaaagaacgtggtgtttgtgttagacagcagtgcctccatggttggcacgaagctgcgtcagacaaaagatgcgctgttcaccatattgcacgatctgcggcctcaggacaggttctcaattattggtttttcaaatcgtattaaggtttggaaggatcatctgatttcggtgacacctgattctatccgcgatggaaaggtgtatattcaccatatgtcgcctacgggcggaaccgacattaatggtgccctccagagggccattagactgctcaacaagtacgtcgcccattctgggatcggagatcgctctgtgagtctgattgtctttctgactgatgggaagcccactgttggggaaacccatacacttaaaattctgaataacaccagagaggcggcacgcggacaggtctgcattttcactattggaataggaaatgacgtggattttcgccttcttgaaaaactgtctcttgagaactgcggcttaactaggcgcgtccacgaggaagaggatgctggctctcagttaatcggcttttacgacgagattcggacacccctcttaagtgacattcgtattgactacccaccttcaagtgttgtacaggcaactaagacccttttcccaaactacttcaatggatccgagatcattattgctggcaagcttgtggatcggaagctcgatcacctccacgtcgaggtcacggcttcgaattcgaaaaaatttatcatcttaaaaacagacgtgcccgtgagaccccagaaggctggtaaggacgtgacgggaagtcctagaccaggcggagacggagaaggggatacgaatcatattgagcggctatggtcctatttgacaaccaaagaactgctgtcatcttggctgcagagcgacgatgagcccgagaaggagcggctgcgacagagagcccaagccttagctgtatcctatcggttcctcacaccttttactagtatgaagttgaggggtccagttcccaggatggatggcttagaggaggctcacgggatgtccgctgccatgggcccagagcctgtcgtgcagtcggtaagaggcgctgggactcagcccggaccactgctgaaaaagccataccagcccagaatcaaaatatcgaagaccagcgtggatggtgacccccactttgtggtggatttcccactttcacgcctgaccgtctgttttaacattgacgggcagcccggagatatcttaaggctagtgagtgatcatcgtgactccggtgtcactgtcaacggggagctcattggcgcacccgcaccaccaaacggtcacaaaaagcagaggacatatctccgaaccataacaatacttataaataaacccgagcgttcatatctggagatcaccccctcccgggtaatcctggatggcggtgatagattagtcttaccttgcaaccaatcagtggttgtaggaagctggggtcttgaagtgagtgtgagcgctaacgccaacgtaaccgtgacgatccagggctcaattgccttcgttatactgatccatctgtataaaaagccagccccttttcagaggcatcaccttgggttctacatcgccaattctgaaggtctttccagcaactgtcatggactgttagggcaatttctgaatcaggacgcgcgtctgacggaagaccccgctggcccttcccagaatctgactcatcccctgttgctgcaagtaggcgaggggccagaagcagtgcttacagtgaaggggcaccaggtcccagtggtttggaaacaaaggaagatctacaacggagaagagcagatagattgttggttcgccaggaacaacgccgctaaattaattgatggggaatataaggattacctggcctttcaccccttcgatactggcatgttaggtcgagggatgagcagggagttatag

SEQ ID NO: 219205 - DNA, 2871 bp, Artificial Sequence
  derived and/or modified sequence
atgctgctgctgctgggcctgtgcctgggcctgagcctgtgcgtgggcagccaggaggaggcccagagctggggccacagcagcgagcaggacggcctgagagtgcccagacaggtgagactgctgcagagactgaagaccaagcccctgatgaccgagttcagcgtgaagagcaccatcatcagcagatacgccttcaccaccgtgagctgcagaatgctgaacagagccagcgaggaccaggacatcgagttccagatgcagatccccgccgccgccttcatcaccaacttcaccatgctgatcggcgacaaggtgtaccagggcgagatcaccgagagagagaagaagagcggcgacagagtgaaggagaagagaaacaagaccaccgaggagaacggcgagaagggcaccgagatcttcagagccagcgccgtgatccccagcaaggacaaggccgccttcttcctgagctacgaggagctgctgcagagaagactgggcaagtacgagcacagcatcagcgtgagaccccagcagctgagcggcagactgagcgtggacgtgaacatcctggagagcgccggcatcgccagcctggaggtgctgcccctgcacaacagcagacagagaggcagcggcagaggcgaggacgacagcggccccccccccagcaccgtgatcaaccagaacgagaccttcgccaacatcatcttcaagcccaccgtggtgcagcaggccagaatcgcccagaacggcatcctgggcgacttcatcatcagatacgacgtgaacagagagcagagcatcggcgacatccaggtgctgaacggctacttcgtgcactacttcgcccccaaggacctgccccccctgcccaagaacgtggtgttcgtgctggacagcagcgccagcatggtgggcaccaagctgagacagaccaaggacgccctgttcaccatcctgcacgacctgagaccccaggacagattcagcatcatcggcttcagcaacagaatcaaggtgtggaaggaccacctgatcagcgtgacccccgacagcatcagagacggcaaggtgtacatccaccacatgagccccaccggcggcaccgacatcaacggcgccctgcagagagccatcagactgctgaacaagtacgtggcccacagcggcatcggcgacagaagcgtgagcctgatcgtgttcctgaccgacggcaagcccaccgtgggcgagacccacaccctgaagatcctgaacaacaccagagaggccgccagaggccaggtgtgcatcttcaccatcggcatcggcaacgacgtggacttcagactgctggagaagctgagcctggagaactgcggcctgaccagaagagtgcacgaggaggaggacgccggcagccagctgatcggcttctacgacgagatcagaacccccctgctgagcgacatcagaatcgactacccccccagcagcgtggtgcaggccaccaagaccctgttccccaactacttcaacggcagcgagatcatcatcgccggcaagctggtggacagaaagctggaccacctgcacgtggaggtgaccgccagcaacagcaagaagttcatcatcctgaagaccgacgtgcccgtgagaccccagaaggccggcaaggacgtgaccggcagccccagacccggcggcgacggcgagggcgacaccaaccacatcgagagactgtggagctacctgaccaccaaggagctgctgagcagctggctgcagagcgacgacgagcccgagaaggagagactgagacagagagcccaggccctggccgtgagctacagattcctgacccccttcaccagcatgaagctgagaggccccgtgcccagaatggacggcctggaggaggcccacggcatgagcgccgccatgggccccgagcccgtggtgcagagcgtgagaggcgccggcacccagcccggccccctgctgaagaagccctaccagcccagaatcaagatcagcaagaccagcgtggacggcgacccccacttcgtggtggacttccccctgagcagactgaccgtgtgcttcaacatcgacggccagcccggcgacatcctgagactggtgagcgaccacagagacagcggcgtgaccgtgaacggcgagctgatcggcgcccccgccccccccaacggccacaagaagcagagaacctacctgagaaccatcaccatcctgatcaacaagcccgagagaagctacctggagatcacccccagcagagtgatcctggacggcggcgacagactggtgctgccctgcaaccagagcgtggtggtgggcagctggggcctggaggtgagcgtgagcgccaacgccaacgtgaccgtgaccatccagggcagcatcgccttcgtgatcctgatccacctgtacaagaagcccgcccccttccagagacaccacctgggcttctacatcgccaacagcgagggcctgagcagcaactgccacggcctgctgggccagttcctgaaccaggacgccagactgaccgaggaccccgccggccccagccagaacctgacccaccccctgctgctgcaggtgggcgagggccccgaggccgtgctgaccgtgaagggccaccaggtgcccgtggtgtggaagcagagaaagatctacaacggcgaggagcagatcgactgctggttcgccagaaacaacgccgccaagctgatcgacggcgagtacaaggactacctggccttccaccccttcgacaccggcatggacacctggcccggcaacgtgcagggcgccctgaagctggccgccctgaagatgcaggtgcacgagggccagtag

SEQ ID NO: 219206 - DNA, 2172 bp, Artificial Sequence
  derived and/or modified sequence
gacagcggccccccccccagcaccgtgatcaaccagaacgagaccttcgccaacatcatcttcaagcccaccgtggtgcagcaggccagaatcgcccagaacggcatcctgggcgacttcatcatcagatacgacgtgaacagagagcagagcatcggcgacatccaggtgctgaacggctacttcgtgcactacttcgcccccaaggacctgccccccctgcccaagaacgtggtgttcgtgctggacagcagcgccagcatggtgggcaccaagctgagacagaccaaggacgccctgttcaccatcctgcacgacctgagaccccaggacagattcagcatcatcggcttcagcaacagaatcaaggtgtggaaggaccacctgatcagcgtgacccccgacagcatcagagacggcaaggtgtacatccaccacatgagccccaccggcggcaccgacatcaacggcgccctgcagagagccatcagactgctgaacaagtacgtggcccacagcggcatcggcgacagaagcgtgagcctgatcgtgttcctgaccgacggcaagcccaccgtgggcgagacccacaccctgaagatcctgaacaacaccagagaggccgccagaggccaggtgtgcatcttcaccatcggcatcggcaacgacgtggacttcagactgctggagaagctgagcctggagaactgcggcctgaccagaagagtgcacgaggaggaggacgccggcagccagctgatcggcttctacgacgagatcagaacccccctgctgagcgacatcagaatcgactacccccccagcagcgtggtgcaggccaccaagaccctgttccccaactacttcaacggcagcgagatcatcatcgccggcaagctggtggacagaaagctggaccacctgcacgtggaggtgaccgccagcaacagcaagaagttcatcatcctgaagaccgacgtgcccgtgagaccccagaaggccggcaaggacgtgaccggcagccccagacccggcggcgacggcgagggcgacaccaaccacatcgagagactgtggagctacctgaccaccaaggagctgctgagcagctggctgcagagcgacgacgagcccgagaaggagagactgagacagagagcccaggccctggccgtgagctacagattcctgacccccttcaccagcatgaagctgagaggccccgtgcccagaatggacggcctggaggaggcccacggcatgagcgccgccatgggccccgagcccgtggtgcagagcgtgagaggcgccggcacccagcccggccccctgctgaagaagccctaccagcccagaatcaagatcagcaagaccagcgtggacggcgacccccacttcgtggtggacttccccctgagcagactgaccgtgtgcttcaacatcgacggccagcccggcgacatcctgagactggtgagcgaccacagagacagcggcgtgaccgtgaacggcgagctgatcggcgcccccgccccccccaacggccacaagaagcagagaacctacctgagaaccatcaccatcctgatcaacaagcccgagagaagctacctggagatcacccccagcagagtgatcctggacggcggcgacagactggtgctgccctgcaaccagagcgtggtggtgggcagctggggcctggaggtgagcgtgagcgccaacgccaacgtgaccgtgaccatccagggcagcatcgccttcgtgatcctgatccacctgtacaagaagcccgcccccttccagagacaccacctgggcttctacatcgccaacagcgagggcctgagcagcaactgccacggcctgctgggccagttcctgaaccaggacgccagactgaccgaggaccccgccggccccagccagaacctgacccaccccctgctgctgcaggtgggcgagggccccgaggccgtgctgaccgtgaagggccaccaggtgcccgtggtgtggaagcagagaaagatctacaacggcgaggagcagatcgactgctggttcgccagaaacaacgccgccaagctgatcgacggcgagtacaaggactacctggccttccaccccttcgacaccggcatgctgggcagaggcatgagcagagagctgtag

SEQ ID NO: 219207 - protein, 221 aa, Artificial Sequence
  derived and/or modified sequence
MALALAALAAVEPACGSRYQQLQNEEESGEPEQAAGDAPPPYSSISAESAAYFDYKDESGFPKPPSYNVATTLPSYDEAERTKAEATIPLVPGRDEDFVGRDDFDDADQLRIGNDGIFMLTFFMAFLFNWIGFFLSFCLTTSAAGRYGAISGFGLSLIKWILIVRFSTYFPGYFDGQYWLWWVFLVLGFLLFLRGFINYAKVRKMPETFSNLPRTRVLFIY

SEQ ID NO: 219208 - protein, 153 aa, Artificial Sequence
  derived and/or modified sequence
MALALAALAAVEPACGSRYQQLQNEEESGEPEQAAGDAPPPYSSISAESAAYFDYKDESGFPKPPSYNVATTLPSCFYDISHLIFFIFYLRNMKKKYTKMVKLLHKSAPAQSDSCKCPFICCVCISRISIGSRSGYQYIMHRSVGCLKAKQEN

SEQ ID NO: 219209 - DNA, 666 bp, Artificial Sequence
  derived and/or modified sequence
atggctctcgcacttgccgctctggccgccgtagagccagcctgtggcagcaggtaccagcagctgcagaatgaggaagagtcaggcgagcccgaacaagctgccggcgacgctccacctccctactcgagcataagcgctgagtcagctgcatacttcgactataaggatgaaagcggttttccaaagccacccagctacaatgtcgcaactactctgccttcctacgatgaggccgaaaggactaaagccgaggccaccattccattagtcccaggacgggatgaagattttgttgggcgcgatgatttcgatgacgctgaccagctcagaatcgggaacgatggtatcttcatgctgacattcttcatggcattcctgttcaattggattggattcttcctctccttctgcctgacaacttcagccgccgggcgctacggagccattagtggatttggcctgagtctgatcaagtggatactgatcgtgcgctttagcacgtactttccagggtattttgacggtcaatattggctgtggtgggtctttctggtactgggcttcctgctgttcctgcggggcttcataaattatgcaaaggtgcgtaagatgcccgagacattctccaatttacccaggactcgagtgctgtttatatactag

SEQ ID NO: 219210 - DNA, 462 bp, Artificial Sequence
  derived and/or modified sequence
atggcacttgccctcgccgccctggctgcggttgagccagcttgcggctctcggtatcagcagcttcagaatgaagaagaatcaggtgaacctgagcaagcagccggcgacgcccctcctccttacagctctataagcgcagaatcagctgcctactttgattataaagacgagagcggctttcctaagcccccatcatacaacgttgctactacactgccttcttgcttttatgatataagtcacctcatctttttcatcttctatcttcgcaacatgaagaagaaatacacgaagatggtaaagcttttgcacaagtcggcaccagcccagtccgacagttgtaaatgccccttcatttgttgcgtgtgtataagcaggatcagtataggctccagatcgggataccagtatatcatgcatcgctcagtgggctgtctaaaggccaagcaggagaattag

SEQ ID NO: 219211 - DNA, 666 bp, Artificial Sequence
  derived and/or modified sequence
atggccctggccctggccgccctggccgctgtggagcccgcctgtggcagccgctaccagcagctgcagaatgaggaggagagcggggagcctgagcaggccgctggagatgcccccccaccctacagcagcatctctgctgagagcgctgcctactttgactacaaggatgaaagtggcttccccaagccacccagctacaacgtggccaccaccctgcccagctatgatgaagctgagaggaccaaggccgaggccaccatccccctggtgcccggcagagatgaggactttgtgggcagagatgactttgatgatgctgaccagctgagaattggaaatgatggcatcttcatgctgaccttcttcatggccttcctgttcaactggattggcttcttcctgtccttctgcctgaccaccagcgctgctggccgctatggagccatcagcggcttcggcctgagcctcatcaagtggatcctgattgtgcgcttcagcacctacttccctggctactttgatggccagtactggctgtggtgggtgttcctggtgctgggcttcctgctcttcctgcggggcttcatcaactatgccaaggtgaggaagatgcctgagaccttcagcaacctgcccaggaccagggtgctcttcatctactag

SEQ ID NO: 219212 - DNA, 462 bp, Artificial Sequence
  derived and/or modified sequence
atggccctggccctggccgccctggccgctgtggagcccgcctgtggcagccgctaccagcagctgcagaatgaggaggagagcggggagcctgagcaggccgctggagatgcccccccaccctacagcagcatctctgctgagagcgctgcctactttgactacaaggatgaaagtggcttccccaagccacccagctacaacgtggccaccaccctgcccagctgcttctatgacatcagccacctgatcttcttcatcttctacctgaggaacatgaagaagaagtacaccaagatggtgaagctgctgcacaagagcgccccagcccagagcgacagctgcaagtgccccttcatctgctgcgtgtgcatcagccgcatcagcatcggcagccgcagcggctaccagtacatcatgcacaggtctgtgggctgcctgaaggccaagcaggagaactag

SEQ ID NO: 219213 - DNA, 666 bp, Artificial Sequence
  derived and/or modified sequence
atggccctggccctggccgccctggccgccgtggagcccgcctgcggaagccgctaccaacagctgcaaaacgaggaagagtccggggagcccgagcaggcagccggtgatgcaccacctccctacagctctatatccgcggagagcgccgcctattttgattataaggacgaatccggatttccaaagccgccctcatataacgtagccaccaccctgccttcctacgatgaagccgaacggacaaaggccgaggcaaccatccccctggtgcccggaagagacgaggactttgtgggcagagacgactttgatgatgccgatcaactgcggattggtaacgatggaattttcatgttgacattcttcatggccttcctctttaactggatcggttttttcctgtctttttgtctcaccacctctgcagccggaaggtacggcgccatttctggcttcggtctctccctgataaaatggatactaattgtgcgcttctcgacttacttccccgggtacttcgacgggcaatactggctttggtgggtctttctggtgttgggctttctgctttttctgaggggatttatcaactacgccaaggtgaggaaaatgcctgaaacattcagcaacctgcccagaacgcgcgtgttattcatctactag

SEQ ID NO: 219214 - DNA, 462 bp, Artificial Sequence
  derived and/or modified sequence
atggccctggccctggccgccctggccgccgtggagcccgcctgcggctctagatatcagcaactacaaaatgaggaggaaagtggtgaacccgaacaggctgcgggagatgcacctcccccctactcctctattagcgccgagtccgcagcctactttgattacaaagatgaatccggcttccctaaaccaccttcctataatgtggcgaccaccctccctagctgcttttatgacatttcccacttaatcttcttcatattttacctgaggaatatgaagaagaaatacactaagatggttaagctcttacataaatctgccccagctcagtccgacagttgtaaatgcccgtttatttgttgcgtttgcatctcgcgtatttcaataggctccagatctggttaccagtacattatgcacagaagcgtgggatgccttaaagccaaacaggagaactag

SEQ ID NO: 219215 - DNA, 3851 bp, Artificial Sequence
  derived and/or modified sequence
gggcacgtaggtgaagctcagtgcttggcacgaggtgctcatcagcagcatcgcccttgctttgggctggcctgttagtaattcgtttttagtggaatcgaatacaacacttgagcctcggaggctcaggtcgtcggagcaactacaccagggccggtgcacctcggggcggcggcgcaggactaggctaggccgggccgggccgggcagggcggcgcgagtcgggggtggggcggcggcgcagcgccgtcgtcgtagtccccgcctcttccccaggggccgcgtcggagcctcggcggcggcggcggtgcttacagcctgagaagagcgtctcgcccgggagcggcggcggccatcgagacccacccaaggcgcgtccccctcggcctcccagcgctcccaagccgcagcggccgcgccccttcagctagctcgctcgctcgctctgcttccctgctgccggctgcgccatggcgttggcgttggcggcgctggcggcggtcgagccggcctgcggcagccggtaccagcagttgcagaatgaagaagagtctggagaacctgaacaggctgcaggtgatgctcctccaccttacagcagcatttctgcagagagcgcagcatattttgactacaaggatgagtctgggtttccaaagcccccatcttacaatgtagctacaacactgcccagttatgatgaagcggagaggaccaaggctgaagctactatccctttggttcctgggagagatgaggattttgtgggtcgggatgattttgatgatgctgaccagctgaggataggaaatgatgggattttcatgttaacttttttcatggcattcctctttaactggattgggtttttcctgtctttttgcctgaccacttcagctgcaggaaggtatggggccatttcaggatttggtctctctctaattaaatggatcctgattgtcaggttttccacctatttccctggatattttgatggtcagtactggctctggtgggtgttccttgttttaggctttctcctgtttctcagaggatttatcaattatgcaaaagttcggaagatgccagaaactttctcaaatctccccaggaccagagttctctttatttattaaagatgttttctggcaaaggccttcctgcatttatgaattctctctcaagaagcaagagaacacctgcaggaagtgaatcaagatgcagaacacagaggaataatcacctgctttaaaaaaataaagtactgttgaaaagatcatttctctctatttgttcctaggtgtaaaattttaatagttaatgcagaattctgtaatcattgaatcattagtggttaatgtttgaaaaagctcttgcaatcaagtctgtgatgtattaataatgccttatatattgtttgtagtcattttaagtagcatgagccatgtccctgtagtcggtagggggcagtcttgctttattcatcctccatctcaaaatgaacttggaattaaatattgtaagatatgtataatgctggccattttaaaggggttttctcaaaagttaaacttttgctatgactgtgtttttgcacataatccatatttgctgttcaagttaatctagaaatttattcaattctgtatgaacacctggaagcaaaatcatagtgcaaaaatacatttaaggtgtggtcaaaaataagtctttaattggtaaataataagcattaattttttatagcctgtattcacaattctgcggtaccttattgtacctaagggattctaaaggtgttgtcactgtataaaacagaaagcactaggatacaaatgaagcttaattactaaaatgtaattcttgacactctttctataattagcgttcttcacccccacccccacccccaccccccttattttccttttgtctcctggtgattaggccaaagtctgggagtaaggagaggattaggtacttaggagcaaagaaagaagtagcttggaacttttgagatgatccctaacatactgtactacttgcttttacaatgtgttagcagaaaccagtgggttataatgtagaatgatgtgctttctgcccaagtggtaattcatcttggtttgctatgttaaaactgtaaatacaacagaacattaataaatatctcttgtgtagcaccttttactgtagattagtgcttaatttcttggcttgcatttgttgattgctaaggcaattttttctaatcttagggaatcattcagtagatgcgattaaaaaactaatgttgggtcaatttttttcttcattttcagcacaagaagtcctcttatatcctactaaatacattcctaaaaatgtatttgaacattggttctgtaaaagataatggactaaaaaagtagagaggagttgtagagatcttaaatcattctggaattcctaattatgcttcaatttttagacataattttagataatttatttccagtgttttctgcatgttctcatttgttctttttctcagttgaatgcaccaactggtttgagtcctgtgagcattcagtcagttgaaattaaagattcctcatttctcctgatttctattcttgtctcaatcttaaatttagagaccagttgtttttatgatatcagccatttgatttttttcattttctatttaagaaatatgaagaaaaaatacaccaagatggtcaaattactacacaaatcagcaccagcacagtctgatagctgcaaatgtccattcatctgctgtgtatgtatatccagaatcagcataggaagtcgttcaggatatcagtatataatgcacagaagtgtgggttgtttgaaagccaaacaggaaaattaggagcctcctggattgacatttcaatgatccctctaaccagtttatggattattatgaataatagtgtagtgtgttctttttcagaagttatatttgataatagagaagggagttttatggaagtttctttgaagatttttttttttccatttcgaatcagattatagcaacaatggagtttggaagtttgtatggcctataatgttctaagttccagaatgaaaagatctgtaacaatctgaatagatgtggacacatatagcagagagaactatgtaaattatcttgcagaacaaaatagaagggtcctaaatcacgttaactcaaacattgtagactagctttgtgtttattcttcaggtccttgcgccttatttggttttgtatattcaacgaactgaaatatttggaattcctatttctacgtatttggtggtccataagactttgtcaaatgtaaacctacagtttgatacgctttaaaatacctagttaagaggatgatttctctttaatcgtttaaatgttctgaaaattaaaatcttttgaggcacatgaagtgggcaccatatatcatctagagtccttactggtattcaggatgaaaatgttcacgctgcattaattgtcatttttctctcccatgttctttctcactttgatacgttaatactgataatggataaagagtgagtttttataataaatggttttggaaaggtattcataggaaccgcggttatttacttaaggttatggagtaaactagcttggaccttgggctgcaggacgactaggattcacccataacgacacagtgccctatgtttcttaacttcttgttgccatttgaaactctgtactcttatgtttaaagggttctgtatagccattttttttttcagaaagttacattgctttgtatagaaataaaaggcattattaaaatttgcttgttaaaaaatgataa

SEQ ID NO: 219216 - DNA, 625 bp, Artificial Sequence
  derived and/or modified sequence
gtgcttacagcctgagaagagcgtctcgcccgggagcggcggcggccatcgagacccacccaaggcgcgtccccctcggcctcccagcgctcccaagccgcagcggccgcgccccttcagctagctcgctcgctcgctctgcttccctgctgccggctgcgccatggcgttggcgttggcggcgctggcggcggtcgagccggcctgcggcagccggtaccagcagttgcagaatgaagaagagtctggagaacctgaacaggctgcaggtgatgctcctccaccttacagcagcatttctgcagagagcgcagcatattttgactacaaggatgagtctgggtttccaaagcccccatcttacaatgtagctacaacactgcccagttgtttttatgatatcagccatttgatttttttcattttctatttaagaaatatgaagaaaaaatacaccaagatggtcaaattactacacaaatcagcaccagcacagtctgatagctgcaaatgtccattcatctgctgtgtatgtatatccagaatcagcataggaagtcgttcaggatatcagtatataatgcacagaagtgtgggttgtttgaaagccaaacaggaaaattag

SEQ ID NO: 219217 - DNA, 666 bp, Artificial Sequence
  derived and/or modified sequence
atggctttggccctagccgctctggcagctgtggagcctgcctgcggatcaagatatcaacagcttcaaaatgaggaagagtctggcgagccagaacaggctgccggtgatgctccgcctccgtactcgagtatcagtgccgagagtgctgcatattttgattataaggacgagagcggatttccaaagcctcccagttacaacgtggccacaactctgccctcatatgatgaagccgagcggactaaggccgaggccacgatccctctggtccctggacgggacgaagatttcgtaggcagagacgactttgacgacgcggaccagttacgtatcggaaacgacggtatctttatgctgaccttttttatggcttttctgtttaactggattggattcttcctgtctttttgcttgacaacttccgctgccggaagatacggcgctattagcggctttggcctttcattgatcaagtggattttaattgtgaggttctcgacctacttcccaggatactttgacggccagtactggctatggtgggtcttcctggtcctgggttttctgctctttctcaggggtttcatcaattacgcgaaggtgaggaagatgcccgagacattttcaaacctgccacggacccgagtactgtttatatactag

SEQ ID NO: 219218 - DNA, 462 bp, Artificial Sequence
  derived and/or modified sequence
atggccctggcccttgccgctctcgccgctgttgagccggcatgtggatccaggtatcagcagctgcagaacgaagaggaaagtggtgagcctgaacaagctgccggagacgcaccccctccctactcgagcatttccgccgagtcagcggcttactttgactacaaggacgagtcaggttttccaaagccaccaagttataacgtcgcaacaactctgccatcatgcttttacgacatatcacatctgatctttttcatcttctacctgagaaatatgaaaaaaaagtacaccaagatggtgaagctcctgcataagagcgcccctgcgcaatctgatagctgcaagtgtccatttatttgctgcgtctgtatcagccgcatatccatagggtcgagatccggctaccagtatatcatgcacaggagcgtggggtgcctgaaggccaagcaagaaaactag

SEQ ID NO: 219219 - DNA, 666 bp, Artificial Sequence
  derived and/or modified sequence
atggccctggccctggccgccctggccgccgtggagcccgcctgcggcagcagataccagcagctgcagaacgaggaggagagcggcgagcccgagcaggccgccggcgacgccccccccccctacagcagcatcagcgccgagagcgccgcctacttcgactacaaggacgagagcggcttccccaagccccccagctacaacgtggccaccaccctgcccagctacgacgaggccgagagaaccaaggccgaggccaccatccccctggtgcccggcagagacgaggacttcgtgggcagagacgacttcgacgacgccgaccagctgagaatcggcaacgacggcatcttcatgctgaccttcttcatggccttcctgttcaactggatcggcttcttcctgagcttctgcctgaccaccagcgccgccggcagatacggcgccatcagcggcttcggcctgagcctgatcaagtggatcctgatcgtgagattcagcacctacttccccggctacttcgacggccagtactggctgtggtgggtgttcctggtgctgggcttcctgctgttcctgagaggcttcatcaactacgccaaggtgagaaagatgcccgagaccttcagcaacctgcccagaaccagagtgctgttcatctactag

SEQ ID NO: 219220 - DNA, 462 bp, Artificial Sequence
  derived and/or modified sequence
atggccctggccctggccgccctggccgccgtggagcccgcctgcggcagcagataccagcagctgcagaacgaggaggagagcggcgagcccgagcaggccgccggcgacgccccccccccctacagcagcatcagcgccgagagcgccgcctacttcgactacaaggacgagagcggcttccccaagccccccagctacaacgtggccaccaccctgcccagctgcttctacgacatcagccacctgatcttcttcatcttctacctgagaaacatgaagaagaagtacaccaagatggtgaagctgctgcacaagagcgcccccgcccagagcgacagctgcaagtgccccttcatctgctgcgtgtgcatcagcagaatcagcatcggcagcagaagcggctaccagtacatcatgcacagaagcgtgggctgcctgaaggccaagcaggagaactag

SEQ ID NO: 219221 - protein, 127 aa, Artificial Sequence
  derived and/or modified sequence
MFQAAGAAQATPSHDAKGGGSSTVQRSKSFSLRAQVKETCAACQKTVYPMERLVADKLIFHNSCFCCKHCHTKLSLGSYAALHGEFYCKPHFQQLFKSKGNYDEGFGRKQHKELWAHKEVDPGTKTA

SEQ ID NO: 219222 - DNA, 384 bp, Artificial Sequence
  derived and/or modified sequence
atgttccaggccgccggcgccgcccaggccacccccagccacgacgccaagggcggcggcagcagcaccgtgcagagaagcaagagcttcagcctgagagcccaggtgaaggagacctgcgccgcctgccagaagaccgtgtaccccatggagagactggtggccgacaagctgatcttccacaacagctgcttctgctgcaagcactgccacaccaagctgagcctgggcagctacgccgccctgcacggcgagttctactgcaagccccacttccagcagctgttcaagagcaagggcaactacgacgagggcttcggcagaaagcagcacaaggagctgtgggcccacaaggaggtggaccccggcaccaagaccgcctag

SEQ ID NO: 219223 - DNA, 384 bp, Artificial Sequence
  derived and/or modified sequence
atgtttcaagcagctggcgctgcacaggctacccctagccatgacgcaaagggcggcggctcctccacagtccagcgctccaaaagtttttccttacgcgcgcaggtgaaggagacatgtgccgcatgccagaagaccgtctatcctatggagagactggtagccgataagctcatctttcataactcttgcttctgttgtaagcactgccacactaagctgagcttaggatcttacgccgccttacatggcgaattctactgcaagccgcacttccagcaactgtttaaatcaaagggaaactatgatgaagggttcgggaggaaacagcacaaggaactctgggcacataaggaggtggatcctggtacaaagactgcctag

SEQ ID NO: 219224 - DNA, 384 bp, Artificial Sequence
  derived and/or modified sequence
atgttccaggccgccggggccgcccaggccacccccagccatgatgccaagggcggcggcagcagcacagtgcagaggagcaagagcttcagcctgcgggcccaggtgaaggagacctgtgccgcctgccagaagacagtgtaccccatggagcggctggtggccgacaagctgatcttccacaacagctgcttctgctgcaagcactgccacaccaagctgagcctgggcagctatgctgccctgcatggagagttctactgcaagccccacttccagcagctgttcaagagcaaaggaaattatgatgagggcttcggcaggaagcagcacaaggagctgtgggcccacaaggaggtggaccccggcaccaagacagcctag

SEQ ID NO: 219225 - DNA, 3224 bp, Artificial Sequence
  derived and/or modified sequence
agcgataaggcggtggcggcggcggtggctcggggaccactggtagcggcagcagctcgcgcccgcgccctcctcgtacccgtgcgcccccggagaccgatcccgccccgcggcccaggccgggcctgaacccagcgggtgccgcttctccacccgaggcttccacctccaacgagccatgttccaggctgcaggagccgcccaggccaccccctctcatgacgccaaaggcggcggcagcagcacggtgcagcgctccaagtccttcagcctgcgggcccaggtgaaggagacctgcgccgcctgccagaagaccgtgtaccccatggagcggctggtggccgacaagctcattttccacaactcttgcttctgctgcaagcactgtcacaccaagctcagcctgggcagctacgccgcgctgcacggggagttctactgcaaaccccacttccagcagctgtttaagagcaaaggcaactacgacgaggggtttggccgcaagcagcacaaggagctctgggcccacaaggaggtggaccccggcaccaagacggcctgaggcctctgtaaccttccaccccctctgcggaaggcctggagccggcagggggaaggtgggaaggaggtcgagctgggcttgcgtgggggccaggtgggaaggggatgaggcttgctcaggcgtaggggaccagggcagggctctgctccaggactccttccttcttccttctcccgcagccggtgagggtttggaaaccaggattggggtctgcccaccaccctgcttcctgcttcgttcagcctccctccccacctcaccccaggaccccctgggaggcccccaagcccagctcccctatctaggtgccttttctccagcaaggagtcagcatgcccccctcagggtcccaagctccctcactgccaccggagactgtgtggcccccacgtctccccatctacctctacccttaacctgtttctgagccacggagacagggaggaaggagcgcgacagtgccacctgttgggcatcataaatgcccctgcagcccatgggggaggagatggggaagtggagccaccctgcctctgcagggcaaggcagggcctgccccagtggggcttgggaccatctcgaaccaccagcgtggagaagcagaagcaaaagcactcgccaggctgcagcctcaggcactggcaggggctggtgcggccccactcccctcccccgctcccatttgtgcccatcctgttgtgaccaaccccgttttaaacatgtttcaatagatccagattctctattgtgtggcctgctgggggatctgtcacaggaagggtgcagactcaccatggggcgggcatggggggacagggccagccccgactacctcggccctgatgggggcagggagctagaagtgggtgtcagttccctgacacaccattgagaaatgggagggctcctcttcacagcgagggcttcatgctgtcacacccacagtggttttggaactgaaactccacctcacccctcagttctgggttggttcagacccaccaacttaccatatgcaccccattgtgaagaggcctgagagcgggagggccaggctgccagtgggtgatggcgcctgtcctcgctgcacttcagtgcctggggtgcaagctgccgcgttccctggctggttccagctgtctagctccctcccttcttcccagccctttgacctggaagtaagttagcgaagaatggcggtaaccagcagacccagcaagtgctgcccaaggttttagtgacccctggattgtcccccctcatcattacccctcgctgctgtcatcatccccttgccttttcaagctctgcggaggtgcagtcacagctactgtctcaggaaatccaaagagaaactacctctgcttctctgaaaacccagggacaatgagggatgagttcacagcagagcaaaccaggcaagttgggaggacctgagggcgccccggtgggacacaggcagaagtctgggttgtcctgctccagattcaacttcctgatgtctccagacatgggatcgatgagaacagagactcctggagggtttgctgccaccacaccatacaactgcctgagttcctaagtggcctccccgtggaacagggcagggagctgggccacaggctccagtgtcacataagtcactatgctgaggcaggcactgctcctcgagggagcagagcgaatactcagcagagatggtgccccggcctggatcctcccaagtgtgaagtgagcgcctcagagcctctcagggcaggccaacttcctgcaccagaggtctcagatggcaaggatcatcttggttcggttaagcaacagtagcagatgaccacaagggggtactggagaggtggctcttggagacacctgacccctgccctgcaaagatgggactgaaggaagtcctctgggccaggaagaccctaccaaatatcatgaaagctccgggaactcagccactggtgacgttcaggttgtgagggccagcagtgccaccctggtaaatcagccctgttgggaccaccccagtggagctcctggaggggcaactggaggaaaggggcagacacctctggactgacaatggtatcagccagatcaccccaggacccctctacttggagtcaagttctcttctgcttgaaaggcccaggctcgttgccaggcaccatacctggcccctgctaagcaaaaacctacctccaccccccacaactgaaagcactgccacaggacccctctgatataaatgatcccttttattgtaagtaatgcgcaacactggcctggctttgcactgcaagccctcggtcaagatatagtcaaataactatggctgcaggttccacagttccacaataaccatggctgcacgatccacaattcagacacagacatagagctggggtgggtggaaggggcaggagggtggcagagtgcggactgtccccagccctggcctctccatgcagagttggcccaggcagacacaccccatggaatgatgagaaagtgacggcacggccccttcccacagcaagcctggggctgccaggaactgcccttcagaacctttgggcccaggtcaccctgaagccccacaactttttatctggattagttattaaaaaacaataaattaagcaacaacttggtcctg

SEQ ID NO: 219226 - DNA, 384 bp, Artificial Sequence
  derived and/or modified sequence
atgttccaggccgccggcgccgcccaggccacccccagccacgacgcaaaggggggtggctcatccactgtccagcggtccaaatcattctccttacgggcacaggtgaaggagacatgtgcagcctgtcagaagaccgtgtatcctatggagagattggtggcggacaagctcattttccataattcctgtttctgttgcaagcactgtcacactaagctgtccctggggtcttacgcagccttacatggcgaattctactgtaagcctcatttccagcagctgttcaaatctaaaggcaactatgatgagggcttcggcagaaagcaacacaaagagctctgggcacacaaagaggtggacccaggcactaaaacggcctag

SEQ ID NO: 219227 - DNA, 384 bp, Artificial Sequence
  derived and/or modified sequence
atgttccaagccgcaggcgctgcccaggcaactccttctcatgatgctaagggcggtggtagttccaccgttcaaaggtcaaagtccttctcgctgcgtgcgcaagtgaaggaaacatgtgccgcatgtcagaagacagtgtaccctatggaaaggctcgtagctgataaattaatcttccataattcttgcttttgctgcaagcattgccatacgaagctgtccctcggctcttatgccgctctccatggagagttttactgcaaaccacactttcagcagctgttcaaaagtaagggcaattacgacgaaggcttcggccgtaaacagcataaggagctctgggcccacaaagaagtcgaccccggaaccaagaccgcatag

SEQ ID NO: 219228 - protein, 175 aa, Artificial Sequence
  derived and/or modified sequence
MAEVHVIGQIIGASGFSESSLFCKWGIHTGAAWKLLSGVREGQTQVDTPQIGDMAYWSHPIDLHFATKGLQGWPRLHFQVWSQDSFGRCQLAGYGFCHVPSSPGTHQLACPTWRPLGSWREQLARAFVGGGPQLLHGDTIYSGADRYRLHTAAGGTVHLEIGLLLRNFDRYGVEC

SEQ ID NO: 219229 - DNA, 528 bp, Artificial Sequence
  derived and/or modified sequence
atggcagaggttcacgtgatcggccaaatcataggggcgtctggcttttccgagagctcattgttttgcaaatggggtatccatacgggggcagcctggaaactactctccggagtgagggaaggccagacgcaggtcgacaccccccagattggagatatggcctactggtctcaccctatcgacctccatttcgctacaaagggattgcagggctggccaagactccactttcaggtatggagccaggactcttttggccgctgtcaactcgccgggtacgggttttgtcacgtcccatcgtctcctggaactcaccagctggcctgtcctacctggaggcccttggggagttggcgggaacagctggccagagccttcgttggaggcggacctcagttgctgcatggggacactatctattctggcgcggaccgctacaggttacataccgcagcgggcggtacagtgcatctggaaatcgggctactgctgcgtaacttcgatcgatatggggttgagtgctag

SEQ ID NO: 219230 - DNA, 528 bp, Artificial Sequence
  derived and/or modified sequence
atggccgaggtgcacgtgattggccagatcattggagccagcggcttcagcgagagcagcctcttctgcaagtggggcatccacactggagctgcctggaagctgctgtctggagtgcgggagggccagacccaggtggacaccccccagattggagacatggcctactggagccaccccatcgacctgcactttgccaccaagggcctgcagggctggccccggctgcacttccaggtgtggagccaggacagctttggccgctgccagctggccggctacggcttctgccacgtgcccagcagccctggcacccaccagctggcctgccccacctggaggcccctgggctcctggagggagcagctggcccgggcctttgtgggcggcggcccccagctgctgcacggggacaccatctacagcggggctgaccgctaccgcctgcacacagctgctgggggcaccgtgcacctggagatcggcctgctgctgaggaactttgacagatatggagtggagtgctag

SEQ ID NO: 219231 - DNA, 528 bp, Artificial Sequence
  derived and/or modified sequence
atggccgaggtgcacgtgatcggccagatcatcggcgccagcggcttctcagaaagttccttgttctgtaagtggggaatccataccggtgccgcttggaaactgttatcaggcgttagggaggggcagactcaagttgatactccccagattggcgatatggcttactggtcacatcctattgacctccacttcgcaacaaaaggattacaaggctggccgagactccattttcaggtatggtcccaggatagctttgggagatgccagcttgcgggttacggattttgtcatgttccctcctccccaggcacgcaccaacttgcatgccccacatggcgtcctttaggcagctggcgcgagcagcttgctagggcattcgtaggaggtgggccacagcttctacatggcgacactatttactctggagcggaccggtatagattgcataccgccgcgggggggacggttcaccttgagataggtctactcctgcgcaactttgaccgatatggtgtcgaatgttag

SEQ ID NO: 219232 - DNA, 528 bp, Artificial Sequence
  derived and/or modified sequence
atggcagaagttcacgtaatcgggcaaattattggagctagcggcttcagtgaaagttcactgttctgcaaatgggggatccacaccggggctgcttggaaattactgtccggcgtgagagaaggacagacgcaagtggatactccgcagatcggggacatggcctactggagccatccaattgacctccacttcgccaccaaaggtcttcagggttggcccagattgcattttcaagtctggagccaggattcttttggacgatgccagttggccggatacggtttttgtcacgtcccttcaagccccggtactcatcagctggcgtgtcccacctggcgccctttgggttcctggagggagcagcttgcccgagcctttgtgggaggtgggccacagttgttgcacggcgatacgatctacagcggagccgatcgataccgtctgcacacggcagccggagggaccgtccatcttgagatcggcctgctgttgcgaaactttgaccgatatggagtggaatgttag

SEQ ID NO: 219233 - DNA, 1031 bp, Artificial Sequence
  derived and/or modified sequence
aggggaggagcctgctgttgccccagcaacaaccacggaaaccaagacgagcgcggtcgcggaagtatcgcggcttacatatctcgcagccaggcgggtcctgggagaggcgcgagccaggcctggtcggcgcccgcggagaaaagaagcagtcaagcccatgaactacaaccccggttgccgctttctcctctcctaaccgttaagtgcgctaagggccatggctgaggtgcacgtgatcgggcagatcataggggccagcggtttctcggaaagtagcctcttctgcaagtggggcattcacacaggggcggcatggaagctcctgtcaggcgtgcgggagggccaaacgcaagtggacaccccgcagataggggacatggcttactggtcccaccccatcgacctgcacttcgccaccaaaggtcttcaaggctggccccggctccatttccaggtgtggtcccaggacagctttggccgctgccagcttgcaggctatggattttgccatgtgcccagtagcccgggcacccaccagctggcctgccccacgtggcggcccctgggcagttggcgagaacagttggcacgggctttcgtgggtggtgggccgcagctgctgcatggggacaccatctacagtggggccgaccgctatcgcctgcacacagctgctggtggcaccgtgcacctggagatcggcctgctgctccgcaacttcgaccgctacggcgtggagtgctgagggactctgcctccaacgtcaccaccatccacaccccggacacccagtgatgggggaggatggcacagtggtcaagagcacagactctagagactgtcagagctgaccccagctaaggcatggcaccgcttctgtcctttctaggacctcggggtccctctgggcccagtttccctatctgtaaattggggacagtaaatgtatggggtcgcagggtgttgagtgacaggaggctgcttagccacatgggaggtgctcagtaaaggagagcaattcttacagg

SEQ ID NO: 219234 - DNA, 528 bp, Artificial Sequence
  derived and/or modified sequence
atggccgaggtgcacgtgatcggccagatcatcggcgccagcggcttcagcgagagcagcctgttctgcaagtggggcatccacaccggcgccgcctggaagctgctgagcggcgtgagagagggccagacccaggtggacaccccccagatcggcgacatggcctactggagccaccccatcgacctgcacttcgccaccaagggcctgcagggctggcccagactgcacttccaggtgtggagccaggacagcttcggcagatgccagctggccggctacggcttctgccacgtgcccagcagccccggcacccaccagctggcctgccccacctggagacccctgggcagctggagagagcagctggccagagccttcgtgggcggcggcccccagctgctgcacggcgacaccatctacagcggcgccgacagatacagactgcacaccgccgccggcggcaccgtgcacctggagatcggcctgctgctgagaaacttcgacagatacggcgtggagtgctag

SEQ ID NO: 219235 - protein, 150 aa, Artificial Sequence
  derived and/or modified sequence
MSGSMATAEASGSDGKGQEVETSVTYYRLEEVAKRNSLKELWLVIHGRVYDVTRFLNEHPGGEEVLLEQAGVDASESFEDVGHSSDAREMLKQYYIGDIHPSDLKPESGSKDPSKNDTCKSCWAYWILPIIGAVLLGFLYRYYTSESKSS

SEQ ID NO: 219236 - protein, 146 aa, Artificial Sequence
  derived and/or modified sequence
MATAEASGSDGKGQEVETSVTYYRLEEVAKRNSLKELWLVIHGRVYDVTRFLNEHPGGEEVLLEQAGVDASESFEDVGHSSDAREMLKQYYIGDIHPSDLKPESGSKDPSKNDTCKSCWAYWILPIIGAVLLGFLYRYYTSESKSS

SEQ ID NO: 219237 - DNA, 453 bp, Artificial Sequence
  derived and/or modified sequence
atgagtggcagtatggcgacagcagaggccagcgggtctgatggaaagggccaggaggtagagacatccgtcacatactatagactcgaagaagtcgccaagaggaacagcttgaaagagttgtggctggtgatccacggtagggtctatgacgtgaccaggttcctgaacgagcatcccggcggggaggaggttctcctcgagcaggctggagtcgacgcatcggagtcattcgaggatgtggggcactcttccgatgccagggaaatgctcaaacaatattatatcggtgacatccacccttccgatctcaaacccgagagcgggagtaaggacccgagtaagaatgacacctgtaagtcctgttgggcctactggatcctgcctatcatcggagctgttttgctgggcttcttataccggtattacaccagtgaatccaaatcgtcgtag

SEQ ID NO: 219238 - DNA, 441 bp, Artificial Sequence
  derived and/or modified sequence
atggctaccgcagaagctagtgggtcagacggaaaggggcaggaagtagagaccagcgtgacctattacagactggaagaagttgccaagcgcaattccctcaaggaactctggctcgttattcacgggagggtttacgacgtcacgagattcctcaacgagcaccccggcggagaagaggtcctgctggagcaagctggggtcgatgcatctgagtcgttcgaggatgtggggcattcatccgacgccagggaaatgctcaaacagtattacatcggtgacatccacccaagtgacctgaaacctgaatctggaagtaaagatccatccaaaaatgacacctgtaagtcatgctgggcttattggatcctgccaatcattggggcagtgctgctcggcttcttgtaccggtactatactagcgaaagcaagagcagctag

SEQ ID NO: 219239 - DNA, 453 bp, Artificial Sequence
  derived and/or modified sequence
atgagcggctccatggccacagctgaggccagcggcagtgatggcaagggccaggaggtggagacctctgtgacctactaccgcctggaggaggtggccaagaggaacagcctgaaggagctgtggctggtgatccacggccgggtgtatgatgtgacccgcttcctgaatgagcaccctggaggagaggaggtgctgctggagcaggccggcgtggatgccagcgagagctttgaagatgtgggccacagcagtgatgcccgggagatgctgaagcagtactacatcggggacatccaccccagcgacctgaagccagagagcggcagcaaggaccccagcaagaatgacacctgcaagagctgctgggcctactggatcctgcccatcattggagctgtgctgctgggcttcctgtaccgctactacaccagcgagagcaagagcagctag

SEQ ID NO: 219240 - DNA, 441 bp, Artificial Sequence
  derived and/or modified sequence
atggccacagctgaggccagcggcagtgatggcaagggccaggaggtggagacctctgtgacctactaccgcctggaggaggtggccaagaggaacagcctgaaggagctgtggctggtgatccacggccgggtgtatgatgtgacccgcttcctgaatgagcaccctggaggagaggaggtgctgctggagcaggccggcgtggatgccagcgagagctttgaagatgtgggccacagcagtgatgcccgggagatgctgaagcagtactacatcggggacatccaccccagcgacctgaagccagagagcggcagcaaggaccccagcaagaatgacacctgcaagagctgctgggcctactggatcctgcccatcattggagctgtgctgctgggcttcctgtaccgctactacaccagcgagagcaagagcagctag

SEQ ID NO: 219241 - DNA, 453 bp, Artificial Sequence
  derived and/or modified sequence
atgagcggcagcatggccaccgccgaggccagcggcagcgacggcaaagggcaggaagtggagacgtctgtgacttattatcgactggaagaagtggccaaaaggaactcactgaaagagctgtggttggtcatacacgggcgcgtttatgacgtcacccgctttctaaatgagcaccctgggggggaagaagtcctgctggagcaagccggcgtggatgcttcggaatctttcgaggacgtcggacactcgagcgatgctcgggagatgctgaaacaatattatatcggagacattcacccgagcgatttgaaacctgagtcaggctccaaggatccttcaaagaatgacacgtgcaagtcctgctgggcctattggatcctgccaataataggcgccgtgttgctggggtttctgtacaggtactataccagcgagtccaaatcatcttag

SEQ ID NO: 219242 - DNA, 441 bp, Artificial Sequence
  derived and/or modified sequence
atggccaccgccgaggccagcggcagcgacggcaagggccaggaggtggaaacttctgtcacatactatcggttagaagaagttgctaaaagaaattcattaaaggaactgtggctcgtaatccatgggcgggtgtacgatgtcacgcggtttcttaatgagcaccccggtggcgaagaggttctgcttgagcaggctggagttgacgcctcagagtcatttgaggatgtgggtcacagctctgacgctagggagatgctgaagcagtattacattggggacatccatccttccgacctgaagcccgaatctggtagcaaagatccctctaaaaatgacacttgcaagtcctgttgggcctattggatacttccaatcatcggggcagtgcttttggggttcctatacagatactacacctccgaatcaaagtccagttag

SEQ ID NO: 219243 - DNA, 453 bp, Artificial Sequence
  derived and/or modified sequence
atgtctggctccatggccaccgcagaggctagtggctccgatggaaagggacaggaagtggagacatctgtgacatattaccgactcgaggaggttgcaaagcggaatagccttaaagaactctggctggtaattcacggccgtgtctacgacgtgacacgctttcttaatgaacaccccggaggggaagaagtgcttctggagcaggccggtgtcgacgcttccgagagtttcgaagatgtggggcactcatctgacgcaagagagatgctcaagcaatactacatcggggacattcatcctagtgatttaaagccggagtccggcagtaaagatccttcaaaaaatgatacctgtaaatcttgctgggcttactggatactgccaatcattggggcagtcctccttggctttctctatagatattatacatcagagagcaaatcttcctag

SEQ ID NO: 219244 - DNA, 441 bp, Artificial Sequence
  derived and/or modified sequence
atggctaccgctgaggcctcaggcagcgacgggaagggacaggaagtcgaaacttcagtgacctattatcgtctggaggaagtcgccaagcgaaactcgctcaaggagctgtggctggtaatacatggtcgagtttatgatgtgacacgattcttgaatgaacaccctgggggagaggaggtcttactcgaacaagctggcgtcgatgcctctgaaagcttcgaggacgtgggtcactctagtgatgcccgagagatgctcaaacagtattatattggcgacatccacccaagtgatctgaaaccagagtccggcagcaaggacccatcaaaaaatgacacttgcaagagttgctgggcgtattggatcctgccgatcattggcgcagtgcttctcggattcctctacagatattatacttcagagagcaaatcttcctag

SEQ ID NO: 219245 - DNA, 4286 bp, Artificial Sequence
  derived and/or modified sequence
tgggccctggttacggaagccgaggaaggctgagcgcgggctctcaaggaaagtagtcgcggaatctcagttagcggtggagaggcagtatgtccggttcaatggcgactgcggaagctagcggcagcgatgggaaagggcaggaagtcgagacctcagtcacctattaccggttggaggaggtggcaaagcgcaactccttgaaggaactgtggcttgtgatccatgggcgagtctacgatgtcacccgcttcctcaacgagcaccctggaggagaagaggttctgctggaacaagctggtgtagatgcaagtgaaagctttgaagatgtaggacactcttctgatgccagagaaatgctaaagcagtactacattggtgatatccatccgagtgaccttaaacctgaaagtggtagcaaggacccttcaaaaaatgatacatgcaaaagttgctgggcatattggattttacccatcataggcgctgttctcttaggtttcctgtaccgctactacacatcggaaagcaaatcctcctgaggaggccttgctgaagttagaaagtgcatccactttggggcgaaaactagagacttgcttgggggctgcagaagtgccctctcctcgaatcctgccagttgcattcttcccccttggagccaagacgattggccagacatcacctcagatctgagaccagcgtcttccatctctcagagccttactcccaaagtacctgctcactgttccgtgttgaacaattgccggtgtttcctctcttcactggtttccatgagtacccttatatttcacaactttctgttcataagttatagtgacattgctctttggtaaaaatgcctgctttccaatactttgattgcatattagacattcttaacagggcggcagtctagtgttgaaagttttatttttccatttttcttttaagtaaattttttttaaaaaattctgatttagggctaggtgtggtggctcaggcctgtaatcctggcactttgggaggccaaggtgggaagatcgcttgaggccaagagttcaagaccagcctgggcaacatagcgagacccctatctgtattaaaaaaaaatctgatttaattcttttatttatcataaggggtttaattcctgaagtaaaggtttgcacctattaaacttaaaactgccaaatgatttttgttcttttatgtgcgtgataaaaatacaaagaatggtgtggccacctcctccctttcaagctagggcagcaggtagctcttcccagcccctgagcccagccccttcccaagtggtgccggacaaaaaactacatggccctttcgtgtcttgggggtggaaaggtagggatgaattggggtgatagaaccctggtgaattcagagtaatctttctttagaaaactggtgttttctaaagaaacaggataggagtttagagaaggcaccaaagctttcactttggtttggcaccagtttctaaccatctgttttttctaccctagctatcttttattggtaaaatataaatgtataattatgtttgtagagctttaccaaggagtttccctccttttttgtttgttgattagcaaatttttgattctccattttccaaaagtaagagactccagcatggccttctgtttgccccgcagtaaagtaacttccatataaaatggtatttgaaagtgagagttcatgacaacagaccgttttccatttcatctgtattttatctccgtgactccaacttgtgggtttgttctgtttttccatgagaataaaatactggcggtttttttctcagatgtgtgttcattgagaagtaggttactagaattatgttactgtgtcttattggttcaatgatgatttctctggcatattagacttttattttttcccccatggaagcacttgaggaaataaatagtacactggctgttttctgccagcaactgtggtgatttttctccctgtcctttgagaattgctagtctgcttctgagccattgtcatatccagcagggagcagcttggttcaagaaggaccatagaggctgctcagcatctcctccctccctcccagcttgccagggatttgatgagacaggaaactgcccagcaaaccagggactgcccatgtaaactatttaagaaaaagttcaacccaggtcttgtatcctgtgatttagcagttgaatgaatacagaattcatcaaaataatattaaccttgtacttgcacacttggatatatttgggagtaattttaggagatttctggctgacttttattatcagggatatgggtttagtaaagcttttatctttagaaaaatgtttgtatgcattataagatgctacttttaagacaatattgaaaaaaactttggttattatttaacaaaagtggtatgacttgatgcttctctatttaaaggcaaggaaggattggtatatgattgcctgtaataaataaattgcgtgattattggagtacattggggtaaaagtaaagaacagaggagtattgaggagcttgaaagggaacattcaaactaaagccaagcctgaagataacttgaatcagttgtaaaagtgtgttggcaatgtccgaaattgaatgaaaaacatctggcttataagaaatgttaaagaactaccatcttaagtaaaattggtgtttttgttatttttaaggtaaatgccaatgcaaaaggtatgtttttctacttcacattggttttcttttcctgtttacatctgcacttgttttttgctgagagccagaggaaaagataattagactttgtctcttccacccatgaaatcccccagtacccagggcttcttctgaactactgccgatgtgatgtcactttgtatctggaaaatcactttggggtccatttactgttattttgttgcctacaaaaacagccaggtgaaagctaaatcttgtgtgagagtttgcagaggtttttctatacaataaagtagtatagcacactagccaaatccatccaaaaggaccttttttttaggaagtagacttgaattcacaaaacagtcttgacatgggtagctggtgaaaaaccctctggagagcaagtggagccagtccccattggctgacagtgccacctggagctggtctctggggtgttcggttgtttattcctgaggaagactagctgctgctgctgctgctgctgcaaactgtactgtacacatcatggctgctggacacgaaggaggaggtgagagaagtttcatgctaccgaaatagagggtgttggtaccactgcccctggcctgagagccagggtttaaacctgcctcagtagagtctagtttgaaatgacaccaaaattcctcagcccctactcagcaattggttttggtttccaaatgacttctgcatttgtaaagataacagagtggtggggtcaaagtttatcttgtgtttagatctcttcaagactgcttaagcaaaaacaaaaatcccttggaacctatcgtttgagcctgtaaagttgttttagcagttgtcataaatgcatatgttgtgaaatcagaacactgtcgagtttatactcatttagctgcaatgtgggacaatgaaaaatgctttacaggcctggagtatcattacttatggtatctcctgctttaaaatctcaagcgatatctatctggttaaattccattttaggagattgagatgcagaacgttaatgttcattacctcctcctaccccaagagaaatggattcagacatgtcttgtctcaacaagaaattgatttttttttaaactatcttattctgttgccaaatatcacagaagtaatgaggagtttagttacatttggctgttgtgctctgaaagagccaggtttggaatttgtgggggtgatctaggaagaaggttccaaagaagcagaggcatttgtcaagttacctaccctatatccagcatcctcctcatgagcttcagtagctgctctttgcccacgcttgtatcctacgtttgctatttgggcaaaccattacttcagttatttaacttccctttttttttaacttcacctttgactatgaacaagtaacggtaacattccttttgtgtattcaataatgcagttagtttacctttttcagaatattttgaacaaagatctttgtctctttctgctggaatgcgcacacagtgaacgtttgttagaactacacacaataaagacactgttttcctttt

SEQ ID NO: 219246 - DNA, 4358 bp, Artificial Sequence
  derived and/or modified sequence
gaaaagaaaacgaaccaggaactattcggaagtgtgattggctgttgctaggaaccgtctcaaggccttatgggccctggttacggaagccgaggaaggctgagcgcgggctctcaaggaaagtagtcgcggaatctcagttagcggtggagaggcagtatgtccggttcaatggcgactgcggaagctagcggcagcgatgggaaagggcaggaagtcgagacctcagtcacctattaccggttggaggaggtggcaaagcgcaactccttgaaggaactgtggcttgtgatccatgggcgagtctacgatgtcacccgcttcctcaacgagcaccctggaggagaagaggttctgctggaacaagctggtgtagatgcaagtgaaagctttgaagatgtaggacactcttctgatgccagagaaatgctaaagcagtactacattggtgatatccatccgagtgaccttaaacctgaaagtggtagcaaggacccttcaaaaaatgatacatgcaaaagttgctgggcatattggattttacccatcataggcgctgttctcttaggtttcctgtaccgctactacacatcggaaagcaaatcctcctgaggaggccttgctgaagttagaaagtgcatccactttggggcgaaaactagagacttgcttgggggctgcagaagtgccctctcctcgaatcctgccagttgcattcttcccccttggagccaagacgattggccagacatcacctcagatctgagaccagcgtcttccatctctcagagccttactcccaaagtacctgctcactgttccgtgttgaacaattgccggtgtttcctctcttcactggtttccatgagtacccttatatttcacaactttctgttcataagttatagtgacattgctctttggtaaaaatgcctgctttccaatactttgattgcatattagacattcttaacagggcggcagtctagtgttgaaagttttatttttccatttttcttttaagtaaattttttttaaaaaattctgatttagggctaggtgtggtggctcaggcctgtaatcctggcactttgggaggccaaggtgggaagatcgcttgaggccaagagttcaagaccagcctgggcaacatagcgagacccctatctgtattaaaaaaaaatctgatttaattcttttatttatcataaggggtttaattcctgaagtaaaggtttgcacctattaaacttaaaactgccaaatgatttttgttcttttatgtgcgtgataaaaatacaaagaatggtgtggccacctcctccctttcaagctagggcagcaggtagctcttcccagcccctgagcccagccccttcccaagtggtgccggacaaaaaactacatggccctttcgtgtcttgggggtggaaaggtagggatgaattggggtgatagaaccctggtgaattcagagtaatctttctttagaaaactggtgttttctaaagaaacaggataggagtttagagaaggcaccaaagctttcactttggtttggcaccagtttctaaccatctgttttttctaccctagctatcttttattggtaaaatataaatgtataattatgtttgtagagctttaccaaggagtttccctccttttttgtttgttgattagcaaatttttgattctccattttccaaaagtaagagactccagcatggccttctgtttgccccgcagtaaagtaacttccatataaaatggtatttgaaagtgagagttcatgacaacagaccgttttccatttcatctgtattttatctccgtgactccaacttgtgggtttgttctgtttttccatgagaataaaatactggcggtttttttctcagatgtgtgttcattgagaagtaggttactagaattatgttactgtgtcttattggttcaatgatgatttctctggcatattagacttttattttttcccccatggaagcacttgaggaaataaatagtacactggctgttttctgccagcaactgtggtgatttttctccctgtcctttgagaattgctagtctgcttctgagccattgtcatatccagcagggagcagcttggttcaagaaggaccatagaggctgctcagcatctcctccctccctcccagcttgccagggatttgatgagacaggaaactgcccagcaaaccagggactgcccatgtaaactatttaagaaaaagttcaacccaggtcttgtatcctgtgatttagcagttgaatgaatacagaattcatcaaaataatattaaccttgtacttgcacacttggatatatttgggagtaattttaggagatttctggctgacttttattatcagggatatgggtttagtaaagcttttatctttagaaaaatgtttgtatgcattataagatgctacttttaagacaatattgaaaaaaactttggttattatttaacaaaagtggtatgacttgatgcttctctatttaaaggcaaggaaggattggtatatgattgcctgtaataaataaattgcgtgattattggagtacattggggtaaaagtaaagaacagaggagtattgaggagcttgaaagggaacattcaaactaaagccaagcctgaagataacttgaatcagttgtaaaagtgtgttggcaatgtccgaaattgaatgaaaaacatctggcttataagaaatgttaaagaactaccatcttaagtaaaattggtgtttttgttatttttaaggtaaatgccaatgcaaaaggtatgtttttctacttcacattggttttcttttcctgtttacatctgcacttgttttttgctgagagccagaggaaaagataattagactttgtctcttccacccatgaaatcccccagtacccagggcttcttctgaactactgccgatgtgatgtcactttgtatctggaaaatcactttggggtccatttactgttattttgttgcctacaaaaacagccaggtgaaagctaaatcttgtgtgagagtttgcagaggtttttctatacaataaagtagtatagcacactagccaaatccatccaaaaggaccttttttttaggaagtagacttgaattcacaaaacagtcttgacatgggtagctggtgaaaaaccctctggagagcaagtggagccagtccccattggctgacagtgccacctggagctggtctctggggtgttcggttgtttattcctgaggaagactagctgctgctgctgctgctgctgcaaactgtactgtacacatcatggctgctggacacgaaggaggaggtgagagaagtttcatgctaccgaaatagagggtgttggtaccactgcccctggcctgagagccagggtttaaacctgcctcagtagagtctagtttgaaatgacaccaaaattcctcagcccctactcagcaattggttttggtttccaaatgacttctgcatttgtaaagataacagagtggtggggtcaaagtttatcttgtgtttagatctcttcaagactgcttaagcaaaaacaaaaatcccttggaacctatcgtttgagcctgtaaagttgttttagcagttgtcataaatgcatatgttgtgaaatcagaacactgtcgagtttatactcatttagctgcaatgtgggacaatgaaaaatgctttacaggcctggagtatcattacttatggtatctcctgctttaaaatctcaagcgatatctatctggttaaattccattttaggagattgagatgcagaacgttaatgttcattacctcctcctaccccaagagaaatggattcagacatgtcttgtctcaacaagaaattgatttttttttaaactatcttattctgttgccaaatatcacagaagtaatgaggagtttagttacatttggctgttgtgctctgaaagagccaggtttggaatttgtgggggtgatctaggaagaaggttccaaagaagcagaggcatttgtcaagttacctaccctatatccagcatcctcctcatgagcttcagtagctgctctttgcccacgcttgtatcctacgtttgctatttgggcaaaccattacttcagttatttaacttccctttttttttaacttcacctttgactatgaacaagtaacggtaacattccttttgtgtattcaataatgcagttagtttacctttttcagaatattttgaacaaagatctttgtctctttctgctggaatgcgcacacagtgaacgtttgttagaactacacacaataaagacactgttttccttttct

SEQ ID NO: 219247 - DNA, 453 bp, Artificial Sequence
  derived and/or modified sequence
atgagcggcagcatggccaccgccgaggccagcggcagcgacggcaagggccaggaggtggagaccagcgtgacctactacagactggaggaggtggccaagagaaacagcctgaaggagctgtggctggtgatccacggcagagtgtacgacgtgaccagattcctgaacgagcaccccggcggcgaggaggtgctgctggagcaggccggcgtggacgccagcgagagcttcgaggacgtgggccacagcagcgacgccagagagatgctgaagcagtactacatcggcgacatccaccccagcgacctgaagcccgagagcggcagcaaggaccccagcaagaacgacacctgcaagagctgctgggcctactggatcctgcccatcatcggcgccgtgctgctgggcttcctgtacagatactacaccagcgagagcaagagcagctag

SEQ ID NO: 219248 - DNA, 441 bp, Artificial Sequence
  derived and/or modified sequence
atggccaccgccgaggccagcggcagcgacggcaagggccaggaggtggagaccagcgtgacctactacagactggaggaggtggccaagagaaacagcctgaaggagctgtggctggtgatccacggcagagtgtacgacgtgaccagattcctgaacgagcaccccggcggcgaggaggtgctgctggagcaggccggcgtggacgccagcgagagcttcgaggacgtgggccacagcagcgacgccagagagatgctgaagcagtactacatcggcgacatccaccccagcgacctgaagcccgagagcggcagcaaggaccccagcaagaacgacacctgcaagagctgctgggcctactggatcctgcccatcatcggcgccgtgctgctgggcttcctgtacagatactacaccagcgagagcaagagcagctag

SEQ ID NO: 219249 - protein, 1519 aa, Artificial Sequence
  derived and/or modified sequence
MAPYPCGCHILLLLFCCLAAARANLLNLNWLWFNNEDTSHAATTIPEPQGPLPVQPTADTTTHVTPRNGSTEPATAPGSPEPPSELLEDGQDTPTSAESPDAPEENIAGVGAEILNVAKGIRSFVQLWNDTVPTESLARAETLVLETPVGPLALAGPSSTPQENGTTLWPSRGIPSSPGAHTTEAGTLPAPTPSPPSLGRPWAPLTGPSVPPPSSERISEEVGLLQLLGDPPPQQVTQTDDPDVGLAYVFGPDANSGQVARYHFPSLFFRDFSLLFHIRPATEGPGVLFAITDSAQAMVLLGVKLSGVQDGHQDISLLYTEPGAGQTHTAASFRLPAFVGQWTHLALSVAGGFVALYVDCEEFQRMPLARSSRGLELEPGAGLFVAQAGGADPDKFQGVIAELKVRRDPQVSPMHCLDEEGDDSDGASGDSGSGLGDARELLREETGAALKPRLPAPPPVTTPPLAGGSSTEDSRSEEVEEQTTVASLGAQTLPGSDSVSTWDGSVRTPGGRVKEGGLKGQKGEPGVPGPPGRAGPPGSPCLPGPPGLPCPVSPLGPAGPALQTVPGPQGPPGPPGRDGTPGRDGEPGDPGEDGKPGDTGPQGFPGTPGDVGPKGDKGDPGVGERGPPGPQGPPGPPGPSFRHDKLTFIDMEGSGFGGDLEALRGPRGFPGPPGPPGVPGLPGEPGRFGVNSSDVPGPAGLPGVPGREGPPGFPGLPGPPGPPGREGPPGRTGQKGSLGEAGAPGHKGSKGAPGPAGARGESGLAGAPGPAGPPGPPGPPGPPGPGLPAGFDDMEGSGGPFWSTARSADGPQGPPGLPGLKGDPGVPGLPGAKGEVGADGVPGFPGLPGREGIAGPQGPKGDRGSRGEKGDPGKDGVGQPGLPGPPGPPGPVVYVSEQDGSVLSVPGPEGRPGFAGFPGPAGPKGNLGSKGERGSPGPKGEKGEPGSIFSPDGGALGPAQKGAKGEPGFRGPPGPYGRPGYKGEIGFPGRPGRPGMNGLKGEKGEPGDASLGFGMRGMPGPPGPPGPPGPPGTPVYDSNVFAESSRPGPPGLPGNQGPPGPKGAKGEVGPPGPPGQFPFDFLQLEAEMKGEKGDRGDAGQKGERGEPGGGGFFGSSLPGPPGPPGPPGPRGYPGIPGPKGESIRGQPGPPGPQGPPGIGYEGRQGPPGPPGPPGPPSFPGPHRQTISVPGPPGPPGPPGPPGTMGASSGVRLWATRQAMLGQVHEVPEGWLIFVAEQEELYVRVQNGFRKVQLEARTPLPRGTDNEVAALQPPVVQLHDSNPYPRREHPHPTARPWRADDILASPPRLPEPQPYPGAPHHSSYVHLRPARPTSPPAHSHRDFQPVLHLVALNSPLSGGMRGIRGADFQCFQQARAVGLAGTFRAFLSSRLQDLYSIVRRADRAAVPIVNLKDELLFPSWEALFSGSEGPLKPGARIFSFDGKDVLRHPTWPQKSVWHGSDPNGRRLTESYCETWRTEAPSATGQASSLLGGRLLGQSAASCHHAYIVLCIENSFMTASK

SEQ ID NO: 219250 - DNA, 4560 bp, Artificial Sequence
  derived and/or modified sequence
atggccccctacccctgcggctgccacatcctgctgctgctgttctgctgcctggccgccgccagagccaacctgctgaacctgaactggctgtggttcaacaacgaggacaccagccacgccgccaccaccatccccgagccccagggccccctgcccgtgcagcccaccgccgacaccaccacccacgtgacccccagaaacggcagcaccgagcccgccaccgcccccggcagccccgagccccccagcgagctgctggaggacggccaggacacccccaccagcgccgagagccccgacgcccccgaggagaacatcgccggcgtgggcgccgagatcctgaacgtggccaagggcatcagaagcttcgtgcagctgtggaacgacaccgtgcccaccgagagcctggccagagccgagaccctggtgctggagacccccgtgggccccctggccctggccggccccagcagcaccccccaggagaacggcaccaccctgtggcccagcagaggcatccccagcagccccggcgcccacaccaccgaggccggcaccctgcccgcccccacccccagcccccccagcctgggcagaccctgggcccccctgaccggccccagcgtgcccccccccagcagcgagagaatcagcgaggaggtgggcctgctgcagctgctgggcgacccccccccccagcaggtgacccagaccgacgaccccgacgtgggcctggcctacgtgttcggccccgacgccaacagcggccaggtggccagataccacttccccagcctgttcttcagagacttcagcctgctgttccacatcagacccgccaccgagggccccggcgtgctgttcgccatcaccgacagcgcccaggccatggtgctgctgggcgtgaagctgagcggcgtgcaggacggccaccaggacatcagcctgctgtacaccgagcccggcgccggccagacccacaccgccgccagcttcagactgcccgccttcgtgggccagtggacccacctggccctgagcgtggccggcggcttcgtggccctgtacgtggactgcgaggagttccagagaatgcccctggccagaagcagcagaggcctggagctggagcccggcgccggcctgttcgtggcccaggccggcggcgccgaccccgacaagttccagggcgtgatcgccgagctgaaggtgagaagagacccccaggtgagccccatgcactgcctggacgaggagggcgacgacagcgacggcgccagcggcgacagcggcagcggcctgggcgacgccagagagctgctgagagaggagaccggcgccgccctgaagcccagactgcccgcccccccccccgtgaccaccccccccctggccggcggcagcagcaccgaggacagcagaagcgaggaggtggaggagcagaccaccgtggccagcctgggcgcccagaccctgcccggcagcgacagcgtgagcacctgggacggcagcgtgagaacccccggcggcagagtgaaggagggcggcctgaagggccagaagggcgagcccggcgtgcccggcccccccggcagagccggcccccccggcagcccctgcctgcccggcccccccggcctgccctgccccgtgagccccctgggccccgccggccccgccctgcagaccgtgcccggcccccagggcccccccggcccccccggcagagacggcacccccggcagagacggcgagcccggcgaccccggcgaggacggcaagcccggcgacaccggcccccagggcttccccggcacccccggcgacgtgggccccaagggcgacaagggcgaccccggcgtgggcgagagaggcccccccggcccccagggcccccccggcccccccggccccagcttcagacacgacaagctgaccttcatcgacatggagggcagcggcttcggcggcgacctggaggccctgagaggccccagaggcttccccggcccccccggcccccccggcgtgcccggcctgcccggcgagcccggcagattcggcgtgaacagcagcgacgtgcccggccccgccggcctgcccggcgtgcccggcagagagggcccccccggcttccccggcctgcccggcccccccggcccccccggcagagagggcccccccggcagaaccggccagaagggcagcctgggcgaggccggcgcccccggccacaagggcagcaagggcgcccccggccccgccggcgccagaggcgagagcggcctggccggcgcccccggccccgccggcccccccggcccccccggcccccccggcccccccggccccggcctgcccgccggcttcgacgacatggagggcagcggcggccccttctggagcaccgccagaagcgccgacggcccccagggcccccccggcctgcccggcctgaagggcgaccccggcgtgcccggcctgcccggcgccaagggcgaggtgggcgccgacggcgtgcccggcttccccggcctgcccggcagagagggcatcgccggcccccagggccccaagggcgacagaggcagcagaggcgagaagggcgaccccggcaaggacggcgtgggccagcccggcctgcccggcccccccggcccccccggccccgtggtgtacgtgagcgagcaggacggcagcgtgctgagcgtgcccggccccgagggcagacccggcttcgccggcttccccggccccgccggccccaagggcaacctgggcagcaagggcgagagaggcagccccggccccaagggcgagaagggcgagcccggcagcatcttcagccccgacggcggcgccctgggccccgcccagaagggcgccaagggcgagcccggcttcagaggcccccccggcccctacggcagacccggctacaagggcgagatcggcttccccggcagacccggcagacccggcatgaacggcctgaagggcgagaagggcgagcccggcgacgccagcctgggcttcggcatgagaggcatgcccggcccccccggcccccccggcccccccggcccccccggcacccccgtgtacgacagcaacgtgttcgccgagagcagcagacccggcccccccggcctgcccggcaaccagggcccccccggccccaagggcgccaagggcgaggtgggcccccccggcccccccggccagttccccttcgacttcctgcagctggaggccgagatgaagggcgagaagggcgacagaggcgacgccggccagaagggcgagagaggcgagcccggcggcggcggcttcttcggcagcagcctgcccggcccccccggcccccccggcccccccggccccagaggctaccccggcatccccggccccaagggcgagagcatcagaggccagcccggcccccccggcccccagggcccccccggcatcggctacgagggcagacagggcccccccggcccccccggcccccccggcccccccagcttccccggcccccacagacagaccatcagcgtgcccggcccccccggcccccccggcccccccggcccccccggcaccatgggcgccagcagcggcgtgagactgtgggccaccagacaggccatgctgggccaggtgcacgaggtgcccgagggctggctgatcttcgtggccgagcaggaggagctgtacgtgagagtgcagaacggcttcagaaaggtgcagctggaggccagaacccccctgcccagaggcaccgacaacgaggtggccgccctgcagccccccgtggtgcagctgcacgacagcaacccctaccccagaagagagcacccccaccccaccgccagaccctggagagccgacgacatcctggccagcccccccagactgcccgagccccagccctaccccggcgccccccaccacagcagctacgtgcacctgagacccgccagacccaccagcccccccgcccacagccacagagacttccagcccgtgctgcacctggtggccctgaacagccccctgagcggcggcatgagaggcatcagaggcgccgacttccagtgcttccagcaggccagagccgtgggcctggccggcaccttcagagccttcctgagcagcagactgcaggacctgtacagcatcgtgagaagagccgacagagccgccgtgcccatcgtgaacctgaaggacgagctgctgttccccagctgggaggccctgttcagcggcagcgagggccccctgaagcccggcgccagaatcttcagcttcgacggcaaggacgtgctgagacaccccacctggccccagaagagcgtgtggcacggcagcgaccccaacggcagaagactgaccgagagctactgcgagacctggagaaccgaggcccccagcgccaccggccaggccagcagcctgctgggcggcagactgctgggccagagcgccgccagctgccaccacgcctacatcgtgctgtgcatcgagaacagcttcatgaccgccagcaagtag

SEQ ID NO: 219251 - DNA, 5924 bp, Artificial Sequence
  derived and/or modified sequence
agaggccctcccgccgcccgcagctccagccgcactgccccgatggctccctacccctgtggctgccacatcctgctgctgctcttctgctgcctggcggctgcccgggccaacctgctgaacctgaactggctttggttcaataatgaggacaccagccatgcagctaccacgatccctgagccccaggggcccctgcctgtgcagcccacagcagataccaccacacacgtgaccccccggaatggttccacagagccagcgacagcccctggcagccctgagccaccctcagagctgctggaagatggccaggacacccccacttctgccgagagcccggacgcgccagaggagaacattgccggtgtcggagccgagatcctgaacgtggccaaaggcatccggagcttcgtccagctgtggaatgacactgtccccactgagagcttggccagggcggaaaccctggtcctggagactcctgtgggcccccttgccctcgctgggccttccagcaccccccaggagaatgggaccactctctggcccagccgtggcattcctagctctccgggcgcccacacaaccgaggctggcaccttgcctgcacccaccccatcgcctccctccctgggcaggccctgggcaccactcacggggccctcagtgccaccaccatcttcagagcgcatcagcgaggaggtggggctgctgcagctccttggggaccccccgccccagcaggtcacccagacggatgaccccgacgtcgggctggcctacgtctttgggccagatgccaacagtggccaagtggcccggtaccacttccccagcctcttcttccgtgacttctcactgctgttccacatccggccagccacagagggcccaggggtgctgttcgccatcacggactcggcgcaggccatggtcttgctgggcgtgaagctctctggggtgcaggacgggcaccaggacatctccctgctctacacagaaccaggtgcaggccagacccacacagccgccagcttccggctccccgccttcgtcggccagtggacacacttagccctcagtgtggcaggtggctttgtggccctctacgtggactgtgaggagttccagagaatgccgcttgctcggtcctcacggggcctggagctggagcctggcgccgggctcttcgtggctcaggcggggggagcggaccctgacaagttccagggggtgatcgctgagctgaaggtgcgcagggacccccaggtgagccccatgcactgcctggacgaggaaggcgatgactcagatggggcatccggagactctggcagcgggctcggggacgcccgggagcttctcagggaggagacgggcgcggccctaaaacccaggctccccgcgccaccccccgtcaccacgccacccttggctggaggcagcagcacggaagattccagaagtgaagaagtcgaggagcagaccacggtggcttcgttaggagctcagacacttcctggctcagattctgtctccacgtgggacgggagtgtccggacccctgggggccgcgtgaaagagggcggcctgaaggggcagaaaggggagccaggtgttccgggcccacctggccgggcaggccccccaggatccccatgcctacctggtcccccgggtctcccgtgcccagtgagtcccctgggtcctgcaggcccagcgttgcaaactgtccccggaccacaaggacccccagggcctccggggagggacggcacccctggaagggacggcgagccgggcgaccccggtgaagacggaaagccgggcgacaccgggccacaaggcttccccgggactccaggggacgtaggtcccaagggcgacaagggagaccctggggttggagagagagggcccccaggaccccaagggcctccagggcccccaggaccctccttcagacacgacaagctgaccttcattgacatggagggatctggcttcgggggcgatctggaggccctgcggggtcctcgaggcttccctggacctcccggaccccccggtgtcccaggcctgcccggcgagccaggccgctttggggtgaacagctccgacgtcccaggacccgccggccttcctggtgtgcctgggcgcgagggtccccccgggtttcctggcctcccgggacccccaggccctccgggaagagaggggcccccaggaaggactgggcagaaaggcagcctgggtgaagcaggcgccccaggacataaggggagcaagggagcccccggtcctgctggtgctcgtggggagagcggcctggcaggagcccccggacctgctggaccaccaggcccccctgggccccctgggcccccaggaccaggactccccgctggatttgatgacatggaaggctccggggggcccttctggtcaacagcccgaagcgctgatgggccacagggacctcccggcctgccgggacttaagggggatcctggcgtgcctgggctgccgggggcgaagggagaagttggagcagatggagtccccgggttccccggcctccctggcagagagggcattgctgggccccaggggccaaagggagacagaggcagccggggagaaaagggagatccagggaaggacggagtcgggcagccgggcctccctggcccccccggacccccgggacctgtggtctacgtgtcggagcaggacggatccgtcctgagcgtgccgggacctgagggccggccgggtttcgcaggctttcccggacctgcaggacccaagggcaacctgggctctaagggcgaacgaggctccccgggacccaagggtgagaagggtgaaccgggcagcatcttcagccccgacggcggtgccctgggccctgcccagaaaggagccaagggagagccgggcttccgaggacccccgggtccatacggacggccggggtacaagggagagattggctttcctggacggccgggtcgccccgggatgaacggattgaaaggagagaaaggggagccgggagatgccagccttggatttggcatgaggggaatgcccggccccccaggacctccagggcccccaggccctccagggactcctgtttacgacagcaatgtgtttgctgagtccagccgccccgggcctccaggattgccagggaatcagggccctccaggacccaagggcgccaaaggagaagtgggcccccccggaccaccagggcagtttccgtttgactttcttcagttggaggctgaaatgaagggggagaagggagaccgaggtgatgcaggacagaaaggcgaaaggggggagcccgggggcggcggtttcttcggctccagcctgcccggcccccccggccccccaggccccccaggcccacgtggctaccctgggattccaggtcccaagggagagagcatccggggccagcccggcccacctggacctcagggaccccccggcatcggctacgaggggcgccagggccctcccggccccccaggccccccagggcccccttcatttcctggccctcacaggcagactatcagcgttcccggccctccgggcccccctgggccccctgggccccctggaaccatgggcgcctcctcaggggtgaggctctgggctacacgccaggccatgctgggccaggtgcacgaggttcccgagggctggctcatcttcgtggccgagcaggaggagctctacgtccgcgtgcagaacgggttccggaaggtccagctggaggcccggacaccactcccacgagggacggacaatgaagtggccgccttgcagccccccgtggtgcagctgcacgacagcaacccctacccgcggcgggagcacccccaccccaccgcgcggccctggcgggcagatgacatcctggccagcccccctcgcctgcccgagccccagccctaccccggagccccgcaccacagctcctacgtgcacctgcggccggcgcgacccacaagcccacccgcccacagccaccgcgacttccagccggtgctccacctggttgcgctcaacagccccctgtcaggcggcatgcggggcatccgcggggccgacttccagtgcttccagcaggcgcgggccgtggggctggcgggcaccttccgcgccttcctgtcctcgcgcctgcaggacctgtacagcatcgtgcgccgtgccgaccgcgcagccgtgcccatcgtcaacctcaaggacgagctgctgtttcccagctgggaggctctgttctcaggctctgagggtccgctgaagcccggggcacgcatcttctcctttgacggcaaggacgtcctgaggcaccccacctggccccagaagagcgtgtggcatggctcggaccccaacgggcgcaggctgaccgagagctactgtgagacgtggcggacggaggctccctcggccacgggccaggcctcctcgctgctggggggcaggctcctggggcagagtgccgcgagctgccatcacgcctacatcgtgctctgcattgagaacagcttcatgactgcctccaagtagccaccgcctggatgcggatggccggagaggaccggcggctcggaggaagcccccaccgtgggcagggagcggccggccagcccctggccccaggacctggctgccatactttcctgtatagttcacgtttcatgtaatcctcaagaaataaaaggaagccaaagagtgtatttttttaaaagtttaaaacagaagcctgatgctgacattcacctgccccaactctcccctgacctgtgagcccagctgggtcaggcagggtgcagtatcatgccctgtgcaacctcttggcctgatcagaccacggctcgatttctccaggatttcctgctttgggaagccgtgctcgccccagcaggtgctgacttcatctcccacctagcagcaccgttctgtgcacaaaacccagacctgttagcagacaggccccgtgaggcaatgggagctgaggccacactcagcacaaggccatctgggctcctccagggtgtgtgctcgccctgcggtagatgggagggaggctcaggtccctggggctagggggagccccttctgctcagctctgggccattctccacagcaaccccaggctgaagcaggttcccaagctcagaggcgcactgtgacccccagctccggcctgtcctccaacaccaagcacagcagcctggggctggcctcccaaatgagccatgagatgatacatccaaagcagacagctccaccctggccgagtccaagctgggagattcaagggacccatgagttggggtctggcagcctcccatccagggcccccatctcatgcccctggctgggacgtggctcagccagcacttgtccagctgagcgccaggatggaacacggccacatcaaagaggctgaggctggcacaggacatgcggtagccagcacacagggcagtgagggagggctgtcatctgtgcactgcccatggacaggctggctccagatgcagggcagtcattggctgtctcctaggaaacccatatccttaccctccttgggactgaaggggaaccccggggtgcccacaggccgccctgcgggtgaacaaagcagccacgaggtgcaacaaggtcctctgtcagtcacagccacccctgagatccggcaacatcaacccgagtcattcgttctgtggagggacaagtggactcagggcagcgccaggctgaccacagcacagccaacacgcacctgcctcaggactgcgacgaaaccggtggggctggttctgtaattgtgtgtgatgtgaagccaattcagacaggcaaataaaagtgaccttttacactga

SEQ ID NO: 219252 - DNA, 4560 bp, Artificial Sequence
  derived and/or modified sequence
atggccccttatccgtgcggctgtcatatcttattactgctgttttgctgtcttgcggccgctcgggccaacctgttaaatctgaattggctctggttcaataatgaggacacaagtcacgcagctacgacaatccccgaaccgcagggcccccttcctgttcaacccacagcagacacaactacccatgtgactccacggaatggctcaacagaacctgccactgcgccagggagccccgaacctccaagtgagctactggaagatggccaggacacaccgacgtctgcagagtcgcctgatgcgcccgaggaaaatatagccggcgttggcgccgaaatcctgaacgtggcgaagggcattaggtcctttgtgcaattgtggaacgacacagtcccaactgagtctctcgctagagccgaaaccctggtgctcgagacacccgtcggccccctggccctcgctggcccttcctctacccctcaagaaaacggtacaaccttgtggccaagccgcggcattccctctagccccggggcccataccactgaagctggtacactgcctgctcccactccttctccaccctccctgggtcgtccttgggctccactcacaggaccctccgtgcctccacctagttctgagcggatttcagaggaggttggactactgcagctgcttggggacccaccacctcagcaggttactcagactgatgatccggatgtaggcctggcgtacgttttcggaccagacgccaactctgggcaggtcgcaaggtaccattttcccagtctcttcttcagagattttagcctgttattccacatcagacccgcgactgaaggtccaggtgttctgttcgccattactgattcagcccaggctatggtgctcctcggcgtgaagctgagtggagtccaggacgggcaccaggacatttcattgctatataccgagcctggcgcgggacaaactcacaccgcagccagctttaggttaccggcatttgtcggtcagtggactcatttagcactcagcgtagcgggaggattcgtcgccctgtatgtggactgcgaggagttccaaagaatgccattggcgaggagctcccggggcctcgagctggagcccggggctgggctatttgtcgctcaggccggcggcgcggatccagacaaattccagggggtgattgccgaattgaaggtccgtagagacccccaggtgagtcctatgcactgtttagacgaggaaggcgatgactcagacggcgcctccggagactccggctccgggctgggggatgcccgggaactcctacgcgaagaaactggcgctgcgctaaaaccaaggctgccagcaccgccaccagtgacgacaccaccacttgcaggcgggagcagcaccgaggatagtagatcagaggaggtggaggagcagacaacagtcgcaagcttaggggcacaaaccctgcctggttcagattctgtgtccacttgggacggcagcgtgaggaccccgggaggaagggtcaaggaagggggactcaagggacaaaagggagaacctggtgttcccggcccccccggtcgagcggggccccccggaagtccttgcctgccgggacctcccgggctgccctgccccgtgagccctctggggccagccggtcctgctcttcagaccgtgcctggcccccagggaccccccggtcctcccggaagggacggtacacccggcagagatggtgagcctggggaccccggagaagacggcaaacccggggacactggcccacaagggtttccagggactccaggcgatgtagggcccaaaggggataagggtgatcccggggtgggtgaacgcgggcctccagggcctcagggaccaccaggtcccccaggccccagcttccggcatgataaactcactttcatcgatatggagggatcaggatttggcggcgaccttgaggccctgcggggaccaaggggattccccggccccccaggcccccctggcgtgcctgggttgcccggcgaacctggacgatttggagttaactcctctgacgtgccgggacccgctgggctgcccggagttcctggtcgggaaggccctcccggctttcccggactgcctggccctcctggacctcctggccgagagggcccgccagggcgcacaggccaaaaagggtctctaggggaagctggtgccccagggcacaaagggtccaagggagcccccggccccgctggggcgagaggggagagtgggctggctggggcccccgggcccgctggccctcctggaccacctggacctcccgggccccccgggcctggactgccagccggatttgatgacatggaaggctcgggagggcctttctggtctaccgcacggagcgcagatgggcctcaggggccccccgggttacccggccttaagggcgatccaggggtcccaggtttaccaggcgccaaaggggaggtcggcgctgatggggtgccgggtttccctggattgcctgggagggaaggtatcgctggacctcagggacctaaaggagatagggggagccgtggggagaaaggtgatcccggaaaagatggcgtggggcagccaggcttgccgggccctcctggcccacctggacccgttgtatacgtcagcgagcaggatggaagcgtcctatcagtacccggccctgaaggccgaccggggttcgctggcttcccaggtccggctggaccgaagggcaatctgggatcaaagggagaaaggggttcaccagggcctaaaggcgagaagggggaaccaggcagcatttttagccctgatgggggagctttaggccccgctcagaagggtgcgaagggtgaacccggattccgaggtcccccaggcccatatggcagacccggatataagggtgagataggcttcccagggcgcccaggccgtccagggatgaatggtttgaaaggagaaaaaggagaacctggggacgccagcttaggtttcggaatgcgggggatgcctggtccacccggcccaccaggtcctccaggacctcccggcacgccagtctatgatagtaacgtcttcgctgaaagcagccgtcccggcccccccggactcccggggaaccagggaccccctgggcccaagggtgccaaaggagaggtcgggcccccagggccgccaggacagttcccctttgatttcttacagctggaagccgagatgaagggggagaaaggcgatagaggagacgccggacaaaagggcgaacggggcgaacccggaggagggggttttttcggttccagcctcccagggccgccggggcctcccgggccccctggacccagaggctacccaggaattcctggcccaaaaggagaatccatcaggggtcaacctgggccccccgggcctcaggggcctccaggaattggctatgagggaaggcaaggtccacctgggcctcctggacctccaggacccccgtcattcccaggcccgcataggcaaactatctcagtacctggcccccctggtcctccagggccgcccgggcctcccggaacaatgggtgcatcctcaggggtgagattgtgggccacgcgtcaagcaatgctgggtcaggttcatgaggtacccgaaggttggctgatcttcgttgccgaacaggaagagctgtacgtgcgagttcaaaacggcttcagaaaggttcaacttgaggcccgcacacccctgccaagaggcacagataatgaggtggcagcgctacagccacccgttgtccaactgcacgactctaacccttaccctcgacgcgagcatccgcaccctacagctagaccgtggcgagctgatgatatcctggcctcgccacctcgactcccggaacctcagccctaccccggcgctccccatcattcctcctacgtgcatctgcggcccgcccggcctacctcgccaccagcacactcccaccgtgatttccagccggtgctccatttagtcgctctcaactcccccctgagcggtggtatgaggggcattcgtggcgcagatttccagtgcttccagcaggcacgcgcagtaggcctcgcgggaacatttagggctttcctgagctccaggctccaagacttgtactcgatcgtacggagagccgatagagctgccgtgcccattgtcaatctgaaggacgagctgttgttccccagctgggaggcgctgttctctggatcagaaggccctttgaaacccggtgcacggatcttttcatttgacggcaaggacgtgctccgccatccgacatggccacaaaagtctgtctggcatggttctgatcccaacggccgccggttgacagaatcgtactgtgagacatggcgcacagaggccccctccgcaacagggcaggcctcctcccttcttggtggccgtctgcttggccagtctgcagctagttgccaccacgcctacatcgtgttgtgcattgaaaattcgtttatgacagcctcaaaatag

SEQ ID NO: 219253 - DNA, 4560 bp, Artificial Sequence
  derived and/or modified sequence
atggccccctacccctgtggctgccacatcctgctgctgctcttctgctgcctggccgccgcccgggccaacctgctgaacctgaactggctgtggttcaacaatgaagacaccagccatgctgccaccaccatccctgagccccagggccccctgcctgtgcagcccacagctgacaccaccacccacgtgaccccaagaaatggcagcacagagcccgccacagcccctggcagccctgagccccccagcgagctgctggaggatggccaggacacccccaccagcgctgagagcccagatgccccagaagaaaatattgctggggtgggcgctgagatcctgaatgtggccaagggcatccgcagctttgtgcagctgtggaatgacacagtgcccacagagagcctggcccgggcagagaccctggtgctggagacccctgtgggccccctggccctggccggccccagcagcaccccccaggagaatggcaccaccctgtggcccagccggggcatccccagcagccctggggcccacaccacagaagctggcaccctgcctgcccccacccccagcccccccagcctgggccggccctgggcccccctgaccggccccagcgtgcccccacccagcagcgagcgcatcagcgaggaggtgggcctgctgcagctgctgggggaccccccaccccagcaggtgacccagacagatgatcctgatgtgggcctggcctacgtgtttggaccagatgccaacagcggccaggtggcccgctaccacttccccagcctcttcttccgggacttcagcctgctcttccacatccggcctgccacagagggccctggggtgctgtttgccatcacagacagcgcccaggccatggtgctgctgggcgtgaagctgagcggcgtgcaggacggccaccaggacatcagcctgctgtacacagagcccggggccggccagacccacacagctgccagcttccggctgcctgcctttgtgggccagtggacccacctggccctgtctgtggccggcggctttgtggccctgtatgtggactgtgaggagttccagaggatgcccctggcccggagcagccggggcctggagctggagcctggagctggcctgtttgtggcccaggccggcggcgctgaccctgacaagttccagggcgtgattgctgagctgaaggtgcggcgggacccccaggtgagccccatgcactgcctggatgaggagggagatgacagtgatggagccagcggggacagcggcagcggcctgggagatgcccgggagctgctgcgggaggagaccggggccgccctgaagccccggctgcctgcccctcctcctgtgaccaccccacccctggccggcggcagcagcacagaggacagccgctctgaggaggtggaggagcagaccaccgtggccagcctgggcgcccagaccctgcccggcagtgacagcgtgtccacctgggatggctctgtgaggaccccaggcggccgggtgaaggagggcggcctgaagggccagaagggggagcccggggtgcccggccccccaggccgggccggccccccaggcagcccctgcctgcccggccccccaggcctgccctgccctgtgagccccctgggccctgctggccctgccctgcagacagtgcccggcccccagggccccccaggccccccaggaagagatggcaccccaggaagagatggagagcccggggaccccggggaggatggcaagccaggggacaccggcccccagggcttccctggcaccccaggagatgtgggccccaagggggacaagggggaccccggggtgggggagcggggccccccaggcccccagggccccccaggccccccaggccccagcttcagacatgacaagctgaccttcatcgacatggagggcagcggctttggaggagacctggaggccctgcggggcccccggggcttccctggccccccaggccccccaggagtgcccggcctgcccggggagcccggccgcttcggcgtgaacagcagtgatgtgcccggccctgctggcctgcccggggtgcccggccgggagggccccccaggcttccctggcctgcccggccccccaggccccccaggccgggagggccccccaggccgcacaggccagaagggcagcctgggggaggccggggcccctggccacaagggcagcaagggggcccctggccctgctggggcccggggggagagcggcctggccggggcccctggccctgctggccccccaggccccccaggccccccaggccccccaggccctggcctgcctgctggctttgatgacatggagggcagcggcggccccttctggagcacagcccggtctgcagatggcccccagggccccccaggcctgcccggcctgaagggggaccccggggtgcccggcctgcccggggccaagggggaggtgggcgcagatggagtgcccggcttccctggcctgcccggccgggagggcattgctggcccccagggccccaagggggaccggggcagcagaggagagaagggggaccccgggaaggatggagtgggccagcccggcctgcccggccccccaggccccccaggccctgtggtgtatgtgtctgagcaggacggctctgtgctgtctgtgcccggccctgagggccggcccggctttgctggcttccctggccctgctggccccaagggcaacctgggcagcaagggggagcggggcagccctggccccaagggggagaagggggagcccggcagcatcttctccccagatggaggagccctgggccctgcccagaagggggccaagggggagcccggcttccggggccccccaggcccctacggccggcccggctacaagggggagatcggcttccctggccggcccggccggcccggcatgaatggcctgaagggggagaagggggagcctggagatgccagcctgggcttcggcatgaggggcatgcctggccccccaggccccccaggccccccaggccccccaggcacccctgtgtatgacagcaatgtgtttgctgagagcagcaggcctggccccccaggcctgcccggcaaccagggccccccaggccccaagggggccaagggggaggtgggccccccaggccccccaggccagttcccctttgacttcctgcagctggaggccgagatgaagggggagaagggggacagaggagatgctggccagaagggggagcggggggagcccggcggcggcggcttcttcggcagcagcctgcccggccccccaggccccccaggccccccaggcccccggggctacccaggcatccctggccccaagggggagagcatccggggccagcccggccccccaggcccccagggccccccaggcatcggctatgagggccggcagggccccccaggccccccaggccccccaggccccccatccttccctggcccccaccggcagaccatctctgtgcccggccccccaggccccccaggccccccaggccccccaggcaccatgggcgccagcagcggcgtgcggctgtgggccacccggcaggccatgctgggccaggtgcatgaggtgcctgagggctggctgatctttgtggccgagcaggaggagctgtatgtgcgggtgcagaatggcttcaggaaggtgcagctggaggcccggacccccctgccccggggcacagacaatgaggtggccgccctgcagccccctgtggtgcagctgcatgacagcaacccctacccccggcgggagcacccccaccccacagcccggccctggagggcagatgacatcctggccagccccccccggctgcctgagccccagccctacccaggggccccccaccacagcagctatgtgcacctgcggcctgcccggcccaccagccccccagcccacagccaccgggacttccagcctgtgctgcacctggtggccctgaacagccccctgagcggcggcatgaggggcatcagaggagctgacttccagtgcttccagcaggcccgggctgtgggcctggccggcaccttccgggccttcctgagcagccggctgcaggacctgtacagcatcgtgcggcgggctgacagagctgctgtgcccatcgtgaacctgaaggatgagctgctcttccccagctgggaggccctcttcagcggcagcgagggccccctgaagccaggggcccgcatcttctcctttgatggcaaggatgtgctgcggcaccccacctggccccagaagtctgtgtggcacggcagtgaccccaacggccggcggctgacagagagctactgtgagacctggaggacagaggcccccagcgccaccggccaggccagcagcctgctgggcggccgcctgctgggccagagcgctgccagctgccaccacgcctacatcgtgctgtgcattgaaaattccttcatgacagccagcaagtag

SEQ ID NO: 219254 - DNA, 4560 bp, Artificial Sequence
  derived and/or modified sequence
atggccccctacccctgcggctgccacatcctgctgctgctgttctgctgcttggccgccgcacgggcaaatctactgaatctgaactggctctggttcaacaatgaagacactagccacgcggcaacaaccatcccagagcctcagggtcctttaccagtgcagcctaccgctgacaccaccacccatgttactcccaggaacgggtcaacggaaccagccaccgctcctggctctccggaaccgccatctgagcttctcgaagacggacaagatacccccacgtctgctgagtctccagacgctcctgaggagaatattgccggagtgggagctgaaatccttaatgtggcaaaagggatccgttcgtttgttcagctctggaatgacaccgtgcctaccgagtcactagcgcgggcagaaacacttgtgctagagaccccagttggccctctggcgctggcgggtccctcaagcacacctcaggagaacggaaccactctttggcccagtcggggcatcccctctagccccggcgcacacactacagaagctggcacactgcccgcccccacaccatccccgcctagcctgggccggccttgggcacctctgactggaccctccgtgccgcccccttcctccgaacgaatcagcgaggaggtcggattgcttcagcttctgggagatcccccgccccaacaagttacccagactgatgaccccgacgtgggactagcttatgttttcggtcccgatgccaactccgggcaggtggcaaggtatcacttccctagcctatttttccgcgacttcagcctcctgtttcatataaggccggccactgagggacctggggtgctgttcgccatcaccgatagcgctcaagctatggtgctgttgggcgtcaaactgtcaggagtgcaggacggccaccaggacatttcccttctttatactgagcctggcgccggacagacacacacagccgctagcttccggctgcccgcatttgtggggcagtggactcacctggctctgtcagtggccgggggcttcgtcgcactctatgtggactgcgaggaatttcagcgtatgcctctggcacggagttctagaggtctggagttggagcctggagccggtctcttcgtcgcacaggccggcggagctgatcctgacaaatttcagggggtgatagccgaattgaaagtccggagggacccccaggtgtcccccatgcactgcctggatgaagagggagatgactcggacggagcctccggcgattctggctccggactcggggacgctagagagctcctgcgcgaagaaacgggcgccgctctcaagcctagattaccagcaccccctccagtcaccactcccccgcttgcaggcggatcgagcaccgaggactcccggagcgaggaggtagaggagcaaaccacagttgcatcgcttggggcccagaccctgcctgggtctgatagcgtcagtacttgggacggcagtgttcgtactccaggcggcagagtcaaagaggggggtctgaagggccagaagggtgaaccaggagtgcctggaccgccaggcagagccggcccccctggaagtccctgtttgccgggcccccctgggctgccttgcccagtttcaccactaggaccggccggacccgccctacagaccgtcccaggccctcagggacctcccgggcctccaggccgggacggaacacccgggagagacggagagcccggcgaccccggcgaagatggcaagcccggggatacgggcccacagggattcccaggaacaccaggcgacgtaggtcccaagggcgataagggcgaccccggcgtgggcgagcgtggcccacctgggccacagggaccccctggccccccgggcccatctttccggcacgacaagcttaccttcattgacatggaggggtctgggtttggcggtgacctcgaagccctcaggggcccccggggattccctggacctcctggcccgccaggagttccggggttgcctggcgaaccaggcagatttggcgtgaatagtagcgacgtgcccggaccagccggcctccccggcgtcccggggcgcgaggggccgcccggttttcctggtctcccaggcccccccggccccccaggccgggaagggccacccggcaggactggccaaaaaggaagcctgggagaggctggcgcaccggggcacaaggggtctaagggagcaccaggccctgctggagctagaggtgaatcaggtctcgcaggcgcccctggtccagcgggccccccgggacccccagggcctccagggccgccagggcctgggctgccagcaggcttcgacgatatggagggctccgggggcccgttctggtcgacagcaagatccgccgacggtccccagggtccccccggactgccggggttgaagggagacccaggcgttcctggattgcctggcgccaagggcgaggtcggcgcggatggcgtgccaggatttccagggttgcctggacgagagggtattgcaggcccacaggggcctaagggggacaggggatcacgaggggagaagggagatccggggaaggatggggtggggcaacctggtctgccggggccaccgggaccaccgggcccagtcgtgtatgtcagcgagcaggatggatcagtcctgtcagtgcccggcccggagggtaggccagggttcgcaggattcccagggccagcgggcccaaagggtaacctcgggtctaagggagagagaggttcccctggccccaagggagaaaagggagagccaggcagtattttttctccggacggtggcgccctgggacccgcccagaagggcgctaagggggaacctggttttcgcggaccccctgggccctacggacggccagggtacaagggagagatcggatttcccggaaggcctggtcggcccggcatgaacggattaaagggggagaaaggggagccaggcgatgccagtttaggattcggtatgaggggcatgccaggcccgcccggtcccccagggccaccaggccctcccggaacccctgtttacgattcgaacgtgtttgccgagagttccaggcctggacccccaggactccccggcaatcagggacctccgggacccaaaggggctaaaggtgaagtgggaccacccgggcccccaggccaattccctttcgattttctgcagttagaagccgagatgaagggtgagaagggcgaccgaggcgatgcaggccagaaaggtgaacgcggcgaacccgggggggggggattttttggaagcagcctgcctggcccccctggacctcctggacctccaggccctaggggctaccctggcatacctgggccaaaaggcgagtctatccgtggccagccagggccccccggaccacagggcccccccggaattggttatgaaggaagacagggacccccagggcccccaggcccacctggcccaccttctttccctggccctcaccgacagacgataagcgtgcccggtcctccagggccccctgggcctcccgggcccccagggacaatgggagcttcctcaggcgtgaggctgtgggccacaaggcaggccatgttgggtcaggtgcacgaggtgcctgaagggtggctcatcttcgtggccgaacaggaagagctctacgtcagagtccaaaatggctttagaaaggtccagctggaggcccgaactccactcccccgtggtaccgacaatgaggtggctgcactccagcctcctgttgtgcagctccatgattccaacccctaccctcgtagagaacatccacatcccacagcgaggccctggcgtgcggacgacatcctggcatcaccacccagattgcctgaacctcagccgtaccctggagcgcctcaccactcctcatatgtgcacttgaggcctgcccggcctacaagtcctcccgcacattctcaccgcgatttccagcctgtgcttcacctggtagccctgaatagcccactctcgggtggaatgaggggtattagaggcgccgatttccagtgtttccagcaggcccgggccgtgggcctagccggtactttccgagcctttctgtccagtcgactgcaggatttgtatagtattgtccggcgcgcggacagagccgctgtgcccatcgtcaatttgaaagatgaattactgtttccttcttgggaagccctgtttagcggttccgagggccccctgaagcccggcgcacggattttcagctttgatgggaaggacgttttgcgccacccgacctggcctcagaagtccgtttggcatggtagtgatcctaatggccgtagactgaccgagtcttattgtgagacgtggaggactgaagcaccaagcgccaccggacaggcatcttccctgctaggaggaagacttctgggacagtctgccgcctcatgccatcatgcctacatcgtgctttgtatcgagaattcatttatgacagcgagcaaatag

SEQ ID NO: 219255 - DNA, 4560 bp, Artificial Sequence
  derived and/or modified sequence
atggcaccctatccctgcggatgtcacatcctgcttctgcttttttgctgcctcgcagccgcacgcgctaacttgcttaatttgaactggctgtggttcaacaacgaggacacatcacacgcagcaacgacaatccccgagccacaggggcctctccccgtgcagcctaccgccgatacaactacacacgtaacgccacgcaatgggagtaccgagccagccacagctcctggatcccctgagcctccatctgagctactcgaggacggccaggatacccccacttccgcagagtcacctgacgcgcctgaagagaacatcgccggagtcggagcagagattctcaatgttgcgaagggcattagatcatttgtccagctttggaacgataccgtgccaaccgaatccctggcacgggcagaaaccctggttcttgaaactccagtggggcctctggccctggctggaccttcatcgacaccccaggaaaatggtaccacactgtggccatctagagggattccgtctagcccaggggctcacacgacagaagccggtactctccctgcccctacgcccagtcccccatcccttggccgtccctgggcccctctcaccgggccaagcgtcccgccaccctcgtcagagcggatcagtgaggaagtgggcctgttgcagctgcttggagaccctccccctcagcaggtgacacagacagacgatcctgacgtcggcctagcatatgtcttcgggccagatgcaaacagcggtcaggtggcacggtatcacttccctagcttattttttagagacttttccttgctctttcacatccggcctgcaactgaaggcccaggagtactttttgcaattacggactccgcccaagctatggtgctgctgggcgtaaaactgagcggcgtccaggatgggcaccaggacatttcactgctgtacacggagccaggagctgggcaaactcataccgcagcctcatttcgcctgcccgcatttgtgggccaatggactcatctcgccctctctgtagctggcggattcgttgccctctatgtagattgtgaggagtttcaaagaatgcccctggcgagatcatcaaggggcctggagctggaaccaggcgcaggactctttgtggcccaagcgggaggcgctgatcccgataaatttcagggagtcatcgccgagctgaaggtgcgtcgggaccctcaagtatcaccgatgcattgtctggacgaagaaggtgatgactcagatggagcttctggcgacagtggctccggactgggtgacgcacgggagctgctgagggaggaaaccggggctgccctcaaaccaaggttgcctgccccacctcccgtgacgacgccacctttggcagggggaagtagtacagaggactcacggtcagaagaagttgaagagcaaaccacggtggctagtctgggcgctcagactctcccagggagcgatagtgtgagcacgtgggatggaagcgtgcgcacgccaggcggaagagtcaaagagggcggacttaagggtcaaaaaggagaacccggagttccaggccctcccggtcgagccggaccacctggatctccgtgccttcccggaccccctggtctgccctgtcctgtctctcccttgggccctgcgggacccgcattgcagaccgtccccggaccacaggggcctcctgggcctccgggaagagacggcacgcctgggcgtgatggagagcccggagatcccggagaagacggcaagcctggcgacaccggccctcagggtttccccggaacacctggcgatgttgggcctaaaggcgacaagggggatccgggtgttggagaacgaggacccccaggccctcagggaccaccgggaccgcctggaccgtcatttaggcatgataaactcacctttattgacatggaaggctctgggttcggaggagacctggaggctctgaggggaccaaggggcttcccagggcctcccggaccgccaggagtgcctggcctgccaggagagcctggcagattcggggtgaactcctcagacgtacccggtcccgctgggttgcccggagtcccgggtcgcgaaggaccacctgggttcccgggactgccaggaccacccggtcccccaggcagagagggcccaccaggacggactgggcagaagggaagcctgggcgaggccggtgctccagggcacaaggggagcaagggcgctccgggacctgccggtgcccgtggggaatcgggactggccggtgctcccggaccagccggacccccagggcctcccggaccacccggtccgcctggtcctgggctcccagctggattcgacgatatggaggggtcgggcggaccgttctggtcgacagctagatctgccgatggtccacaggggcctcccggtttgccaggtttgaagggcgatccgggagtgcctggtctgccaggcgctaagggagaggttggggctgacggcgtgcccggttttcctgggctcccaggccgagagggtatcgcaggaccacaagggcctaaaggcgataggggcagcagaggggagaaaggagatccaggcaaagatggagtcggccagcccggtctgcctggaccccctggccctcccggtccggtagtgtacgtctccgagcaggatggcagcgtgttgagtgttcccggacctgaagggaggccaggattcgctggcttccccggtccagctgggccaaaaggcaacctggggagcaaaggggagaggggctctccaggaccaaaaggtgagaaaggcgaacccggatccattttttctcccgatggcggtgcgctaggccctgctcaaaaaggtgctaaaggagaacccggatttaggggccctcccggaccctacggcagacccggatataagggggagataggcttccctggcagacccggtaggcccggaatgaatggtttaaaaggtgagaagggggaacctggcgacgcttcgctcggctttggaatgcgtggcatgcctggcccacctggtcctcctgggccaccaggacctccgggtactccggtgtatgacagtaacgtctttgcagagtcatcccggcctgggccacctggactcccgggtaaccagggacctcctgggccaaagggagccaagggcgaagtcgggcctcctgggcctccgggtcagttcccattcgacttcttgcagctggaagcagagatgaaaggcgagaagggggatagaggcgacgctggccagaagggggagagaggtgagccaggtggcggaggcttttttggctcaagcctccctggaccaccaggcccacctggcccacccggacctcgcggatatccagggatccctgggcctaagggagaaagcattcgcggtcagcctgggccaccaggcccacaaggaccccctggcattggttacgaaggcaggcagggccctccagggcctcccggtccacctgggccaccatctttcccaggaccccatagacagaccatatccgtgcccggaccccctgggccaccgggaccgccagggcctccagggaccatgggcgcttcgtccggcgtcaggttatgggccacacgtcaagcaatgctaggtcaagtgcatgaggtgccagagggatggttaatttttgtcgccgagcaagaggaactatatgttagagttcagaatggctttcggaaggtgcagcttgaggccagaacacctttaccaagagggacagacaatgaggtggccgcactccaaccccctgtggtgcagttacatgactcaaatccatatcctcggagggagcaccctcatcccacagccagaccatggcgtgccgacgacatcctcgcatcgcctccgcgactgcctgaacctcagccttaccctggagcccctcaccacagcagttatgtgcatctgaggcctgcaagacctaccagtccccctgcgcatagtcatcgtgatttccaacccgtcctgcaccttgttgcattaaattctcctctgtcaggaggtatgagagggattcgcggagccgattttcagtgctttcagcaggcccgagccgttggattagctgggacctttagggccttcctgagctccagactgcaagatctgtattccatcgtacggcgagctgaccgcgcagcagtgcccatagtcaacctgaaagacgagctgctgttcccttcctgggaggctttgttttctggttcagaggggcctctgaagccgggtgctcgaattttctccttcgatggcaaagacgtgcttcggcatccaacttggccccagaagtcggtgtggcacggtagcgaccccaacgggagacgtctgacagagagctattgcgagacatggcgcaccgaggcaccatctgccacagggcaagccagtagcctccttggcggacgcctgctgggccaatctgctgctagctgtcatcatgcttatatcgtcctgtgcatcgagaactccttcatgaccgcaagtaagtag

SEQ ID NO: 219256 - protein, 937 aa, Artificial Sequence
  derived and/or modified sequence
MEKMLAGCFLLILGQIVLLPAEARERSRGRSISRGRHARTHPQTALLESSCENKRADLVFIIDSSRSVNTHDYAKVKEFIVDILQFLDIGPDVTRVGLLQYGSTVKNEFSLKTFKRKSEVERAVKRMRHLSTGTMTGLAIQYALNIAFSEAEGARPLRENVPRVIMIVTDGRPQDSVAEVAAKARDTGILIFAIGVGQVDFNTLKSIGSEPHEDHVFLVANFSQIETLTSVFQKKLCTAHMCSTLEHNCAHFCINIPGSYVCRCKQGYILNSDQTTCRIQDLCAMEDHNCEQLCVNVPGSFVCQCYSGYALAEDGKRCVAVDYCASENHGCEHECVNADGSYLCQCHEGFALNPDKKTCTKIDYCASSNHGCQHECVNTDDSYSCHCLKGFTLNPDKKTCRRINYCALNKPGCEHECVNMEESYYCRCHRGYTLDPNGKTCSRVDHCAQQDHGCEQLCLNTEDSFVCQCSEGFLINEDLKTCSRVDYCLLSDHGCEYSCVNMDRSFACQCPEGHVLRSDGKTCAKLDSCALGDHGCEHSCVSSEDSFVCQCFEGYILREDGKTCRRKDVCQAIDHGCEHICVNSDDSYTCECLEGFRLAEDGKRCRRKDVCKSTHHGCEHICVNNGNSYICKCSEGFVLAEDGRRCKKCTEGPIDLVFVIDGSKSLGEENFEVVKQFVTGIIDSLTISPKAARVGLLQYSTQVHTEFTLRNFNSAKDMKKAVAHMKYMGKGSMTGLALKHMFERSFTQGEGARPLSTRVPRAAIVFTDGRAQDDVSEWASKAKANGITMYAVGVGKAIEEELQEIASEPTNKHLFYAEDFSTMDEISEKLKKGICEALEDSDGRQDSPAGELPKTVQQPTVQHRYLFEEDNLLRSTQKLSHSTKPSGSPLEEKHDQCKCENLIMFQNLANEEVRKLTQRLEEMTQRMEALENRLRYR

SEQ ID NO: 219257 - DNA, 2814 bp, Artificial Sequence
  derived and/or modified sequence
atggagaagatgctggcaggctgctttttgcttatcctgggacagattgtcctgctgccagccgaggctagagagagatccagaggtcggtccattagcaggggccgacacgccaggacgcatccacagactgctctgcttgagtcctcgtgcgaaaacaagcgagcggaccttgtgttcattattgacagctctagaagtgtgaatactcatgattacgcaaaggtgaaagagttcattgtggacatccttcagttcctggatattgggcctgacgttactagagttggactcctccagtacggatctactgttaagaatgagttttccttaaagaccttcaaacgcaagtcagaagtcgagagggccgtgaagcgcatgagacacctgagcaccgggactatgacaggcttagccattcagtacgctctcaacatagcattcagcgaggctgagggtgcccggcccctacgcgaaaacgtacccagagtaatcatgatcgtgacagacgggcggccgcaggatagcgtggccgaggtggccgctaaggcccgcgataccggcattcttatatttgccattggcgtgggacaggtggatttcaacacactaaaatctataggctcagaaccccacgaggatcatgtcttcttggtagccaacttctcccaaattgaaacgctaacatcggtatttcaaaaaaaactgtgcacagctcacatgtgtagtactttagaacacaattgtgcccacttttgcataaatattcctggaagctatgtctgcaggtgtaaacaggggtacatactgaattcggaccagacaacctgtaggatccaggacttgtgcgctatggaagatcacaactgtgagcagctgtgcgtgaacgtgcccgggtccttcgtgtgccagtgttacagcggttacgcactcgctgaggatggcaaacggtgtgttgctgttgattattgcgcgtcggagaatcacggatgtgagcatgaatgcgtgaatgctgatgggagttacctgtgccaatgccacgagggattcgcactgaatcccgacaagaaaacatgcaccaaaatcgactactgtgctagtagtaaccatgggtgccagcatgagtgcgtgaacacggacgattcatatagttgtcactgcctgaaaggattcacactcaacccagataagaaaacttgtagaagaattaattactgtgccttaaacaagcctggctgcgaacatgagtgtgtgaatatggaagagagttactactgcagatgtcaccgcggatacaccttggatcctaatgggaaaacgtgctcccgagtcgaccactgtgctcaacaggatcatgggtgtgaacagctgtgtctgaacaccgaggacagctttgtgtgccaatgttcagaaggcttcctgatcaatgaggatcttaagacatgtagccgagttgactactgcctgctgtcagatcacgggtgcgaatatagttgtgtgaatatggacaggtcctttgcctgtcagtgtcccgaggggcatgtgttgcggtccgatggcaaaacgtgtgccaagctcgatagttgcgccctcggcgatcacggatgcgagcattcttgcgtgtcttcggaagacagcttcgtgtgtcagtgctttgaaggctatatattgagggaggacggaaagacttgtcgtaggaaagatgtgtgtcaggctatagaccatgggtgtgaacacatctgtgtgaacagcgacgactcttacacttgcgaatgtctggagggtttccgtctcgctgaagatggaaagaggtgcaggaggaaagatgtttgcaagtcgactcaccacggttgcgagcacatctgcgtaaacaacgggaacagttatatttgcaaatgtagcgaggggttcgtgctggctgaggacggacgcaggtgtaagaagtgtaccgagggtccgatagaccttgtatttgtgatagatggtagcaagagtctgggagaggaaaatttcgaagtggtaaaacagttcgtgactggaatcattgactcgcttacaatcagtccgaaggcagccagagtaggcctcctgcagtacagcacccaggtgcataccgagttcacactgcggaacttcaactctgccaaggatatgaaaaaggccgttgctcatatgaagtacatgggaaagggttccatgactgggctagcacttaaacacatgtttgagcgtagttttactcaaggggaaggtgcaagaccactctcaacacgggttccccgcgccgccattgtgtttaccgacggcagagcccaagacgatgtgtccgaatgggctagcaaggcaaaggcgaatggaatcaccatgtacgcagtaggagtcgggaaggctattgaagaggaattgcaggagatcgccagtgagccaaccaataagcacctattctacgcagaggacttcagcaccatggatgagatctctgaaaaacttaagaagggtatttgcgaggctctggaggatagcgacgggcggcaggatagtcccgcaggggagctacctaagaccgttcagcagccgacagtccagcacagatatctgttcgaggaagacaatcttctgaggtccacacaaaagcttagtcactccaccaagcccagcggatccccactggaggaaaagcatgatcagtgcaagtgcgagaacctgattatgttccagaacctggctaatgaagaggtgagaaagctgactcaaaggctcgaggagatgactcagcgcatggaggccctggagaacagattacgttatcgctag

SEQ ID NO: 219258 - DNA, 2814 bp, Artificial Sequence
  derived and/or modified sequence
atggagaagatgctggccggctgcttcctgctgatcctgggccagatcgtgctgctgcctgctgaggcccgggagaggagccggggccgcagcatcagccggggcagacatgcccggacccacccccagacagccctgctggagagcagctgtgagaacaagagagctgacctggtgttcatcatcgacagcagccgctctgtgaacacccatgactatgccaaggtgaaggagttcatcgtggacatcctgcagttcctggacattggaccagatgtgaccagggtgggcctgctgcagtatggcagcacagtgaagaatgagttcagcctgaagaccttcaagaggaagtctgaggtggagagagctgtgaagaggatgaggcacctgagcacaggcaccatgacaggcctggccatccagtatgccctgaacatcgccttcagcgaggccgagggcgcccggcccctgagagaaaatgtgcccagggtcatcatgattgtgacagatggccggccccaggacagcgtggccgaggtggccgccaaggcccgggacaccggcatcctgatctttgccatcggcgtgggccaggtggacttcaacaccctgaagagcatcggcagcgagccccatgaagatcatgtgttcctggtggccaacttcagccagatcgagaccctgaccagcgtcttccagaagaagctgtgcacagcccacatgtgcagcaccctggagcacaactgtgcccacttctgcatcaacatccctggcagctatgtgtgccgctgcaagcagggctacatcctgaacagcgaccagaccacctgccgcatccaggacctgtgtgccatggaggaccacaactgtgagcagctgtgtgtgaatgtgcccggcagctttgtgtgccagtgctacagcggctacgccctggctgaagatggcaagagatgtgtggccgtggactactgtgcctctgaaaatcatggctgtgaacatgaatgtgtgaatgctgatggcagctacctgtgccagtgccacgagggctttgccctgaacccagacaagaagacctgcaccaagattgactactgtgccagcagcaaccacggctgccagcatgaatgtgtgaacacagatgacagctacagctgccactgcctgaagggcttcaccctgaacccagacaagaagacctgccgccgcatcaactactgtgccctgaacaagccaggctgtgaacatgaatgtgtgaacatggaggagagctactactgccgctgccaccggggctacaccctggaccccaacgggaagacctgcagccgggtggaccactgtgcccagcaggaccacggctgtgagcagctgtgcctgaacacagaggacagctttgtgtgccagtgcagcgagggcttcctgatcaatgaagacctgaagacctgcagccgggtggactactgcctgctgagtgaccacggctgtgagtacagctgtgtgaacatggacaggagctttgcctgccagtgcccagagggccacgtgctgcggagtgatggcaagacctgtgccaagctggacagctgtgccctgggggaccacggctgtgagcacagctgtgtgtcctctgaggacagctttgtgtgccagtgctttgagggctacatcctgagagaagatggcaagacctgcaggaggaaggatgtgtgccaggccatcgaccacggctgtgagcacatctgtgtgaacagtgatgacagctacacctgtgaatgtctggagggcttccggctggccgaggatggcaagcgctgcaggaggaaggatgtgtgcaagagcacccaccacggctgtgagcacatctgtgtgaacaatggaaacagctacatctgcaagtgcagcgagggctttgtgctggctgaagatggccgccgctgcaagaagtgcacagagggccccatcgacctggtgtttgtgattgatggcagcaagagcctgggggaggagaactttgaggtggtgaagcagtttgtgacaggcatcatcgacagcctgaccatcagccccaaggccgcccgggtgggcctgctgcagtacagcacccaggtgcacacagagttcaccctgaggaacttcaacagcgccaaggacatgaagaaggctgtggcccacatgaagtacatgggcaagggctccatgacaggcctggccctgaagcacatgtttgagaggagcttcacccagggcgagggcgcccggcccctgagcaccagggtgccccgggccgccatcgtgttcacagatggccgggcccaggatgatgtgtctgagtgggccagcaaggccaaggccaacggcatcaccatgtatgctgtgggcgtgggcaaggccatcgaggaggagctgcaggagatcgccagcgagcccaccaacaagcacctgttctatgcagaggacttcagcaccatggatgagatcagcgagaagctgaagaagggcatctgtgaggccctggaggacagtgatggccggcaggacagccctgctggggagctgcccaagacagtgcagcagcccaccgtgcagcaccgctacctgtttgaggaggacaacctgctgcggagcacccagaagctgagccacagcaccaagcccagcggcagccccctggaggagaagcatgaccagtgcaagtgtgagaacctgatcatgttccagaacctggccaatgaggaggtgaggaagctgacccagaggctggaggagatgacccagaggatggaggccctggagaaccggctgcgctacagatag

SEQ ID NO: 219259 - DNA, 3554 bp, Artificial Sequence
  derived and/or modified sequence
gatgcccgcctgggctcaggcacggacggagtggagccaggtggcagcaggcagggcgcgccgccagagtgcccagctcccggggctgcccacagggtggggccgccctcgccgccgctccctctccgcgccttccccatccccaaagaggacacccctccttccgcccggcccgctccccacccccgccgcggcaccgcctccccagccgcccgcccttgcccagcgcctcccaggcagccagcgagcgaagggagcgctctgggatgggacttggagcaagcggcggcggcggagacagaggcagaggcagaagctggggctccgtcctcgcctcccacgagcgatccccgaggagagccgcggccctcggcgaggcgaagaggccgacgaggaagacccgggtggctgcgcccctgcctcgcttcccaggcgccggcggctgcagccttgcccctcttgctcgccttgaaaatggaaaagatgctcgcaggctgctttctgctgatcctcggacagatcgtcctcctccctgccgaggccagggagcggtcacgtgggaggtccatctctaggggcagacacgctcggacccacccgcagacggcccttctggagagttcctgtgagaacaagcgggcagacctggttttcatcattgacagctctcgcagtgtcaacacccatgactatgcaaaggtcaaggagttcatcgtggacatcttgcaattcttggacattggtcctgatgtcacccgagtgggcctgctccaatatggcagcactgtcaagaatgagttctccctcaagaccttcaagaggaagtccgaggtggagcgtgctgtcaagaggatgcggcatctgtccacgggcaccatgactgggctggccatccagtatgccctgaacatcgcattctcagaagcagagggggcccggcccctgagggagaatgtgccacgggtcataatgatcgtgacagatgggagacctcaggactccgtggccgaggtggctgctaaggcacgggacacgggcatcctaatctttgccattggtgtgggccaggtagacttcaacaccttgaagtccattgggagtgagccccatgaggaccatgtcttccttgtggccaatttcagccagattgagacgctgacctccgtgttccagaagaagttgtgcacggcccatatgtgcagcaccctggagcataactgtgcccacttctgcatcaacatccctggctcatacgtctgcaggtgcaaacaaggctacattctcaactcggatcagacgacttgcagaatccaggatctgtgtgccatggaggaccacaactgtgagcagctctgtgtgaatgtgccgggctccttcgtctgccagtgctacagtggctacgccctggctgaggatgggaagaggtgtgtggctgtggactactgtgcctcagaaaaccacggatgtgaacatgagtgtgtaaatgctgatggctcctacctttgccagtgccatgaaggatttgctcttaacccagataaaaaaacgtgcacaaagatagactactgtgcctcatctaatcacggatgtcagcacgagtgtgttaacacagatgattcctattcctgccactgcctgaaaggctttaccctgaatccagataagaaaacctgcagaaggatcaactactgtgcactgaacaaaccgggctgtgagcatgagtgcgtcaacatggaggagagctactactgccgctgccaccgtggctacactctggaccccaatggcaaaacctgcagccgagtggaccactgtgcacagcaggaccatggctgtgagcagctgtgtctgaacacggaggattccttcgtctgccagtgctcagaaggcttcctcatcaacgaggacctcaagacctgctcccgggtggattactgcctgctgagtgaccatggttgtgaatactcctgtgtcaacatggacagatcctttgcctgtcagtgtcctgagggacacgtgctccgcagcgatgggaagacgtgtgcaaaattggactcttgtgctctgggggaccacggttgtgaacattcgtgtgtaagcagtgaagattcgtttgtgtgccagtgctttgaaggttatatactccgtgaagatggaaaaacctgcagaaggaaagatgtctgccaagctatagaccatggctgtgaacacatttgtgtgaacagtgatgactcatacacgtgcgagtgcttggagggattccggctcgctgaggatgggaaacgctgccgaaggaaggatgtctgcaaatcaacccaccatggctgcgaacacatttgtgttaataatgggaattcctacatctgcaaatgctcagagggatttgttctagctgaggacggaagacggtgcaagaaatgcactgaaggcccaattgacctggtctttgtgatcgatggatccaagagtcttggagaagagaattttgaggtcgtgaagcagtttgtcactggaattatagattccttgacaatttcccccaaagccgctcgagtggggctgctccagtattccacacaggtccacacagagttcactctgagaaacttcaactcagccaaagacatgaaaaaagccgtggcccacatgaaatacatgggaaagggctctatgactgggctggccctgaaacacatgtttgagagaagttttacccaaggagaaggggccaggcccctttccacaagggtgcccagagcagccattgtgttcaccgacggacgggctcaggatgacgtctccgagtgggccagtaaagccaaggccaatggtatcactatgtatgctgttggggtaggaaaagccattgaggaggaactacaagagattgcctctgagcccacaaacaagcatctcttctatgccgaagacttcagcacaatggatgagataagtgaaaaactcaagaaaggcatctgtgaagctctagaagactccgatggaagacaggactctccagcaggggaactgccaaaaacggtccaacagccaacagtgcaacacagatatctgtttgaagaagacaatcttttacggtctacacaaaagctttcccattcaacaaaaccttcaggaagccctttggaagaaaaacacgatcaatgcaaatgtgaaaaccttataatgttccagaaccttgcaaacgaagaagtaagaaaattaacacagcgcttagaagaaatgacacagagaatggaagccctggaaaatcgcctgagatacagatgaagattagaaatcgcgacacatttgtagtcattgtatcacggattacaatgaacgcagtgcagagccccaaagctcaggctattgttaaatcaataatgttgtgaagtaaaacaatcagtactgagaaacctggtttgccacagaacaaagacaagaagtatacactaacttgtataaatttatctaggaaaaaaatccttcagaattctaagatgaatttaccaggtgagaatgaataagctatgcaaggtattttgtaatatact

SEQ ID NO: 219260 - DNA, 2814 bp, Artificial Sequence
  derived and/or modified sequence
atggagaagatgctggccggctgcttcctgctgatcctgggccagattgtgttactgcctgccgaggcaagggagcgaagtcgagggagatccatttccagaggaagacatgcgagaactcacccacaaacagctttgctcgaaagcagctgtgagaataaaagggcagacctggtgtttatcatcgatagcagccgcagcgtgaacacgcatgattacgcaaaagtcaaagaatttatagtagatatactgcagttcctggatattggacctgatgtaacccgcgtcggtcttttacagtatggctccacagtcaagaacgaattctctctcaaaaccttcaaacggaagtcagaggtagagagggctgttaaacgtatgagacacctgagtacgggcaccatgactggcctagctatccagtacgctctcaacattgcgtttagcgaggccgaaggcgctcgacccctgagagagaatgtgccgcgagtgattatgatcgtgactgatggtagaccccaggacagcgttgccgaggttgcagcaaaggctcgcgataccggcatactcatcttcgctattggcgtgggtcaggtggatttcaataccctgaaaagtatcggctccgaaccacacgaggatcatgtctttctggttgcaaatttttcacagatagagacccttacctcagttttccagaaaaaactgtgtacagcacatatgtgctctaccctggagcacaactgcgcccatttctgcataaacattcccgggtcctatgtgtgcagatgcaagcagggctatatcctgaattcagatcaaaccacatgccggatacaggacctctgtgcaatggaggaccacaattgtgaacagctgtgcgtcaatgtcccagggtctttcgtctgccaatgctatagcggttatgcactggccgaagacggtaagcggtgcgtggcagtggactactgcgcctctgaaaatcatggttgtgagcacgagtgcgtgaacgccgacggaagttacctgtgtcaatgccatgagggctttgcactgaatcctgataagaagacatgcacaaagatagactactgtgccagctccaaccacggctgccagcatgaatgcgtgaacactgacgattcctatagctgccactgcttgaaggggttcacattgaaccctgacaagaaaacctgtcgcagaattaattattgcgcattaaacaaacctgggtgtgaacacgaatgtgtcaacatggaggaatcctactactgccgctgccaccgaggctacactctggacccaaacggaaagacctgttcacgagtggaccactgtgcccagcaggaccacggctgcgaacagctctgcctgaatacagaggacagtttcgtctgccagtgttccgaaggctttcttatcaacgaggacctcaagacttgtagccgcgtcgactactgtttattgagcgatcatggatgcgagtatagctgtgttaatatggacagatcatttgcttgccagtgccccgagggccacgttctcagaagtgacggaaagacatgcgcgaagctggactcgtgcgcgctgggtgaccatggatgtgaacacagttgcgtgagttccgaagacagcttcgtttgtcaatgctttgaagggtacatcctccgcgaagacgggaaaacatgccgccggaaggatgtttgtcaggccatcgaccatggctgcgagcatatttgtgtcaattccgacgacagttacacgtgcgaatgcctcgaggggtttcggttggccgaagacggcaagagatgtaggcggaaagatgtgtgcaagagcacccatcatggttgcgaacacatctgcgttaacaacggcaactcttatatttgtaaatgctcggaggggtttgtcctggcagaggatggccgcagatgcaaaaaatgtaccgaaggccccattgacctcgtttttgtaattgatgggagcaagagcctgggtgaagagaactttgaagtggtaaaacagtttgtgacaggaattatagatagcctgaccatctctcccaaagcggccagagtcggcttgctgcagtattccactcaggtgcacacagagttcacccttcgtaactttaattctgccaaagatatgaagaaagctgtcgcccacatgaagtacatgggcaagggatctatgactggacttgccctgaagcatatgttcgaaaggtcctttactcaaggcgagggtgctaggcctctgtccacccgcgttcccagagctgccatagtattcactgatgggagggctcaggatgacgtgagcgagtgggcttccaaagccaaggcaaatgggataaccatgtatgccgtcggtgtgggcaaggctattgaagaagaactgcaggagatcgcttccgaacccacgaacaagcacttgttctatgctgaggatttcagcactatggacgaaatttctgaaaagctgaagaagggtatctgcgaagccttagaagactccgatgggcgccaggacagtcccgctggggagttacccaagacagttcagcagcctactgtgcagcaccgatacctattcgaagaggacaatctgctgcgctctacgcaaaagctgagccactctaccaaaccttctggcagccctttggaagagaagcatgatcagtgcaaatgcgagaacctaatcatgttccaaaacctggccaacgaagaggttcggaaactcacccagcggctggaggagatgacacagcgtatggaggcattagagaatcggctgcgataccggtag

SEQ ID NO: 219261 - DNA, 2814 bp, Artificial Sequence
  derived and/or modified sequence
atggagaaaatgctggctgggtgctttttactgattctggggcaaatcgtgctattgcccgctgaggccagggagagatctagaggacgtagtatctccaggggcagacacgcgaggactcacccacagactgccctgctggagagttcttgcgagaacaagcgcgctgatcttgtctttatcatagactcgtcgaggtctgtcaatacccacgattatgccaaggtgaaagagttcatcgtggacattttgcaatttctagatatcggcccagacgtgacacgggttggattgctccagtacggatccaccgtgaagaatgaattctccctcaagacttttaagcgtaagagcgaagtggaaagggccgtgaagagaatgagacacttaagcaccggcacgatgaccggcctggctatacaatacgcacttaatatcgccttctcagaggcggagggtgcaagacctctccgggaaaatgtcccaagggtcatcatgattgttaccgacggaagacctcaggacagcgtggctgaggtggccgctaaggcacgggataccggcattctcatctttgcaatcggagttggccaggtagacttcaacactctcaagtccatcggaagtgaaccccatgaagaccacgtcttcctggtagcaaatttttcgcagatcgagactctgacttccgtgtttcagaaaaaactgtgcacagcgcatatgtgtagcacccttgagcataactgcgcgcacttttgtatcaacattccgggttcctatgtgtgtcgctgtaagcagggatacattctgaactccgatcagacaacctgccgtattcaggacctctgcgcgatggaagaccacaactgtgagcagttatgcgtaaacgttcccggatcattcgtttgtcagtgttatagcgggtatgctctggccgaagacggcaaacgttgcgtggcagttgattattgtgcctcggagaaccatggatgtgaacatgagtgcgtcaatgctgatggttcctatttgtgtcagtgccacgagggattcgcgctgaaccccgataagaagacttgcacgaaaattgattactgtgcttccagcaatcatggatgccagcatgagtgcgtgaatactgacgacagttatagctgtcactgcctgaaaggcttcactctcaatccagataaaaagacatgcagacggatcaactactgcgccctgaacaagcctggttgtgagcatgaatgtgtgaacatggaggaaagttattactgcaggtgccatcgaggctacactctggatcccaatggcaagacctgctcccgggtggatcactgcgcgcagcaggatcacggatgcgaacaactgtgcctgaatactgaggacagttttgtttgccagtgctcagaaggtttcctcattaatgaggacctgaaaacctgttcaagagtggattactgcctgttaagcgaccacggttgtgagtattcgtgcgtgaatatggatcgctcttttgcgtgtcagtgccctgaaggacatgtacttcggtccgacggcaagacttgtgccaaactggatagctgcgcgctgggcgatcacggatgtgagcacagttgtgtcagctctgaggacagctttgtgtgccaatgtttcgaggggtacatcctgcgggaagatggcaagacctgccgcaggaaggacgtgtgccaagcgattgatcatggctgcgaacacatttgcgtaaatagcgacgactcttatacctgcgaatgtctcgagggctttcggctggcggaagacggcaagcgatgtagacgcaaggatgtgtgtaagtcaacacaccacggttgtgaacacatttgtgtaaacaacggaaactcgtacatctgtaaatgtagcgaaggcttcgtgctagcagaggatgggagacggtgcaaaaagtgtaccgagggcccaatcgacctcgtatttgttattgatggatccaaatctttgggggaggaaaattttgaagtcgtgaaacagtttgtcaccggaattatcgattctctcaccatctccccgaaggccgctcgtgttggtctactccaatacagtacacaggtgcacaccgaatttacactcaggaacttcaactcagctaaggatatgaagaaggccgtagcacatatgaagtacatgggaaaagggtcaatgactgggctagcactgaagcacatgttcgagagaagctttacacagggcgaaggtgcaaggcccctgagcacgcgcgtgcccagggctgccattgtatttacggatggtagggcacaagatgacgtgtccgaatgggcttcaaaagctaaggctaatgggattactatgtatgccgtcggcgtggggaaggctattgaggaggagctgcaggagatcgcttccgagcctacaaataaacacctcttttatgcggaagatttttctaccatggatgaaatatcagagaaactgaagaagggcatctgcgaggcgctggaggatagtgatggcaggcaggactcccctgcaggtgagctccccaagaccgtgcaacaaccaacagtgcagcacaggtacctgttcgaggaagataatctgttgcgttctactcagaagctgagccacagcaccaagccctcaggatcgcccctcgaggaaaagcacgaccagtgcaagtgtgagaacctgatcatgtttcagaatctggccaacgaagaagtccgaaaactaacacagcgcctggaagaaatgacccagcgtatggaagctttggagaacaggctccgataccgctag

SEQ ID NO: 219262 - DNA, 2814 bp, Artificial Sequence
  derived and/or modified sequence
atggagaagatgctggccggctgcttcctgctgatcctgggccagatcgtgctgctgcccgccgaggccagagagagaagcagaggcagaagcatcagcagaggcagacacgccagaacccacccccagaccgccctgctggagagcagctgcgagaacaagagagccgacctggtgttcatcatcgacagcagcagaagcgtgaacacccacgactacgccaaggtgaaggagttcatcgtggacatcctgcagttcctggacatcggccccgacgtgaccagagtgggcctgctgcagtacggcagcaccgtgaagaacgagttcagcctgaagaccttcaagagaaagagcgaggtggagagagccgtgaagagaatgagacacctgagcaccggcaccatgaccggcctggccatccagtacgccctgaacatcgccttcagcgaggccgagggcgccagacccctgagagagaacgtgcccagagtgatcatgatcgtgaccgacggcagaccccaggacagcgtggccgaggtggccgccaaggccagagacaccggcatcctgatcttcgccatcggcgtgggccaggtggacttcaacaccctgaagagcatcggcagcgagccccacgaggaccacgtgttcctggtggccaacttcagccagatcgagaccctgaccagcgtgttccagaagaagctgtgcaccgcccacatgtgcagcaccctggagcacaactgcgcccacttctgcatcaacatccccggcagctacgtgtgcagatgcaagcagggctacatcctgaacagcgaccagaccacctgcagaatccaggacctgtgcgccatggaggaccacaactgcgagcagctgtgcgtgaacgtgcccggcagcttcgtgtgccagtgctacagcggctacgccctggccgaggacggcaagagatgcgtggccgtggactactgcgccagcgagaaccacggctgcgagcacgagtgcgtgaacgccgacggcagctacctgtgccagtgccacgagggcttcgccctgaaccccgacaagaagacctgcaccaagatcgactactgcgccagcagcaaccacggctgccagcacgagtgcgtgaacaccgacgacagctacagctgccactgcctgaagggcttcaccctgaaccccgacaagaagacctgcagaagaatcaactactgcgccctgaacaagcccggctgcgagcacgagtgcgtgaacatggaggagagctactactgcagatgccacagaggctacaccctggaccccaacggcaagacctgcagcagagtggaccactgcgcccagcaggaccacggctgcgagcagctgtgcctgaacaccgaggacagcttcgtgtgccagtgcagcgagggcttcctgatcaacgaggacctgaagacctgcagcagagtggactactgcctgctgagcgaccacggctgcgagtacagctgcgtgaacatggacagaagcttcgcctgccagtgccccgagggccacgtgctgagaagcgacggcaagacctgcgccaagctggacagctgcgccctgggcgaccacggctgcgagcacagctgcgtgagcagcgaggacagcttcgtgtgccagtgcttcgagggctacatcctgagagaggacggcaagacctgcagaagaaaggacgtgtgccaggccatcgaccacggctgcgagcacatctgcgtgaacagcgacgacagctacacctgcgagtgcctggagggcttcagactggccgaggacggcaagagatgcagaagaaaggacgtgtgcaagagcacccaccacggctgcgagcacatctgcgtgaacaacggcaacagctacatctgcaagtgcagcgagggcttcgtgctggccgaggacggcagaagatgcaagaagtgcaccgagggccccatcgacctggtgttcgtgatcgacggcagcaagagcctgggcgaggagaacttcgaggtggtgaagcagttcgtgaccggcatcatcgacagcctgaccatcagccccaaggccgccagagtgggcctgctgcagtacagcacccaggtgcacaccgagttcaccctgagaaacttcaacagcgccaaggacatgaagaaggccgtggcccacatgaagtacatgggcaagggcagcatgaccggcctggccctgaagcacatgttcgagagaagcttcacccagggcgagggcgccagacccctgagcaccagagtgcccagagccgccatcgtgttcaccgacggcagagcccaggacgacgtgagcgagtgggccagcaaggccaaggccaacggcatcaccatgtacgccgtgggcgtgggcaaggccatcgaggaggagctgcaggagatcgccagcgagcccaccaacaagcacctgttctacgccgaggacttcagcaccatggacgagatcagcgagaagctgaagaagggcatctgcgaggccctggaggacagcgacggcagacaggacagccccgccggcgagctgcccaagaccgtgcagcagcccaccgtgcagcacagatacctgttcgaggaggacaacctgctgagaagcacccagaagctgagccacagcaccaagcccagcggcagccccctggaggagaagcacgaccagtgcaagtgcgagaacctgatcatgttccagaacctggccaacgaggaggtgagaaagctgacccagagactggaggagatgacccagagaatggaggccctggagaacagactgagatacagatag

SEQ ID NO: 219263 - protein, 443 aa, Artificial Sequence
  derived and/or modified sequence
MLASGLLLVALLACLTVMVLMSVWQQRKSRGKLPPGPTPLPFIGNYLQLNTEHICDSIMKVSQGVAFSNGERAKQLLRFAIATLRDFGVGKRGIEERIQEESGFLIEAIRSTHGANIDPTFFLSRTVSNVISSIVFGDRFDYEDKEFLSLLSMMLGIFQFTSTSTGQLYEMFSSVMKHLPGPQQQAFKLLQGLEDFIAKKVEHNQRTLDPNSPQDFIDSFLIHMQEEEKNPNTEFYLKNLMMSTLNLFIAGTETVSTTLRYGFLLLMKHPEVEAKVHEEIDRVIGKNRQPKFEDRTKMPYMEAVIHEIQRFGDVIPMSLARRVKKDTKFRDFFLPKGTEVFPMLGSVLRDPSFFSNPQDFNPQHFLDDKGQFKKSDAFVPFSIGKRNCFGEGLARMELFLFFTTVMQNFRLKSSQSPKDIDVSPKHVVFATIPRNYTMSFLPR

SEQ ID NO: 219264 - DNA, 1332 bp, Artificial Sequence
  derived and/or modified sequence
atgttggctagcggtctgcttcttgtagccctgctggcttgcctgactgtcatggttttgatgagcgtgtggcaacagcgcaaatctagagggaagctccccccaggaccaacgccacttccattcataggtaactaccttcagctcaacactgagcacatatgtgactcaatcatgaaggtttctcagggcgtagccttctctaacggagaaagggctaagcaattactccggttcgctatagccacactgcgagactttggcgtcgggaaacggggcatcgaggagagaatccaggaggagtccggatttttgattgaggcaatccgaagcacccacggcgccaatatcgatcccacgttctttctctcacgaacagtatcaaatgtgatttccagtatcgtgttcggcgatcgctttgattacgaggataaggaattcctctcactgttatccatgatgcttgggatttttcagttcacgagtacttccaccggccagctgtacgagatgttcagtagcgtgatgaagcatttgcccggcccgcagcaacaagccttcaagctgttgcagggactggaagatttcatcgctaaaaaagtggaacataatcagaggactctcgatcctaacagtccacaggattttatagactcattccttattcatatgcaggaggaggaaaagaatcccaacactgaattctatctcaagaacctcatgatgtccaccttgaacctattcatcgcgggcacagagacggtcagcaccaccttgagatatggctttctgctcttaatgaagcaccccgaggtggaggctaaggtccacgaggagattgacagagttataggcaagaacaggcagcccaagtttgaggacaggacgaaaatgccttacatggaagctgttattcatgagattcagcgattcggtgacgtgattcccatgagtctcgcacggagagtcaaaaaggacacaaagtttcgcgacttttttttgcccaagggaactgaggtgtttccaatgctggggtcagtgctgcgcgatccaagcttttttagtaatccccaggactttaatccccaacattttctggatgacaaggggcagttcaagaagtccgatgcttttgtacccttttcaatcggcaagaggaattgctttggcgagggacttgctcggatggagctgttcctgttctttaccactgtgatgcaaaactttcgcctgaagagctcccaatcacctaaagacattgacgtgtcccctaaacatgtcgtgttcgctactatcccccgcaattacacaatgtctttccttcctcgctag

SEQ ID NO: 219265 - DNA, 1332 bp, Artificial Sequence
  derived and/or modified sequence
atgctggccagcggcctgctgctggtggccctgctggcctgcctgactgtgatggtgctgatgtctgtgtggcagcagaggaagagccggggcaagctgcccccaggccccacccccctgcccttcatcggcaactacctgcagctgaacacagagcacatctgtgacagcatcatgaaggtgtcccagggcgtggccttcagcaatggagagcgggccaagcagctgctgcgctttgccatcgccaccctgcgggactttggagtgggcaagaggggcatcgaggagcgcatccaggaggagagcggcttcctgattgaggccatccgcagcacccatggagccaacatcgaccccaccttcttcctgagcaggacagtgtccaatgtcatcagcagcatcgtgtttggagacagatttgattatgaggacaaggagttcctgagcctgctgtccatgatgctgggcatcttccagttcaccagcaccagcacaggccagctgtatgagatgttcagctctgtgatgaagcacctgcccggcccccagcagcaggccttcaagctgctgcagggcctggaggacttcatcgccaagaaggtggagcacaaccagaggaccctggaccccaacagcccccaggacttcatcgacagcttcctgatccacatgcaggaggaggagaagaaccccaacacagagttctacctgaagaacctgatgatgagcaccctgaacctcttcatcgccggcacagagaccgtgtccaccaccctgcgctatggcttcctgctgctgatgaagcaccctgaggtggaggccaaggtgcatgaggagattgacagagtcatcggcaagaaccggcagcccaagtttgaggacaggaccaagatgccctacatggaggccgtcatccacgagatccagagatttggagatgtgatccccatgagcctggccaggagagtgaagaaggacaccaagttccgggacttcttcctgcccaagggcacagaggtgttccccatgctgggctctgtgctgcgggaccccagcttcttcagcaacccccaggacttcaacccccagcacttcctggatgacaagggccagttcaagaagagtgatgcctttgtgcccttcagcatcggcaagaggaactgctttggagagggcctggccaggatggagctgttcctgttcttcaccaccgtgatgcagaacttccggctgaagagcagccagagccccaaggacattgatgtgagccccaagcacgtggtgtttgccaccatccccaggaactacaccatgtccttcctgcccaggtag

SEQ ID NO: 219266 - DNA, 1332 bp, Artificial Sequence
  derived and/or modified sequence
atgctggccagcggcctgctgctggtggccctgctggcctgcctgactgtaatggtgctgatgagcgtgtggcagcaacgcaaatctcgcggcaaattgccgcccggcccaacacctctgccctttattggcaactacctgcagctgaatactgagcacatctgtgatagcatcatgaaagtatctcaaggagtggcattcagcaacggcgagagagcaaaacagctcctgcgatttgccatcgctacattaagggacttcggagtgggtaagcggggaattgaagagaggattcaagaggaaagcgggtttttaattgaggcaatcagatctacacatggggccaatattgatcccacattcttcctgtcccgaactgtctctaatgtgatctcttccatagtgttcggagacaggttcgactatgaggacaaggaatttttgtccctcctatccatgatgctgggaatttttcagttcacttctaccagtacaggccaactctacgagatgttcagctcagttatgaagcacttgccaggccctcaacagcaagcctttaagctattgcaggggctggaggacttcatagccaaaaaggtggagcataatcagcggaccctggatcccaatagcccccaagacttcatcgactcttttctcatccacatgcaagaggaggaaaaaaatcctaataccgagttctatttaaaaaatctgatgatgagcacactcaacctctttattgctggaaccgagacagtgtcgacaactctaaggtatgggtttctcctgttgatgaaacacccggaggtggaggcaaaggtgcacgaagaaatcgaccgtgtaatcggaaaaaacagacaacccaagttcgaggatcgaactaagatgccatacatggaagccgtgatacacgaaatacagagatttggcgacgttataccaatgtcgcttgctaggagggtgaaaaaagacacaaagttccgggactttttcctaccgaaaggcacagaggtgttccccatgctgggatccgtgttaagggatccatcattcttctctaatccgcaagacttcaatccacaacacttccttgatgacaaggggcagttcaagaaatctgatgcctttgtcccgttctctatcggtaagagaaattgttttggggaggggcttgcgcggatggaacttttcctgtttttcacaaccgtgatgcagaacttccgattgaagtcttctcagtcccccaaggacatcgacgtgtcccccaagcatgtggtattcgccacaatccctcgaaattatacaatgagcttccttcccagatag

SEQ ID NO: 219267 - DNA, 1332 bp, Artificial Sequence
  derived and/or modified sequence
atgctcgcatccggcctgcttctggtggccttacttgcctgtcttacagttatggtgctaatgtcagtttggcaacagcgcaagtcccggggaaagctgcctcccggtcccacccctctcccctttattgggaactatcttcagttaaatacagagcacatctgtgactcaatcatgaaggtcagtcagggcgtggcattctccaatggagaacgggctaagcagcttctgcgatttgcaattgcaacactgagagatttcggggtgggcaagagaggtatagaggaaaggatccaggaggaaagtgggttccttatcgaagcgatccgctccacacacggagcgaatatcgatccaactttctttctgtcacgaaccgtcagcaatgtaatctcctctattgtgtttggagacagattcgactatgaagataaggagttccttagtctgctgtccatgatgctgggcatatttcagttcacatcaacatctactgggcaactctatgagatgttttcctccgtgatgaaacacctgccaggccctcagcaacaggcattcaaactccttcagggcctggaagattttatcgcgaagaaagtcgagcataaccaacggacactcgaccccaatagtccccaagactttatcgactcgttcctgatccacatgcaggaggaggagaaaaatcccaataccgaattttacctcaaaaacctcatgatgtctacgctgaatttatttatcgccggtacagaaaccgtaagcacaaccctgcggtacggctttctcttgctgatgaagcatccggaggtggaagcaaaggtccacgaagagatcgacagagtaattgggaagaatcgccagccaaagttcgaggatagaaccaagatgccctacatggaagctgtgattcatgaaattcaacgcttcggcgacgtgattcctatgtcactggctcggagagtcaagaaggacactaaatttagagatttcttcctgcccaagggaaccgaagtattccctatgctgggtagcgtcctaagagatccgagttttttctcaaacccacaggatttcaatccgcagcacttccttgacgataaaggacagtttaagaaatctgatgctttcgttccattttccatcggaaagcggaactgctttggtgaaggcttggctagaatggaactctttctgtttttcacaaccgtgatgcagaattttcgcctgaagagctcccagtcccccaaagacatcgatgtatcacctaagcacgtggtctttgccaccattcccaggaactacactatgagctttctgcccagatag

SEQ ID NO: 219268 - DNA, 2128 bp, Artificial Sequence
  derived and/or modified sequence
ccctgggtcttcctagccccgagactttcaagtccatatgcctggagtcccccctcctgagacccttaaccctgcatcctccgcaacagaagacctccagatgcacagccacacttccatctcaccctaataaaacccagacctttggattcctctcccttggaatgcccaaatccacaactttggggtgcattctcactctcagaccccaaatccaaagcccaagtgctcccctatgcaaatattccaaactcttcagttctacagtttatcggttgccccctcctaaatccacagccctgcggcacccctcctgaagtaccacagatttagtctggaggccccctctctgttcagctgccctggggtccccttatcctcccttgctggctgtgtcccaagctaggtggcattcatggtggggcgtgtagttgggaggtgaaataaggtgattatgtaattagccaaagtccatccctctttttcaggcagtataaaggcaaaccaccccacccatcaccatctgtcatctcactaccaccatgctggcctcagggctgcttctggtggccttgctggcctgcctgactgtgatggtcttgatgtctgtctggcagcagaggaagagcagggggaagctgcctccgggacccaccccactgcccttcattggaaactacctccagctgaacacagagcacatatgtgactccatcatgaaggtgtcccaaggcgtggcgttcagcaacggggagcgcgccaagcagctcctgcgctttgccatcgccaccctgagggacttcggggtgggcaagcgaggcatcgaggagcgcatccaggaggagtcgggcttcctcatcgaggccatccggagcacgcacggcgccaatatcgatcccaccttcttcctgagccgcacagtctccaatgtcatcagctccattgtctttggggaccgctttgactatgaggacaaagagttcctgtcactgctgagcatgatgctaggaatcttccagttcacgtcaacctccacggggcagctctatgagatgttctcttcggtgatgaaacacctgccaggaccacagcaacaggcctttaagttgctgcaagggctggaggacttcatagccaagaaggtggagcacaaccagcgcacgctggatcccaattccccacaggacttcatcgactcctttctcatccacatgcaggaggaggagaagaaccccaacacggagttctacttgaagaacctgatgatgagcacgttgaacctcttcattgcaggcaccgagacggtcagcaccaccctgcgctatggcttcttgctgctcatgaagcacccagaggtggaggccaaggtccatgaggagattgacagagtgatcggcaagaaccggcagcccaagtttgaggaccggaccaagatgccctacatggaggcagtgatccacgagatccaaagatttggagacgtgatccccatgagtttggcccgcagggttaaaaaggacaccaagtttcgggattttttcctccctaagggcaccgaagtgttccctatgctgggctccgtgctgagagaccccagcttcttctccaaccctcaggacttcaatccccagcatttcctggatgacaaggggcagtttaagaagagtgatgcttttgtgcccttttccatcggaaagcggaactgtttcggagaaggcctggccagaatggagctctttctcttcttcaccaccgtcatgcagaacttccgcctcaagtcctcccagtcacctaaggacattgacgtgtcccccaaacacgtggtctttgccacgatcccacgaaactacaccatgagcttcctgccccgctgagcgagggctgtgccggtgcaggtctggtgggcggggccagggaaaggcggggtcagggcggggttcgcggaagaggcgggtataagaatggggggaagatgcgggaaaggaaggggcgtggtggctagagggaagagaagaaacagaagcggctcagttcaccttgataaggtgcttccgagctgggatgagaggaagggaaaccttacattatgctatgaagagtagtaataatagcagctcttatttcctga

SEQ ID NO: 219269 - DNA, 1332 bp, Artificial Sequence
  derived and/or modified sequence
atgctggccagcggcctgctgctggtggccctgctggcctgcctgaccgtgatggtgctgatgagcgtgtggcagcagagaaagagcagaggcaagctgccccccggccccacccccctgcccttcatcggcaactacctgcagctgaacaccgagcacatctgcgacagcatcatgaaggtgagccagggcgtggccttcagcaacggcgagagagccaagcagctgctgagattcgccatcgccaccctgagagacttcggcgtgggcaagagaggcatcgaggagagaatccaggaggagagcggcttcctgatcgaggccatcagaagcacccacggcgccaacatcgaccccaccttcttcctgagcagaaccgtgagcaacgtgatcagcagcatcgtgttcggcgacagattcgactacgaggacaaggagttcctgagcctgctgagcatgatgctgggcatcttccagttcaccagcaccagcaccggccagctgtacgagatgttcagcagcgtgatgaagcacctgcccggcccccagcagcaggccttcaagctgctgcagggcctggaggacttcatcgccaagaaggtggagcacaaccagagaaccctggaccccaacagcccccaggacttcatcgacagcttcctgatccacatgcaggaggaggagaagaaccccaacaccgagttctacctgaagaacctgatgatgagcaccctgaacctgttcatcgccggcaccgagaccgtgagcaccaccctgagatacggcttcctgctgctgatgaagcaccccgaggtggaggccaaggtgcacgaggagatcgacagagtgatcggcaagaacagacagcccaagttcgaggacagaaccaagatgccctacatggaggccgtgatccacgagatccagagattcggcgacgtgatccccatgagcctggccagaagagtgaagaaggacaccaagttcagagacttcttcctgcccaagggcaccgaggtgttccccatgctgggcagcgtgctgagagaccccagcttcttcagcaacccccaggacttcaacccccagcacttcctggacgacaagggccagttcaagaagagcgacgccttcgtgcccttcagcatcggcaagagaaactgcttcggcgagggcctggccagaatggagctgttcctgttcttcaccaccgtgatgcagaacttcagactgaagagcagccagagccccaaggacatcgacgtgagccccaagcacgtggtgttcgccaccatccccagaaactacaccatgagcttcctgcccagatag

SEQ ID NO: 219270 - protein, 564 aa, Artificial Sequence
  derived and/or modified sequence
MPECLWTQGVLQEVLNSYFCGSIILSTLPWEVPGGHASRICLLLLATGENKQVECYQLSPGLSSLPDFQDSEETVTSRMLFPTSAQESSRGLPDANDLCLGLQSLSLTGWDRPWSTQDSDSSAQSSTHSVLSMLHNPLGNVLGKPPLSFLPLDPLGSDLVDKFPAPSVRGSRLDTRPILDSRSSSPSDSDTSGFSSGSDHLSDLISSLRISPPLPFLSLSGGGPRDPLKMGVGSRMDQEQAALAAVTPSPTSASKRWPGASVWPSWDLLEAPKDPFSIEREARLHRQAAAVNEATCTWSGQLPPRNYKNPIYSCKVFLGGVPWDITEAGLVNTFRVFGSLSVEWPGKDGKHPRCPPKGYVYLVFELEKSVRSLLQACSHDPLSPDGLSEYYFKMSSRRMRCKEVQVIPWVLADSNFVRSPSQRLDPSRTVFVGALHGMLNAEALAAILNDLFGGVVYAGIDTDKHKYPIGSGRVTFNNQRSYLKAVSAAFVEIKTTKFTKKVQIDPYLEDSLCHICSSQPGPFFCRDQVCFKYFCRSCWHWRHSMEGLRHHSPLMRNQKNRDSS

SEQ ID NO: 219271 - protein, 335 aa, Artificial Sequence
  derived and/or modified sequence
MGVGSRMDQEQAALAAVTPSPTSASKRWPGASVWPSWDLLEAPKDPFSIEREARLHRQAAAVNEATCTWSGQLPPRNYKNPIYSCKVFLGGVPWDITEAGLVNTFRVFGSLSVEWPGKDGKHPRCPPKGYVYLVFELEKSVRSLLQACSHDPLSPDGLSEYYFKMSSRRMRCKEVQVIPWVLADSNFVRSPSQRLDPSRTVFVGALHGMLNAEALAAILNDLFGGVVYAGIDTDKHKYPIGSGRVTFNNQRSYLKAVSAAFVEIKTTKFTKKVQIDPYLEDSLCHICSSQPGPFFCRDQVCFKYFCRSCWHWRHSMEGLRHHSPLMRNQKNRDSS

SEQ ID NO: 219272 - protein, 561 aa, Artificial Sequence
  derived and/or modified sequence
MSMPLEEEAGRIKDCWDNQEAPALSTCSNANIFRRINAILDNSLDFSRVCTTPINRGIHDHLPDFQDSEETVTSRMLFPTSAQESSRGLPDANDLCLGLQSLSLTGWDRPWSTQDSDSSAQSSTHSVLSMLHNPLGNVLGKPPLSFLPLDPLGSDLVDKFPAPSVRGSRLDTRPILDSRSSSPSDSDTSGFSSGSDHLSDLISSLRISPPLPFLSLSGGGPRDPLKMGVGSRMDQEQAALAAVTPSPTSASKRWPGASVWPSWDLLEAPKDPFSIEREARLHRQAAAVNEATCTWSGQLPPRNYKNPIYSCKVFLGGVPWDITEAGLVNTFRVFGSLSVEWPGKDGKHPRCPPKGYVYLVFELEKSVRSLLQACSHDPLSPDGLSEYYFKMSSRRMRCKEVQVIPWVLADSNFVRSPSQRLDPSRTVFVGALHGMLNAEALAAILNDLFGGVVYAGIDTDKHKYPIGSGRVTFNNQRSYLKAVSAAFVEIKTTKFTKKVQIDPYLEDSLCHICSSQPGPFFCRDQVCFKYFCRSCWHWRHSMEGLRHHSPLMRNQKNRDSS

SEQ ID NO: 219273 - protein, 486 aa, Artificial Sequence
  derived and/or modified sequence
MLFPTSAQESSRGLPDANDLCLGLQSLSLTGWDRPWSTQDSDSSAQSSTHSVLSMLHNPLGNVLGKPPLSFLPLDPLGSDLVDKFPAPSVRGSRLDTRPILDSRSSSPSDSDTSGFSSGSDHLSDLISSLRISPPLPFLSLSGGGPRDPLKMGVGSRMDQEQAALAAVTPSPTSASKRWPGASVWPSWDLLEAPKDPFSIEREARLHRQAAAVNEATCTWSGQLPPRNYKNPIYSCKVFLGGVPWDITEAGLVNTFRVFGSLSVEWPGKDGKHPRCPPKGYVYLVFELEKSVRSLLQACSHDPLSPDGLSEYYFKMSSRRMRCKEVQVIPWVLADSNFVRSPSQRLDPSRTVFVGALHGMLNAEALAAILNDLFGGVVYAGIDTDKHKYPIGSGRVTFNNQRSYLKAVSAAFVEIKTTKFTKKVQIDPYLEDSLCHICSSQPGPFFCRDQVCFKYFCRSCWHWRHSMEGLRHHSPLMRNQKNRDSS

SEQ ID NO: 219274 - protein, 561 aa, Artificial Sequence
  derived and/or modified sequence
MAFPLEEEAGRIKDCWDNQEAPALSTCSNANIFRRINAILDNSLDFSRVCTTPINRGIHDHLPDFQDSEETVTSRMLFPTSAQESSRGLPDANDLCLGLQSLSLTGWDRPWSTQDSDSSAQSSTHSVLSMLHNPLGNVLGKPPLSFLPLDPLGSDLVDKFPAPSVRGSRLDTRPILDSRSSSPSDSDTSGFSSGSDHLSDLISSLRISPPLPFLSLSGGGPRDPLKMGVGSRMDQEQAALAAVTPSPTSASKRWPGASVWPSWDLLEAPKDPFSIEREARLHRQAAAVNEATCTWSGQLPPRNYKNPIYSCKVFLGGVPWDITEAGLVNTFRVFGSLSVEWPGKDGKHPRCPPKGYVYLVFELEKSVRSLLQACSHDPLSPDGLSEYYFKMSSRRMRCKEVQVIPWVLADSNFVRSPSQRLDPSRTVFVGALHGMLNAEALAAILNDLFGGVVYAGIDTDKHKYPIGSGRVTFNNQRSYLKAVSAAFVEIKTTKFTKKVQIDPYLEDSLCHICSSQPGPFFCRDQVCFKYFCRSCWHWRHSMEGLRHHSPLMRNQKNRDSS

SEQ ID NO: 219275 - DNA, 1695 bp, Artificial Sequence
  derived and/or modified sequence
atgcccgagtgcctgtggacccagggcgtgctgcaggaggtgctgaacagctacttctgcggcagcatcatcctgagcaccctgccctgggaggtgcccggcggccacgccagcagaatctgcctgctgctgctggccaccggcgagaacaagcaggtggagtgctaccagctgagccccggcctgagcagcctgcccgacttccaggacagcgaggagaccgtgaccagcagaatgctgttccccaccagcgcccaggagagcagcagaggcctgcccgacgccaacgacctgtgcctgggcctgcagagcctgagcctgaccggctgggacagaccctggagcacccaggacagcgacagcagcgcccagagcagcacccacagcgtgctgagcatgctgcacaaccccctgggcaacgtgctgggcaagccccccctgagcttcctgcccctggaccccctgggcagcgacctggtggacaagttccccgcccccagcgtgagaggcagcagactggacaccagacccatcctggacagcagaagcagcagccccagcgacagcgacaccagcggcttcagcagcggcagcgaccacctgagcgacctgatcagcagcctgagaatcagcccccccctgcccttcctgagcctgagcggcggcggccccagagaccccctgaagatgggcgtgggcagcagaatggaccaggagcaggccgccctggccgccgtgacccccagccccaccagcgccagcaagagatggcccggcgccagcgtgtggcccagctgggacctgctggaggcccccaaggaccccttcagcatcgagagagaggccagactgcacagacaggccgccgccgtgaacgaggccacctgcacctggagcggccagctgccccccagaaactacaagaaccccatctacagctgcaaggtgttcctgggcggcgtgccctgggacatcaccgaggccggcctggtgaacaccttcagagtgttcggcagcctgagcgtggagtggcccggcaaggacggcaagcaccccagatgcccccccaagggctacgtgtacctggtgttcgagctggagaagagcgtgagaagcctgctgcaggcctgcagccacgaccccctgagccccgacggcctgagcgagtactacttcaagatgagcagcagaagaatgagatgcaaggaggtgcaggtgatcccctgggtgctggccgacagcaacttcgtgagaagccccagccagagactggaccccagcagaaccgtgttcgtgggcgccctgcacggcatgctgaacgccgaggccctggccgccatcctgaacgacctgttcggcggcgtggtgtacgccggcatcgacaccgacaagcacaagtaccccatcggcagcggcagagtgaccttcaacaaccagagaagctacctgaaggccgtgagcgccgccttcgtggagatcaagaccaccaagttcaccaagaaggtgcagatcgacccctacctggaggacagcctgtgccacatctgcagcagccagcccggccccttcttctgcagagaccaggtgtgcttcaagtacttctgcagaagctgctggcactggagacacagcatggagggcctgagacaccacagccccctgatgagaaaccagaagaacagagacagcagctag

SEQ ID NO: 219276 - DNA, 1686 bp, Artificial Sequence
  derived and/or modified sequence
atgagcatgcccctggaggaggaggccggcagaatcaaggactgctgggacaaccaggaggcccccgccctgagcacctgcagcaacgccaacatcttcagaagaatcaacgccatcctggacaacagcctggacttcagcagagtgtgcaccacccccatcaacagaggcatccacgaccacctgcccgacttccaggacagcgaggagaccgtgaccagcagaatgctgttccccaccagcgcccaggagagcagcagaggcctgcccgacgccaacgacctgtgcctgggcctgcagagcctgagcctgaccggctgggacagaccctggagcacccaggacagcgacagcagcgcccagagcagcacccacagcgtgctgagcatgctgcacaaccccctgggcaacgtgctgggcaagccccccctgagcttcctgcccctggaccccctgggcagcgacctggtggacaagttccccgcccccagcgtgagaggcagcagactggacaccagacccatcctggacagcagaagcagcagccccagcgacagcgacaccagcggcttcagcagcggcagcgaccacctgagcgacctgatcagcagcctgagaatcagcccccccctgcccttcctgagcctgagcggcggcggccccagagaccccctgaagatgggcgtgggcagcagaatggaccaggagcaggccgccctggccgccgtgacccccagccccaccagcgccagcaagagatggcccggcgccagcgtgtggcccagctgggacctgctggaggcccccaaggaccccttcagcatcgagagagaggccagactgcacagacaggccgccgccgtgaacgaggccacctgcacctggagcggccagctgccccccagaaactacaagaaccccatctacagctgcaaggtgttcctgggcggcgtgccctgggacatcaccgaggccggcctggtgaacaccttcagagtgttcggcagcctgagcgtggagtggcccggcaaggacggcaagcaccccagatgcccccccaagggctacgtgtacctggtgttcgagctggagaagagcgtgagaagcctgctgcaggcctgcagccacgaccccctgagccccgacggcctgagcgagtactacttcaagatgagcagcagaagaatgagatgcaaggaggtgcaggtgatcccctgggtgctggccgacagcaacttcgtgagaagccccagccagagactggaccccagcagaaccgtgttcgtgggcgccctgcacggcatgctgaacgccgaggccctggccgccatcctgaacgacctgttcggcggcgtggtgtacgccggcatcgacaccgacaagcacaagtaccccatcggcagcggcagagtgaccttcaacaaccagagaagctacctgaaggccgtgagcgccgccttcgtggagatcaagaccaccaagttcaccaagaaggtgcagatcgacccctacctggaggacagcctgtgccacatctgcagcagccagcccggccccttcttctgcagagaccaggtgtgcttcaagtacttctgcagaagctgctggcactggagacacagcatggagggcctgagacaccacagccccctgatgagaaaccagaagaacagagacagcagctag

SEQ ID NO: 219277 - DNA, 1686 bp, Artificial Sequence
  derived and/or modified sequence
atggccttccccctggaggaggaggccggcagaatcaaggactgctgggacaaccaggaggcccccgccctgagcacctgcagcaacgccaacatcttcagaagaatcaacgccatcctggacaacagcctggacttcagcagagtgtgcaccacccccatcaacagaggcatccacgaccacctgcccgacttccaggacagcgaggagaccgtgaccagcagaatgctgttccccaccagcgcccaggagagcagcagaggcctgcccgacgccaacgacctgtgcctgggcctgcagagcctgagcctgaccggctgggacagaccctggagcacccaggacagcgacagcagcgcccagagcagcacccacagcgtgctgagcatgctgcacaaccccctgggcaacgtgctgggcaagccccccctgagcttcctgcccctggaccccctgggcagcgacctggtggacaagttccccgcccccagcgtgagaggcagcagactggacaccagacccatcctggacagcagaagcagcagccccagcgacagcgacaccagcggcttcagcagcggcagcgaccacctgagcgacctgatcagcagcctgagaatcagcccccccctgcccttcctgagcctgagcggcggcggccccagagaccccctgaagatgggcgtgggcagcagaatggaccaggagcaggccgccctggccgccgtgacccccagccccaccagcgccagcaagagatggcccggcgccagcgtgtggcccagctgggacctgctggaggcccccaaggaccccttcagcatcgagagagaggccagactgcacagacaggccgccgccgtgaacgaggccacctgcacctggagcggccagctgccccccagaaactacaagaaccccatctacagctgcaaggtgttcctgggcggcgtgccctgggacatcaccgaggccggcctggtgaacaccttcagagtgttcggcagcctgagcgtggagtggcccggcaaggacggcaagcaccccagatgcccccccaagggctacgtgtacctggtgttcgagctggagaagagcgtgagaagcctgctgcaggcctgcagccacgaccccctgagccccgacggcctgagcgagtactacttcaagatgagcagcagaagaatgagatgcaaggaggtgcaggtgatcccctgggtgctggccgacagcaacttcgtgagaagccccagccagagactggaccccagcagaaccgtgttcgtgggcgccctgcacggcatgctgaacgccgaggccctggccgccatcctgaacgacctgttcggcggcgtggtgtacgccggcatcgacaccgacaagcacaagtaccccatcggcagcggcagagtgaccttcaacaaccagagaagctacctgaaggccgtgagcgccgccttcgtggagatcaagaccaccaagttcaccaagaaggtgcagatcgacccctacctggaggacagcctgtgccacatctgcagcagccagcccggccccttcttctgcagagaccaggtgtgcttcaagtacttctgcagaagctgctggcactggagacacagcatggagggcctgagacaccacagccccctgatgagaaaccagaagaacagagacagcagctag

SEQ ID NO: 219278 - DNA, 2009 bp, Artificial Sequence
  derived and/or modified sequence
attttcccttctaggctatgcctgagtgcctgtggacacagggtgtactgcaggaagttctgaacagctatttctgtggcagcattattctctcgaccctgccatgggaggtcccaggtgggcatgcttcccgtatctgcttgcttctccttgcaacaggggagaacaagcaggtggagtgctaccagctgagtccaggtttgagcagcctgcctgacttccaggactctgaagaaacagttacaagcaggatgcttttcccaacctctgcgcaagaatcttcccgtggcctcccagatgcaaatgacttgtgccttggcctgcagtccctcagtctgacaggctgggaccgaccctggagcacccaggactcagattcctcagcccagagcagcacacactcggtactgagcatgctccataacccactgggaaatgtcctaggaaaaccccccttgagcttcctgcctctggatccccttgggtctgacttggtggacaagtttccagcaccctcagttagaggatcacgcctggacacccggcccatcctggactctcgatctagcagcccctctgactcagacaccagtggcttcagctctggatcagatcatctctcagatttgatttcaagccttcgcatttctccacctctgcccttcctgtctctgtcagggggtggtcccagagaccctttaaagatgggggtagggtctcggatggaccaagagcaagctgctcttgctgcagtcactccctccccaaccagtgcttcaaagagatggccaggagcttctgtgtggccgtcctgggacctcctcgaagctcccaaagaccccttcagcatagagagagaggccaggctgcaccgacaagctgcagctgtgaatgaagccacctgtacctggagtggccagcttcctccccggaactataagaaccccatctactcttgcaaggtgtttctaggaggtgttccttgggatattacagaagctggattagttaacaccttccgtgtttttggctctttgagtgtggagtggcctggtaaggatggcaagcatccccggtgtcctcccaaagggtatgtgtatctggtcttcgaactagagaagtctgtccgatccttgcttcaggcttgctctcatgacccgctgagcccagatggcctgagtgaatattatttcaagatgtccagccgaaggatgcgctgcaaggaggtgcaggtgatcccctgggtattagccgacagtaactttgtccggagcccatctcagaggcttgaccccagcaggacggtgtttgtcggtgctctgcatggaatgctaaatgctgaggccctggcagccatcttgaacgacctatttggtggagtggtgtatgccgggattgacacagataagcacaagtatcccattggttctggtcgtgtgactttcaataaccaacggagttacctgaaagcagtcagcgctgcttttgtggagatcaaaaccaccaagttcacaaagaaggttcagattgacccctacctagaagattctctgtgtcatatctgcagttctcagcctggtcctttcttctgtcgagatcaggtctgcttcaaatacttctgccggagctgctggcactggcggcacagcatggagggcctgcgccaccacagccccctgatgcggaaccagaagaaccgagattccagctagaggagctggccttgcccagtggcctgtggcgcccaaagctggcaggtcaggcaagcagcctgcaccaccctgccactggcgaccagggagctggcttcccaaggacaagggaaaattgtagtcacctttgcacttgctgaatctgtctttgtttctgcactaattaatgcacattgagttttgtcaggttttgttttcagggggtgtaccaagggcaaggaccctctggcttaccctccaagcgactctgtagttttcccagattttagttcctcattttgcagatgaaaagcgggg

SEQ ID NO: 219279 - DNA, 3089 bp, Artificial Sequence
  derived and/or modified sequence
agccggctgatgtcactggcagcgggaagcatcagcagcctgatcacatgctggcccagtctgtaatgcagacgggataggggtgtgtgtgtgaggggagggggcctgtatggcaactgctcttgccccagcgtccccaaaagtgcagaggcagcggctgcagcatccagccagcttggatgtctggcctacttccaggactctgaagaaacagttacaagcaggatgcttttcccaacctctgcgcaagaatcttcccgtggcctcccagatgcaaatgacttgtgccttggcctgcagtccctcagtctgacaggctgggaccgaccctggagcacccaggactcagattcctcagcccagagcagcacacactcggtactgagcatgctccataacccactgggaaatgtcctaggaaaaccccccttgagcttcctgcctctggatccccttgggtctgacttggtggacaagtttccagcaccctcagttagaggatcacgcctggacacccggcccatcctggactctcgatctagcagcccctctgactcagacaccagtggcttcagctctggatcagatcatctctcagatttgatttcaagccttcgcatttctccacctctgcccttcctgtctctgtcagggggtggtcccagagaccctttaaagatgggggtagggtctcggatggaccaagagcaagctgctcttgctgcagtcactccctccccaaccagtgcttcaaagagatggccaggagcttctgtgtggccgtcctgggacctcctcgaagctcccaaagaccccttcagcatagagagagaggccaggctgcaccgacaagctgcagctgtgaatgaagccacctgtacctggagtggccagcttcctccccggaactataagaaccccatctactcttgcaaggtgtttctaggaggtgttccttgggatattacagaagctggattagttaacaccttccgtgtttttggctctttgagtgtggagtggcctggtaaggatggcaagcatccccggtgtcctcccaaaggtaatatgcctaaagggtatgtgtatctggtcttcgaactagagaagtctgtccgatccttgcttcaggcttgctctcatgacccgctgagcccagatggcctgagtgaatattatttcaagatgtccagccgaaggatgcgctgcaaggaggtgcaggtgatcccctgggtattagccgacagtaactttgtccggagcccatctcagaggcttgaccccagcaggacggtgtttgtcggtgctctgcatggaatgctaaatgctgaggccctggcagccatcttgaacgacctatttggtggagtggtgtatgccgggattgacacagataagcacaagtatcccattggttctggtcgtgtgactttcaataaccaacggagttacctgaaagcagtcagcgctgcttttgtggagatcaaaaccaccaagttcacaaagaaggttcagattgacccctacctagaagattctctgtgtcatatctgcagttctcagcctggtcctttcttctgtcgagatcaggtctgcttcaaatacttctgccggagctgctggcactggcggcacagcatggagggcctgcgccaccacagccccctgatgcggaaccagaagaaccgagattccagctagaggagctggccttgcccagtggcctgtggcgcccaaagctggcaggtcaggcaagcagcctgcaccaccctgccactggcgaccagggagctggcttcccaaggacaagggaaaattgtagtcacctttgcacttgctgaatctgtctttgtttctgcactaattaatgcacattgagttttgtcaggttttgttttcagggggtgtaccaagggcaaggaccctctggcttaccctccaagcgactctgtagttttcccagattttagttcctcattttgcagatgaaaagcggggaaaaaaaaaaaaaaaaaaaaaactacgtgtccagaaggtattgaggtattgacacggatgcctacacctaggtttatttattaaaagcgcttttttacattccttgcaatactgatggtgatgatgcgcaggtctcattggtttcattcttgcagttgccatacagtgcctttccatttatttaacccccacctgaacggcataaactgagtgttcagctggtgttttttactgtaaacaataaggagactttgctcttcatttaaaccaaaatcatatttcatattttacgctcgagggtttttaccggttcctttttacactccttaaaacagtttttaagtcgtttggaacaagatattttttctttcctggcagcttttaacattatagcaaatttgtgtctgggggactgctggtcactgtttctcacagttgcaaatcaaggcatttgcaaccaagaaaaaaaaaattttttgttttatttgaaactggaccggataaacggtgtttgagcggctgctgtatatagttttaaatggtttattgcacctccttaagttgcacttatgtgggggggtggggttgatagaagtttttaatcacaaagtcacaggacttttttcttttgtaactgagctaaaaagggctgcttttcggtgggggcagatgaaggctcacaggagccctttctcttagagggggcaagtacccttcccttatatctttaatttgaggaatgtatgagataacagttgcagttgactgaaatgccactggaatttgaaaacttgacttttttttctttcctttttttttttttttttttttttaaaaagaaacaaaaaacccacaaaaactacttgcccctcctagggaagctgtgtgccaaagaaccagtgtcataacccctccctcctgctgagctgacgttgcattgttgcatatcccagctactctgtgggttttgtgaagctgtgtgtgaagtctctacctcattgtagtatatgcaggcaagactgcactctcctacagatgtgtggagtaagctgtggtgtagtttttttggcacataataaacacgttgcagc

SEQ ID NO: 219280 - DNA, 3074 bp, Artificial Sequence
  derived and/or modified sequence
atgtcaatgccactcgaagaagaagcaggaaggataaaagattgctgggacaaccaggaagcacctgctctctccacgtgtagtaatgccaatatctttcgaaggataaatgccatattggataattctctggatttcagtagagtctgcactacacctataaaccgaggaattcatgatcatttgccagacttccaggactctgaagaaacagttacaagcaggatgcttttcccaacctctgcgcaagaatcttcccgtggcctcccagatgcaaatgacttgtgccttggcctgcagtccctcagtctgacaggctgggaccgaccctggagcacccaggactcagattcctcagcccagagcagcacacactcggtactgagcatgctccataacccactgggaaatgtcctaggaaaaccccccttgagcttcctgcctctggatccccttgggtctgacttggtggacaagtttccagcaccctcagttagaggatcacgcctggacacccggcccatcctggactctcgatctagcagcccctctgactcagacaccagtggcttcagctctggatcagatcatctctcagatttgatttcaagccttcgcatttctccacctctgcccttcctgtctctgtcagggggtggtcccagagaccctttaaagatgggggtagggtctcggatggaccaagagcaagctgctcttgctgcagtcactccctccccaaccagtgcttcaaagagatggccaggagcttctgtgtggccgtcctgggacctcctcgaagctcccaaagaccccttcagcatagagagagaggccaggctgcaccgacaagctgcagctgtgaatgaagccacctgtacctggagtggccagcttcctccccggaactataagaaccccatctactcttgcaaggtgtttctaggaggtgttccttgggatattacagaagctggattagttaacaccttccgtgtttttggctctttgagtgtggagtggcctggtaaggatggcaagcatccccggtgtcctcccaaagggtatgtgtatctggtcttcgaactagagaagtctgtccgatccttgcttcaggcttgctctcatgacccgctgagcccagatggcctgagtgaatattatttcaagatgtccagccgaaggatgcgctgcaaggaggtgcaggtgatcccctgggtattagccgacagtaactttgtccggagcccatctcagaggcttgaccccagcaggacggtgtttgtcggtgctctgcatggaatgctaaatgctgaggccctggcagccatcttgaacgacctatttggtggagtggtgtatgccgggattgacacagataagcacaagtatcccattggttctggtcgtgtgactttcaataaccaacggagttacctgaaagcagtcagcgctgcttttgtggagatcaaaaccaccaagttcacaaagaaggttcagattgacccctacctagaagattctctgtgtcatatctgcagttctcagcctggtcctttcttctgtcgagatcaggtctgcttcaaatacttctgccggagctgctggcactggcggcacagcatggagggcctgcgccaccacagccccctgatgcggaaccagaagaaccgagattccagctagaggagctggccttgcccagtggcctgtggcgcccaaagctggcaggtcaggcaagcagcctgcaccaccctgccactggcgaccagggagctggcttcccaaggacaagggaaaattgtagtcacctttgcacttgctgaatctgtctttgtttctgcactaattaatgcacattgagttttgtcaggttttgttttcagggggtgtaccaagggcaaggaccctctggcttaccctccaagcgactctgtagttttcccagattttagttcctcattttgcagatgaaaagcggggaaaaaaaaaaaaaaaaaaaaaactacgtgtccagaaggtattgaggtattgacacggatgcctacacctaggtttatttattaaaagcgcttttttacattccttgcaatactgatggtgatgatgcgcaggtctcattggtttcattcttgcagttgccatacagtgcctttccatttatttaacccccacctgaacggcataaactgagtgttcagctggtgttttttactgtaaacaataaggagactttgctcttcatttaaaccaaaatcatatttcatattttacgctcgagggtttttaccggttcctttttacactccttaaaacagtttttaagtcgtttggaacaagatattttttctttcctggcagcttttaacattatagcaaatttgtgtctgggggactgctggtcactgtttctcacagttgcaaatcaaggcatttgcaaccaagaaaaaaaaaattttttgttttatttgaaactggaccggataaacggtgtttgagcggctgctgtatatagttttaaatggtttattgcacctccttaagttgcacttatgtgggggggtggggttgatagaagtttttaatcacaaagtcacaggacttttttcttttgtaactgagctaaaaagggctgcttttcggtgggggcagatgaaggctcacaggagccctttctcttagagggggcaagtacccttcccttatatctttaatttgaggaatgtatgagataacagttgcagttgactgaaatgccactggaatttgaaaacttgacttttttttctttcctttttttttttttttttttttttaaaaagaaacaaaaaacccacaaaaactacttgcccctcctagggaagctgtgtgccaaagaaccagtgtcataacccctccctcctgctgagctgacgttgcattgttgcatatcccagctactctgtgggttttgtgaagctgtgtgtgaagtctctacctcattgtagtatatgcaggcaagactgcactctcctacagatgtgtggagtaagctgtggtgtagtttttttggcacataataaacacgttgcagc

SEQ ID NO: 219281 - DNA, 3175 bp, Artificial Sequence
  derived and/or modified sequence
agccggctgatgtcactggcagcgggaagcatcagcagcctgatcacatgctggcccagtctgtaatgcagacgggataggggtgtgtgtgtgaggggagggggcctgtatggcaactgctcttgccccagcgtccccaaaagtgcagaggcagcggctgcagcatccagccagcttggatgtctggcctgtgagcctggggaaactattattaataatatttactgttgataatattggggaaaacagcccttaactctgaggtttctgctgtgctcctttccaaaacagacttccaggactctgaagaaacagttacaagcaggatgcttttcccaacctctgcgcaagaatcttcccgtggcctcccagatgcaaatgacttgtgccttggcctgcagtccctcagtctgacaggctgggaccgaccctggagcacccaggactcagattcctcagcccagagcagcacacactcggtactgagcatgctccataacccactgggaaatgtcctaggaaaaccccccttgagcttcctgcctctggatccccttgggtctgacttggtggacaagtttccagcaccctcagttagaggatcacgcctggacacccggcccatcctggactctcgatctagcagcccctctgactcagacaccagtggcttcagctctggatcagatcatctctcagatttgatttcaagccttcgcatttctccacctctgcccttcctgtctctgtcagggggtggtcccagagaccctttaaagatgggggtagggtctcggatggaccaagagcaagctgctcttgctgcagtcactccctccccaaccagtgcttcaaagagatggccaggagcttctgtgtggccgtcctgggacctcctcgaagctcccaaagaccccttcagcatagagagagaggccaggctgcaccgacaagctgcagctgtgaatgaagccacctgtacctggagtggccagcttcctccccggaactataagaaccccatctactcttgcaaggtgtttctaggaggtgttccttgggatattacagaagctggattagttaacaccttccgtgtttttggctctttgagtgtggagtggcctggtaaggatggcaagcatccccggtgtcctcccaaagggtatgtgtatctggtcttcgaactagagaagtctgtccgatccttgcttcaggcttgctctcatgacccgctgagcccagatggcctgagtgaatattatttcaagatgtccagccgaaggatgcgctgcaaggaggtgcaggtgatcccctgggtattagccgacagtaactttgtccggagcccatctcagaggcttgaccccagcaggacggtgtttgtcggtgctctgcatggaatgctaaatgctgaggccctggcagccatcttgaacgacctatttggtggagtggtgtatgccgggattgacacagataagcacaagtatcccattggttctggtcgtgtgactttcaataaccaacggagttacctgaaagcagtcagcgctgcttttgtggagatcaaaaccaccaagttcacaaagaaggttcagattgacccctacctagaagattctctgtgtcatatctgcagttctcagcctggtcctttcttctgtcgagatcaggtctgcttcaaatacttctgccggagctgctggcactggcggcacagcatggagggcctgcgccaccacagccccctgatgcggaaccagaagaaccgagattccagctagaggagctggccttgcccagtggcctgtggcgcccaaagctggcaggtcaggcaagcagcctgcaccaccctgccactggcgaccagggagctggcttcccaaggacaagggaaaattgtagtcacctttgcacttgctgaatctgtctttgtttctgcactaattaatgcacattgagttttgtcaggttttgttttcagggggtgtaccaagggcaaggaccctctggcttaccctccaagcgactctgtagttttcccagattttagttcctcattttgcagatgaaaagcggggaaaaaaaaaaaaaaaaaaaaaactacgtgtccagaaggtattgaggtattgacacggatgcctacacctaggtttatttattaaaagcgcttttttacattccttgcaatactgatggtgatgatgcgcaggtctcattggtttcattcttgcagttgccatacagtgcctttccatttatttaacccccacctgaacggcataaactgagtgttcagctggtgttttttactgtaaacaataaggagactttgctcttcatttaaaccaaaatcatatttcatattttacgctcgagggtttttaccggttcctttttacactccttaaaacagtttttaagtcgtttggaacaagatattttttctttcctggcagcttttaacattatagcaaatttgtgtctgggggactgctggtcactgtttctcacagttgcaaatcaaggcatttgcaaccaagaaaaaaaaaattttttgttttatttgaaactggaccggataaacggtgtttgagcggctgctgtatatagttttaaatggtttattgcacctccttaagttgcacttatgtgggggggtggggttgatagaagtttttaatcacaaagtcacaggacttttttcttttgtaactgagctaaaaagggctgcttttcggtgggggcagatgaaggctcacaggagccctttctcttagagggggcaagtacccttcccttatatctttaatttgaggaatgtatgagataacagttgcagttgactgaaatgccactggaatttgaaaacttgacttttttttctttcctttttttttttttttttttttttaaaaagaaacaaaaaacccacaaaaactacttgcccctcctagggaagctgtgtgccaaagaaccagtgtcataacccctccctcctgctgagctgacgttgcattgttgcatatcccagctactctgtgggttttgtgaagctgtgtgtgaagtctctacctcattgtagtatatgcaggcaagactgcactctcctacagatgtgtggagtaagctgtggtgtagtttttttggcacataataaacacgttgcagc

SEQ ID NO: 219282 - DNA, 3181 bp, Artificial Sequence
  derived and/or modified sequence
cggggctgcgcgcggcccgctgcaaaaatagtgcccacgtgcgtgcgcgtctctcgcccgccggctggccggtcagcccgtcagccccgcagggccacaccggccccatggcgttcccgctggaagaagaagcaggaaggataaaagattgctgggacaaccaggaagcacctgctctctccacgtgtagtaatgccaatatctttcgaaggataaatgccatattggataattctctggatttcagtagagtctgcactacacctataaaccgaggaattcatgatcatttgccagacttccaggactctgaagaaacagttacaagcaggatgcttttcccaacctctgcgcaagaatcttcccgtggcctcccagatgcaaatgacttgtgccttggcctgcagtccctcagtctgacaggctgggaccgaccctggagcacccaggactcagattcctcagcccagagcagcacacactcggtactgagcatgctccataacccactgggaaatgtcctaggaaaaccccccttgagcttcctgcctctggatccccttgggtctgacttggtggacaagtttccagcaccctcagttagaggatcacgcctggacacccggcccatcctggactctcgatctagcagcccctctgactcagacaccagtggcttcagctctggatcagatcatctctcagatttgatttcaagccttcgcatttctccacctctgcccttcctgtctctgtcagggggtggtcccagagaccctttaaagatgggggtagggtctcggatggaccaagagcaagctgctcttgctgcagtcactccctccccaaccagtgcttcaaagagatggccaggagcttctgtgtggccgtcctgggacctcctcgaagctcccaaagaccccttcagcatagagagagaggccaggctgcaccgacaagctgcagctgtgaatgaagccacctgtacctggagtggccagcttcctccccggaactataagaaccccatctactcttgcaaggtgtttctaggaggtgttccttgggatattacagaagctggattagttaacaccttccgtgtttttggctctttgagtgtggagtggcctggtaaggatggcaagcatccccggtgtcctcccaaagggtatgtgtatctggtcttcgaactagagaagtctgtccgatccttgcttcaggcttgctctcatgacccgctgagcccagatggcctgagtgaatattatttcaagatgtccagccgaaggatgcgctgcaaggaggtgcaggtgatcccctgggtattagccgacagtaactttgtccggagcccatctcagaggcttgaccccagcaggacggtgtttgtcggtgctctgcatggaatgctaaatgctgaggccctggcagccatcttgaacgacctatttggtggagtggtgtatgccgggattgacacagataagcacaagtatcccattggttctggtcgtgtgactttcaataaccaacggagttacctgaaagcagtcagcgctgcttttgtggagatcaaaaccaccaagttcacaaagaaggttcagattgacccctacctagaagattctctgtgtcatatctgcagttctcagcctggtcctttcttctgtcgagatcaggtctgcttcaaatacttctgccggagctgctggcactggcggcacagcatggagggcctgcgccaccacagccccctgatgcggaaccagaagaaccgagattccagctagaggagctggccttgcccagtggcctgtggcgcccaaagctggcaggtcaggcaagcagcctgcaccaccctgccactggcgaccagggagctggcttcccaaggacaagggaaaattgtagtcacctttgcacttgctgaatctgtctttgtttctgcactaattaatgcacattgagttttgtcaggttttgttttcagggggtgtaccaagggcaaggaccctctggcttaccctccaagcgactctgtagttttcccagattttagttcctcattttgcagatgaaaagcggggaaaaaaaaaaaaaaaaaaaaaactacgtgtccagaaggtattgaggtattgacacggatgcctacacctaggtttatttattaaaagcgcttttttacattccttgcaatactgatggtgatgatgcgcaggtctcattggtttcattcttgcagttgccatacagtgcctttccatttatttaacccccacctgaacggcataaactgagtgttcagctggtgttttttactgtaaacaataaggagactttgctcttcatttaaaccaaaatcatatttcatattttacgctcgagggtttttaccggttcctttttacactccttaaaacagtttttaagtcgtttggaacaagatattttttctttcctggcagcttttaacattatagcaaatttgtgtctgggggactgctggtcactgtttctcacagttgcaaatcaaggcatttgcaaccaagaaaaaaaaaattttttgttttatttgaaactggaccggataaacggtgtttgagcggctgctgtatatagttttaaatggtttattgcacctccttaagttgcacttatgtgggggggtggggttgatagaagtttttaatcacaaagtcacaggacttttttcttttgtaactgagctaaaaagggctgcttttcggtgggggcagatgaaggctcacaggagccctttctcttagagggggcaagtacccttcccttatatctttaatttgaggaatgtatgagataacagttgcagttgactgaaatgccactggaatttgaaaacttgacttttttttctttcctttttttttttttttttttttttaaaaagaaacaaaaaacccacaaaaactacttgcccctcctagggaagctgtgtgccaaagaaccagtgtcataacccctccctcctgctgagctgacgttgcattgttgcatatcccagctactctgtgggttttgtgaagctgtgtgtgaagtctctacctcattgtagtatatgcaggcaagactgcactctcctacagatgtgtggagtaagctgtggtgtagtttttttggcacataataaacacgttgcagc

SEQ ID NO: 219283 - DNA, 2112 bp, Artificial Sequence
  derived and/or modified sequence
cggggctgcgcgcggcccgctgcaaaaatagtgcccacgtgcgtgcgcgtctctcgcccgccggctggccggtcagcccgtcagccccgcagggccacaccggccccatggcgttcccgctggaagaagaagcaggaaggataaaagattgctgggacaaccaggaagcacctgctctctccacgtgtagtaatgccaatatctttcgaaggataaatgccatattggataattctctggatttcagtagagtctgcactacacctataaaccgaggaattcatgatcatttgccagacttccaggactctgaagaaacagttacaagcaggatgcttttcccaacctctgcgcaagaatcttcccgtggcctcccagatgcaaatgacttgtgccttggcctgcagtccctcagtctgacaggctgggaccgaccctggagcacccaggactcagattcctcagcccagagcagcacacactcggtactgagcatgctccataacccactgggaaatgtcctaggaaaaccccccttgagcttcctgcctctggatccccttgggtctgacttggtggacaagtttccagcaccctcagttagaggatcacgcctggacacccggcccatcctggactctcgatctagcagcccctctgactcagacaccagtggcttcagctctggatcagatcatctctcagatttgatttcaagccttcgcatttctccacctctgcccttcctgtctctgtcagggggtggtcccagagaccctttaaagatgggggtagggtctcggatggaccaagagcaagctgctcttgctgcagtcactccctccccaaccagtgcttcaaagagatggccaggagcttctgtgtggccgtcctgggacctcctcgaagctcccaaagaccccttcagcatagagagagaggccaggctgcaccgacaagctgcagctgtgaatgaagccacctgtacctggagtggccagcttcctccccggaactataagaaccccatctactcttgcaaggtgtttctaggaggtgttccttgggatattacagaagctggattagttaacaccttccgtgtttttggctctttgagtgtggagtggcctggtaaggatggcaagcatccccggtgtcctcccaaagggtatgtgtatctggtcttcgaactagagaagtctgtccgatccttgcttcaggcttgctctcatgacccgctgagcccagatggcctgagtgaatattatttcaagatgtccagccgaaggatgcgctgcaaggaggtgcaggtgatcccctgggtattagccgacagtaactttgtccggagcccatctcagaggcttgaccccagcaggacggtgtttgtcggtgctctgcatggaatgctaaatgctgaggccctggcagccatcttgaacgacctatttggtggagtggtgtatgccgggattgacacagataagcacaagtatcccattggttctggtcgtgtgactttcaataaccaacggagttacctgaaagcagtcagcgctgcttttgtggagatcaaaaccaccaagttcacaaagaaggttcagattgacccctacctagaagattctctgtgtcatatctgcagttctcagcctggtcctttcttctgtcgagatcaggtctgcttcaaatacttctgccggagctgctggcactggcggcacagcatggagggcctgcgccaccacagccccctgatgcggaaccagaagaaccgagattccagctagaggagctggccttgcccagtggcctgtggcgcccaaagctggcaggtcaggcaagcagcctgcaccaccctgccactggcgaccagggagctggcttcccaaggacaagggaaaattgtagtcacctttgcacttgctgaatctgtctttgtttctgcactaattaatgcacattgagttttgtcaggttttgttttcagggggtgtaccaagggcaaggaccctctggcttaccctccaagcgactctgtagttttcccagattttagttcctcattttgcagatgaaaagcggggaaaaaaaaaaaaaaaaaaaaaa

SEQ ID NO: 219284 - DNA, 1695 bp, Artificial Sequence
  derived and/or modified sequence
atgcctgagtgcttgtggacccagggcgtattgcaggaggttctaaactcctacttttgcggatccatcatcctcagcacgctgccctgggaggttccaggtggacacgcctcaaggatctgtctcctccttttagctacaggcgagaacaaacaggtagaatgctaccaattgtctccggggctgtcttctctgcctgacttccaggatagcgaagagaccgttacgagcagaatgctgtttcctaccagtgcccaggaatcctcaaggggcctgcctgatgccaacgacctgtgtttgggccttcaaagtctgtccctgactggttgggatcgaccttggagcactcaagattcggacagttcagcgcagtcttccacacactcagtattgtctatgctgcacaaccctctcgggaacgtcttaggtaagccaccactgagctttttaccgctggacccactcggatctgacctagtcgataagttccctgctccaagtgtaagaggctcacgcttggacacccggcccatcctggattccaggtcctcgagtccaagcgatagtgacactagcggttttagctccgggagcgaccatctcagcgacttgattagcagtctgcgcatctctcctccgctgccgttcttgtcactgtcgggtggagggcctagagacccactgaaaatgggggtcggcagtcgcatggatcaggaacaggccgctttagccgccgtgacaccctcaccaacgtctgccagtaaaagatggcctggggcctcagtgtggccatcctgggacctgttagaggcccctaaggaccccttttctatcgagcgtgaggctcggctgcaccggcaagcagcagctgtcaacgaagccacttgcacctggtctggccagctgccaccaagaaactacaagaaccccatctacagttgtaaggtatttttgggaggtgtaccctgggacataacggaagccggcctagtgaatactttccgagtcttcggaagtctgtccgtggaatggcctggaaaggatggcaagcacccgaggtgcccgccgaaagggtacgtgtacctcgtgttcgagttggagaaatccgtgaggtctttattgcaggcctgctcccacgatcccctcagcccagacggtttgagcgagtactacttcaagatgtcatctagacgcatgcgatgcaaagaggtgcaggtgattccctgggtcctggcagatagcaacttcgtccgtagtccttcccagcgcctggacccaagtcgcacggtatttgtgggggctttacatgggatgctcaatgcagaggccttggcagccatcttgaacgacctattcgggggtgtagtgtatgctggtatcgatacagacaagcataaataccctataggatccggacgagtgacatttaacaaccaaagatcctacctgaaagccgtcagtgccgcgtttgtggagatcaaaaccactaagttcaccaagaaagtccagattgacccatacttagaagacagcttatgtcacatctgttcatcacagccaggccctttcttttgtcgtgatcaggtttgttttaaatacttctgtcggagctgttggcactggaggcattccatggaaggcctccgacaccatagcccccttatgcgtaaccagaaaaatcgagacagctcatag

SEQ ID NO: 219285 - DNA, 1686 bp, Artificial Sequence
  derived and/or modified sequence
atgagcatgccgctggaagaggaagctggccggattaaggactgttgggacaaccaagaagcgccagcgctgagtacctgttcaaacgcgaatatcttcaggcggattaacgctatacttgacaactcactagatttcagcagggtgtgcacaacgccaataaaccgtggcatccacgaccatctgccggactttcaggacagtgaagagacagtgacatcccgtatgctctttcctaccagtgctcaagaatctagtcgtggacttccagatgcaaatgacttgtgtttgggcttgcagagcctgtccctgacaggatgggataggccttggtccacccaggacagtgacagctccgctcaatccagtacacacagcgtgctaagtatgctgcacaaccctttaggaaatgttctgggaaagcccccgctgtcttttctgcctctcgatccactgggctctgatctggtggacaaatttcccgccccatcagtgcggggctcccggctagatacccgccccattctggacagtagatccagttccccatctgattctgacacgtctgggttcagcagcggcagcgatcacctcagcgatctgatctccagcctgagaatttctcccccgctgccgtttctgagcttgtcaggaggcggaccacgagatccactgaagatgggcgtgggaagccgtatggatcaggagcaagcagccctcgctgccgttacgccttcgccaacttccgcgagtaaaagatggcctggagcctccgtttggcccagttgggatctcctcgaggctccaaaggacccttttagtatagaacgggaggcccgcctccatcgtcaggctgccgctgtcaacgaggccacatgcacctggagcgggcagttgccccctaggaattataaaaatcccatctactcctgcaaggtctttttggggggggttccttgggacatcaccgaggccgggctggtcaacacatttcgagtgttcggaagtcttagcgtggaatggcccggcaaggatgggaaacaccccaggtgccctcccaaagggtacgtgtacctggtgtttgaattggagaaatccgtcagatctctcctgcaagcctgctcccacgatccgctcagtcctgatggactgagtgagtactattttaaaatgagtagccgccgcatgcgatgtaaagaggtacaggtgatcccctgggtcctggcggacagcaattttgtgagaagcccaagtcagaggctggaccctagccgaactgtcttcgtcggcgccctgcacgggatgctgaacgccgaagctctggctgccatcctaaatgaccttttcggcggcgtggtgtacgcaggcattgatactgataagcacaagtatcctatcgggagcgggagagtcacgttcaacaaccagcgatcttaccttaaagctgtgagcgcggctttcgtagagataaagacaaccaaatttacaaaaaaggttcagattgacccatatctcgaggattccctgtgtcatatctgttctagtcagcctggtccctttttctgtcgggatcaggtgtgctttaaatacttctgccgctcctgctggcattggcgccacagcatggaaggtctgcgccatcactcccccctcatgaggaaccaaaaaaaccgcgattctagctag

SEQ ID NO: 219286 - DNA, 1686 bp, Artificial Sequence
  derived and/or modified sequence
atggccttccctctggaggaggaggcaggccgtattaaggattgctgggataaccaggaagcccctgcattgtcaacatgctcaaatgccaacatctttcgccgaatcaacgcaattcttgataactcactggacttctcaagggtctgcaccacacctatcaaccgaggaatccacgaccatctgcccgattttcaggactctgaggagaccgtgaccagccgaatgctcttcccgacttcggctcaggagagctcgcgaggactcccggacgccaatgatctatgtctgggtcttcagtccttaagcctgaccgggtgggacagaccctggagtacccaggacagtgattcatctgcgcagtccagcacgcacagcgtgctctcaatgctgcacaatccgctgggaaatgtgttgggaaaaccaccactgtcgtttttacccctcgaccccttggggtcagaccttgttgacaaattcccagccccctcagtacgaggcagtcggctcgacaccagacccattctcgactcaaggagttcttccccgtctgacagcgatacaagtggattttcatcaggttccgatcatctgtcagacctcatatccagtcttcgcatttccccacctttacctttcctgagcctctccggcggtggcccaagggaccctctcaaaatgggtgttggctctcgcatggaccaggaacaagcagctctagctgccgtaaccccctctccgacaagcgcctcgaagagatggcccggtgcatctgtgtggcccagttgggacctgctggaggcccccaaggacccatttagcatagagcgagaagcacggctgcatcgccaagccgcagccgtcaatgaagccacctgcacctggtcggggcaactgccccccaggaattacaaaaatcccatttactcatgtaaggtttttctgggaggagtcccctgggacataacggaggcgggattagttaacaccttcagggtgtttggctcacttagcgtggagtggccgggtaaggacggcaaacaccctagatgtcctcccaaggggtatgtgtacctggtctttgagctagagaaatctgtgcgcagtctcctccaggcgtgttcacacgatccgttgtcgccagacggactgagcgagtactattttaagatgagctctcggcggatgcggtgtaaggaagtgcaagttataccttgggttttagctgattcaaactttgtgaggtctccgagccagagactcgacccatcacgtacggttttcgttggggcattgcacggcatgctaaatgcagaagcactggctgccattcttaacgatctgtttggtggtgtagtctacgctggaatagacaccgacaaacataaatacccaatcggcagtgggcgcgtcacttttaacaaccaaaggagctacctgaaagccgtctcagctgcttttgtggagataaagacaactaaattcaccaaaaaagtgcagatagatccatatctggaagactctctgtgtcacatttgtagctcacaaccaggtccttttttctgtagagaccaagtgtgcttcaagtatttctgccgcagctgttggcactggcgccattcgatggaaggcctcagacatcactccccgctgatgcgtaatcagaagaatcgggacagctcctag

SEQ ID NO: 219287 - DNA, 1686 bp, Artificial Sequence
  derived and/or modified sequence
atggcctttcctctggaggaggaagctgggcggattaaggactgctgggacaatcaggaagccccagcactgagcacctgttctaatgctaacatctttagaaggatcaacgctattctggataacagcctcgacttcagtagggtgtgcaccactcctattaacagaggcatccatgaccatctgccggatttccaggattcagaagagacagttacatctcggatgctattccccacttcagcccaagaaagctcccgcggcttaccagatgccaatgatctctgtcttggactgcagtcgctatctctaacggggtgggacaggccgtggtccacacaggattccgattcatctgcccagtcgtctacacattcagtgttgtctatgcttcacaatccattaggtaacgtgctgggaaaaccccccctttcattcttacctctcgatcctctcggctctgatttagtagacaagtttccagcaccctcagttagaggcagcaggctcgatactcgccctatcctggattccaggagctcgtccccctctgattccgacacatccggtttcagctcggggagcgatcacctgagtgatctgattagttcccttcgcatatccccacctctgcccttcctctccctgtctggcggggggccccgcgatcctctgaagatgggcgtcggatcacggatggaccaagagcaggcagctcttgcggctgtcacaccctcgcccactagcgcctccaaaagatggcccggcgccagcgtctggccctcatgggacctccttgaggctccaaaggacccattttctattgagcgggaggctcgcttgcaccgtcaggccgcagccgtgaacgaagccacctgcacatggtccggtcagctgcccccacggaactacaaaaacccaatttactcttgcaaagtgttcttgggtggagtgccttgggatattaccgaagcagggctcgttaatacatttagggttttcggcagtttatctgtggagtggcctgggaaggatggcaagcatccgcggtgtccaccgaaaggctacgtctatctggtttttgaacttgagaaaagcgtgcggtccttgctccaagcttgctctcatgaccccctgagcccggacggactcagtgaatattattttaaaatgtccagtcggcggatgaggtgcaaggaagtgcaggtgatcccatgggtgttggctgattctaacttcgttcgttccccaagtcagcgcctggaccctagtaggacagtgttcgtaggcgctctgcacggaatgctgaacgcggaggcactggccgcaatcttgaatgatctgttcggcggggttgtttatgcaggcatcgacacggacaaacataaataccctattggctctgggcgagtcaccttcaataatcagagatcctatcttaaagccgtttcagcggctttcgtggagatcaaaacaactaagtttaccaagaaagttcaaatcgatccttacctggaggattcgctctgtcatatttgcagttcacagcccggtccatttttctgtcgtgaccaggtttgttttaagtacttttgccggtcttgttggcattggcggcacagtatggaaggactgcggcatcattccccgctcatgcggaaccagaagaatagagactcttcatag

SEQ ID NO: 219288 - DNA, 1695 bp, Artificial Sequence
  derived and/or modified sequence
atgccagaatgtctgtggacccagggcgtgctgcaggaggtgctgaacagctacttctgtggcagcatcatcctgagcaccctgccctgggaggtgcctgggggccacgccagccgcatctgcctgctgctgctggccactggagagaacaagcaggtggagtgctaccagctgagccctggcctgagcagcctgcctgacttccaggacagcgaggagaccgtgaccagcaggatgctgttccccaccagcgcccaggagagcagccggggcctgcctgatgccaatgacctgtgcctgggcctgcagagcctgagcctgaccggctgggaccggccctggagcacccaggacagcgacagcagcgcccagagcagcacccacagcgtgctgtccatgctgcacaaccccctgggcaatgtgctgggcaagccacccctgtccttcctgcccctggaccccctgggcagtgacctggtggacaagtttcctgcccccagcgtgcggggcagccggctggacacccggcccatcctggacagccgcagcagcagccccagcgacagcgacaccagcggcttcagcagcggcagtgaccacctgagtgacctgatcagcagcctgcgcatcagcccccccctgcccttcctgagcctgagcggcggcggcccccgggaccccctgaagatgggcgtgggcagcaggatggaccaggagcaggccgccctggccgctgtgacccccagccccaccagcgccagcaagcgctggccaggggcctctgtgtggcccagctgggacctgctggaggcccccaaggaccccttcagcattgaaagagaggcccggctgcaccggcaggccgctgctgtgaatgaggccacctgcacctggagcggccagctgcccccaagaaactacaagaaccccatctacagctgcaaggtgttcctgggcggcgtgccctgggacatcacagaggccggcctggtgaacaccttccgggtgtttggcagcctgtctgtggagtggccaggcaaggatggcaagcacccccgctgcccccccaagggctacgtgtacctggtgtttgagctggagaagtctgtgcgcagcctgctgcaggcctgcagccatgaccccctgagcccagatggcctgtctgagtactacttcaagatgagcagcaggaggatgcgctgcaaggaggtgcaggtgatcccctgggtgctggccgacagcaactttgtgcgcagccccagccagaggctggaccccagcaggacagtgtttgtgggcgccctgcacggcatgctgaatgctgaggccctggccgccatcctgaatgacctgtttggaggagtggtgtatgccggcatcgacacagacaagcacaagtaccccatcggcagcggccgggtgaccttcaacaaccagaggagctacctgaaggctgtgtctgctgcctttgtggagatcaagaccaccaagttcaccaagaaggtgcagattgacccctacctggaggacagcctgtgccacatctgcagcagccagcccggccccttcttctgccgggaccaggtgtgcttcaagtacttctgccgcagctgctggcactggaggcacagcatggagggcctgcggcaccacagccccctgatgaggaaccagaagaacagagacagcagctag

SEQ ID NO: 219289 - DNA, 1686 bp, Artificial Sequence
  derived and/or modified sequence
atgtccatgcccctggaggaggaggccggccgcatcaaggactgctgggacaaccaggaggccccagccctgagcacctgcagcaatgccaacatcttccgccgcatcaatgccatcctggacaacagcctggacttcagccgggtgtgcaccacccccatcaacagaggcatccatgaccacctgcctgacttccaggacagcgaggagaccgtgaccagcaggatgctgttccccaccagcgcccaggagagcagccggggcctgcctgatgccaatgacctgtgcctgggcctgcagagcctgagcctgaccggctgggaccggccctggagcacccaggacagcgacagcagcgcccagagcagcacccacagcgtgctgtccatgctgcacaaccccctgggcaatgtgctgggcaagccacccctgtccttcctgcccctggaccccctgggcagtgacctggtggacaagtttcctgcccccagcgtgcggggcagccggctggacacccggcccatcctggacagccgcagcagcagccccagcgacagcgacaccagcggcttcagcagcggcagtgaccacctgagtgacctgatcagcagcctgcgcatcagcccccccctgcccttcctgagcctgagcggcggcggcccccgggaccccctgaagatgggcgtgggcagcaggatggaccaggagcaggccgccctggccgctgtgacccccagccccaccagcgccagcaagcgctggccaggggcctctgtgtggcccagctgggacctgctggaggcccccaaggaccccttcagcattgagcgggaggcccggctgcaccggcaggccgctgctgtgaatgaggccacctgcacctggagcggccagctgccccccaggaactacaagaaccccatctacagctgcaaggtgttcctgggcggcgtgccctgggacatcacagaagctggcctggtgaacaccttccgggtgtttggcagcctgtctgtggagtggccaggcaaggatggcaagcacccccgctgcccccccaagggctacgtgtacctggtgtttgagctggagaagtctgtgcgcagcctgctgcaggcctgcagccatgaccccctgagcccagatggcctgtctgagtactacttcaagatgagcagcaggaggatgcgctgcaaggaggtgcaggtgatcccctgggtgctggccgacagcaactttgtgcgcagccccagccagaggctggaccccagcaggacagtgtttgtgggcgccctgcacggcatgctgaatgctgaggccctggccgccatcctgaatgacctgtttggaggagtggtgtatgccggcatcgacacagacaagcacaagtaccccatcggcagcggccgggtgaccttcaacaaccagaggagctacctgaaggctgtgtctgctgcctttgtggagatcaagaccaccaagttcaccaagaaggtgcagattgacccctacctggaggacagcctgtgccacatctgcagcagccagcccggccccttcttctgccgggaccaggtgtgcttcaagtacttctgccgcagctgctggcactggaggcacagcatggagggcctgcggcaccacagccccctgatgaggaaccagaagaacagagacagcagctag

SEQ ID NO: 219290 - DNA, 1686 bp, Artificial Sequence
  derived and/or modified sequence
atggccttccccctggaggaggaggccggccgcatcaaggactgctgggacaaccaggaggccccagccctgagcacctgcagcaatgccaacatcttccgccgcatcaatgccatcctggacaacagcctggacttcagccgggtgtgcaccacccccatcaacagaggcatccatgaccacctgcctgacttccaggacagcgaggagaccgtgaccagcaggatgctgttccccaccagcgcccaggagagcagccggggcctgcctgatgccaatgacctgtgcctgggcctgcagagcctgagcctgaccggctgggaccggccctggagcacccaggacagcgacagcagcgcccagagcagcacccacagcgtgctgtccatgctgcacaaccccctgggcaatgtgctgggcaagccacccctgtccttcctgcccctggaccccctgggcagtgacctggtggacaagtttcctgcccccagcgtgcggggcagccggctggacacccggcccatcctggacagccgcagcagcagccccagcgacagcgacaccagcggcttcagcagcggcagtgaccacctgagtgacctgatcagcagcctgcgcatcagcccccccctgcccttcctgagcctgagcggcggcggcccccgggaccccctgaagatgggcgtgggcagcaggatggaccaggagcaggccgccctggccgctgtgacccccagccccaccagcgccagcaagcgctggccaggggcctctgtgtggcccagctgggacctgctggaggcccccaaggaccccttcagcattgagcgggaggcccggctgcaccggcaggccgctgctgtgaatgaggccacctgcacctggagcggccagctgccccccaggaactacaagaaccccatctacagctgcaaggtgttcctgggcggcgtgccctgggacatcacagaagctggcctggtgaacaccttccgggtgtttggcagcctgtctgtggagtggccaggcaaggatggcaagcacccccgctgcccccccaagggctacgtgtacctggtgtttgagctggagaagtctgtgcgcagcctgctgcaggcctgcagccatgaccccctgagcccagatggcctgtctgagtactacttcaagatgagcagcaggaggatgcgctgcaaggaggtgcaggtgatcccctgggtgctggccgacagcaactttgtgcgcagccccagccagaggctggaccccagcaggacagtgtttgtgggcgccctgcacggcatgctgaatgctgaggccctggccgccatcctgaatgacctgtttggaggagtggtgtatgccggcatcgacacagacaagcacaagtaccccatcggcagcggccgggtgaccttcaacaaccagaggagctacctgaaggctgtgtctgctgcctttgtggagatcaagaccaccaagttcaccaagaaggtgcagattgacccctacctggaggacagcctgtgccacatctgcagcagccagcccggccccttcttctgccgggaccaggtgtgcttcaagtacttctgccgcagctgctggcactggaggcacagcatggagggcctgcggcaccacagccccctgatgaggaaccagaagaacagagacagcagctag

SEQ ID NO: 219291 - DNA, 1695 bp, Artificial Sequence
  derived and/or modified sequence
atgcccgagtgcctgtggacccagggcgtgctgcaggaggtgctgaactcatacttctgcggcagcattatactgagtaccttaccatgggaagttccagggggtcacgcgtcacgcatctgtcttttgttgttggcaacaggggagaacaaacaagtggaatgttaccagctgagcccgggcttgtcaagcctgcccgacttccaagactctgaagagacggtaacatcccggatgctgttcccaacaagtgcccaggaatcctctaggggactgcccgatgcaaacgacctgtgtttgggactccaatccctcagcttaaccgggtgggaccgcccgtggtcaacacaggacagcgacagcagcgcccagtctagtacgcactcagtgctgtcaatgctccataacccactggggaacgtcctgggaaagcctccactaagctttctacctctggaccccttaggaagcgacttggtcgataaatttccggccccctccgttcgggggtcccggttagatacccgtccaatcctggattctcgctcgtcttcaccaagcgacagcgacacatcaggattcagctccgggagcgaccacctgtcagacctgatttcctcccttcgtatatcaccgcccttgccgttccttagcctttcagggggcggccccagggaccctcttaagatgggagttggctcccggatggatcaggagcaagcagctcttgcagccgttacgccttcccccactagtgcaagcaagagatggccaggcgccagtgtctggccttcttgggacctgttggaggctcccaaggatccatttagcatcgagcgagaggcccgtcttcaccgacaggccgctgcggttaacgaagccacgtgtacttggagcggccaactgccccctagaaactataagaaccccatctacagttgcaaggtgttcctaggcggcgtaccatgggatataaccgaagctgggctggtcaatacatttcgcgtatttggatctctgagcgtcgagtggcccgggaaagacgggaagcaccctagatgccctcctaaaggatacgtgtatctcgtgtttgagctggagaagtcagttcgatccttgctgcaagcctgctctcacgatcctctctccccagacggactgtctgaatattatttcaagatgagcagtcggcggatgcgatgcaaggaggtgcaggtgatcccctgggtattggctgactctaacttcgtgaggtcacctagccagagactggacccttcccgcaccgtgttcgtgggtgctcttcatggaatgcttaacgccgaagctctcgccgccatcctgaacgatcttttcgggggagtcgtctatgctggcattgataccgacaagcataagtatcccataggctctgggagagtcacattcaacaaccagcggagttacctgaaggccgtctctgccgccttcgtcgaaataaaaaccactaaatttactaagaaggtgcaaatcgacccctacctcgaggactcactctgccacatttgttcttcccaacctggtcctttcttctgccgggatcaggtgtgctttaagtatttttgccggtcctgctggcattggcggcactccatggagggcctgagacatcattcccctttgatgcggaaccagaagaaccgcgatagcagttag

SEQ ID NO: 219292 - DNA, 1686 bp, Artificial Sequence
  derived and/or modified sequence
atgagcatgcccctggaggaggaggccggccggatcaaggactgctgggacaaccaggaggccccagcgctgtcaacatgctccaacgcgaatattttccgccggattaacgcaatattggacaattctcttgacttcagcagggtgtgtacaaccccgataaatagagggatccatgaccacctgccggatttccaggactcggaagagaccgtcacgtctcgcatgctgtttcccaccagcgcacaggagtcctctcgggggttgcctgacgcaaatgatctgtgcctggggttgcagtccctgagcctgacggggtgggacaggccatggtccacgcaggacagcgattcaagcgcccagtcgagtacacactccgtgctgtccatgttgcacaatcccttgggtaacgtgctcggcaagcctcccctgtcatttttgccattagaccctctgggcagtgacctagtagacaagttcccagcccccagtgtgagaggttctaggcttgacacgagacctatccttgactccaggagttccagcccgagtgactccgataccagtgggttctcttcaggaagtgatcatctgtcagatctgatatctagcctgcgtatctctcccccactgcccttcttgagcctgtccggtggcggacctagggatccccttaaaatgggcgttggaagccggatggatcaggagcaggctgccttagccgccgtcaccccgagcccaacttcagccagtaaaagatggccaggtgcctctgtgtggccatcatgggatctgctggaggctccaaaagacccttttagtatcgagcgggaggcgcggcttcatagacaggccgcggcagtgaatgaggccacatgcacctggagcggtcagctccctccaagaaattacaagaatccaatctacagctgtaaagtgtttctgggcggagtgccctgggatatcaccgaggccggtctggtgaacacatttcgggtctttggctccctgagcgtggagtggccaggaaaagacggcaagcatcccaggtgcccccctaaggggtacgtgtacttggtctttgaattagagaaatctgtccgcagcctgctgcaggcatgttcacatgaccccctcagtcccgacggactgtcagagtactactttaagatgtctagccggagaatgagatgtaaagaggtacaagtaattccttgggtcctggctgatagcaactttgtgcgttcgcctagtcagaggctcgacccaagtcgcacagtgttcgtcggtgccctacatggcatgctaaacgccgaagccctagctgccatactcaacgacctttttggcggcgtggtatatgcagggattgacaccgataaacacaaatatcccatcggctcaggtagagttacattcaacaatcagagatcatacctcaaagcggtgagcgccgcatttgtggagattaagaccacgaagtttacaaaaaaggtgcaaattgatccctatctggaggattccttgtgccatatttgtagcagccagcctggcccatttttctgcagagaccaggtctgttttaagtacttttgtaggtcttgctggcattggaggcattctatggagggtctgagacatcatagtccgctcatgagaaatcaaaaaaaccgtgactcctcctag

SEQ ID NO: 219293 - DNA, 1686 bp, Artificial Sequence
  derived and/or modified sequence
atggccttccccctggaggaggaggccggccggatcaaggactgctgggacaatcaggaagcccccgccttgtccacgtgtagtaacgctaatattttccggagaatcaacgccatactggacaatagcctagatttctctagggtgtgcaccactcccattaatcgaggcattcacgaccaccttccagactttcaagactcagaagagaccgtgacatctaggatgctcttccctacatcagcacaggagtcatcacgaggcctgcctgacgccaacgatctgtgcctgggtcttcaatcactgtcgctaaccggctgggacaggccctggtctacccaggacagcgattccagtgcccagtcgagcacccactcggtattgagtatgctgcacaatccattgggcaatgtacttggcaaaccgcctctgagcttcctgccccttgatccactggggtccgacttagtggacaagtttccagctccgagcgtgagggggagccgcctagacacgcgccccatccttgacagccgcagtagtagcccaagtgactccgatacctcaggattttcatctgggtctgaccatctctctgatttaatctccagccttagaatctcaccgccactgccttttctaagcctcagcggaggaggccctagggaccctctaaagatgggggtgggatccagaatggaccaggaacaggctgccctggcagcagtgaccccctcccctacatcagcctcaaaacgatggccaggagcctctgtctggccaagttgggacctgctggaggctccaaaggacccgttttctattgagcgcgaggctcgacttcacagacaggccgcagctgtgaacgaagccacttgtacatggagcggacagttacctcctagaaactataagaatcccatttacagttgtaaagtctttctcggcggcgtgccttgggatattacagaggctggcctggtcaacaccttcagggtatttggctccctttccgtggagtggcctggcaaagacggaaaacatcccaggtgcccccccaagggttacgtttacctcgtttttgaattggagaagagcgtgcggtctctgctacaagcttgcagtcacgaccctctgtcgcccgacggcctgagcgagtactactttaaaatgagttcccggcgcatgcgctgtaaagaagtccaggtgatcccgtgggtactggccgatagtaacttcgtgcggtctccttcccagcgcctcgacccttcacggacagtcttcgtcggtgctctccatggcatgctgaatgccgaagctctggctgctattctgaacgacctgttcggcggagtggtctatgctggtattgatacagataaacacaaataccccatcggcagcggccgcgtcaccttcaataaccagcgcagttacctgaaagcagtgagcgctgcttttgtggaaatcaagacgactaaatttacaaaaaaggtccagatcgatccatatcttgaagattccctctgtcacatctgcagctcccaaccaggtccatttttttgcagggatcaggtttgctttaagtatttctgccggagctgctggcactggcgccactccatggaggggctcaggcaccacagcccactgatgcggaaccaaaaaaaccgagactccagctag

SEQ ID NO: 219294 - DNA, 1686 bp, Artificial Sequence
  derived and/or modified sequence
atggccttccccctggaggaggaggccggccggatcaaggactgctgggacaatcaggaggcacctgctctctcaacttgctccaacgctaatattttccgcagaattaacgcgattttagacaatagtctcgactttagcagagtgtgcacgaccccaatcaacagaggcatacacgaccatctgccagacttccaggattccgaggaaacagttacctctagaatgctgttccccacgagcgcccaggaaagctcccgcgggttacccgatgccaatgatctgtgcttgggcctgcagtctctctctctgactggttgggatcgaccctggtccacgcaggattccgactccagtgcccaatcatccactcactctgtcctgagtatgctgcataacccactggggaatgtgcttggtaaaccacctctctccttcctgccacttgatcctttaggcagcgatcttgtggataagttccccgccccatcagtaagggggtctcgactggatactcgccccatccttgatagtcgctcaagttcaccatccgacagcgacacctccggcttctcctcgggcagcgatcatctctccgacttaatctcatccctgcggatctctcccccactccccttcctgtccctatcaggtggggggcccagagaccccctcaaaatgggcgtgggatcccgaatggaccaggagcaggctgctcttgccgccgtcaccccttcgccaacatccgccagcaagagatggcccggagcgtcagtttggccctcttgggacttattagaggcgcctaaagaccccttttctatagaaagagaggctcggctgcatcggcaggctgccgccgtgaacgaggccacctgcacttggagtgggcaactgcctccaagaaattacaagaatccgatatactcatgtaaggtgtttcttggcggtgttccatgggatatcacagaagccggcctagtgaacacctttcgcgttttcggctctctctctgtggaatggccaggcaaagacggcaagcaccccaggtgtcctcccaaaggctatgtgtacctcgtgtttgaactggaaaagagtgtaagaagcttactgcaggcatgtagccacgatcccctgagtcccgatgggttaagcgagtactattttaagatgagtagtcgtaggatgcggtgcaaggaagtgcaagtcatcccctgggtactagcggactcaaactttgtacggtcaccctcccagcgcttagatccttcccgtactgtctttgtgggcgcactgcacgggatgctgaatgctgaggctctcgcggctattctaaacgatctgttcggcggggtcgtgtacgccggcattgacacagataaacacaaatacccaataggatctggtagagtcacctttaataatcaacgcagttacctgaaggcggtatctgcagcatttgtggaaatcaagactactaaatttacgaaaaaagtacagatagatccatacttagaggactccctttgccatatctgcagctcacaaccagggccctttttctgtcgcgatcaggtgtgcttcaagtacttttgtcgaagttgttggcactggaggcatagcatggagggtctgagacatcactcacctttgatgcggaatcagaagaatcgcgatagtagctag

SEQ ID NO: 219295 - DNA, 1695 bp, Artificial Sequence
  derived and/or modified sequence
atgcccgagtgcttgtggacccagggcgtcctgcaggaggtgctcaacagctacttttgcggcagtatcatcctatccactctgccatgggaggtccccggaggccatgcttccagaatctgccttcttttgcttgctacgggtgagaataagcaggtcgaatgttatcagctgtcccccggtctgtcttcgctgccagatttccaggactctgaagaaacggtgacctccaggatgcttttcccaactagtgcccaggagagtagccggggactgccagacgcgaatgatttatgcctcgggctccagtcgttatctctgacaggatgggatcgcccttggagtacccaggactcagatagcagtgcgcaaagttcgacccattcagtcctcagcatgctgcacaatcccttgggcaacgtcctcggtaaacccccactttcttttctccccttggatccccttggatctgacctagtggacaagttccctgccccatccgtgcgagggagcaggctggacacaagacctatattggactcaagatcaagctcacccagcgattcagatacatcgggattcagttctggaagtgaccacttgtccgatctcatctcgtcactgagaatcagtccaccattaccatttctgtccttgagcggcggaggcccacgcgacccactaaaaatgggggtgggatcgcgtatggaccaagagcaggccgcactggccgcagtgaccccttctcccacgtcagcttctaagagatggcctggagctagcgtgtggccttcttgggacctgctggaggcccctaaagatcccttctctatagagcgtgaagccaggctgcaccgtcaggccgctgcagtcaacgaagctacctgcacctggagcggtcaactacccccacgaaactacaagaaccccatctattcctgcaaagtgttcttaggcggagtgccgtgggacataaccgaggcaggattggttaacacgttcagagtgtttggcagcctgagtgtggagtggccaggcaaggacggcaaacatcctaggtgccctcccaagggttacgtttatctagtgtttgaactggaaaaaagtgttcgctccctgttacaggcttgtagccatgatcccctctctccagacggcctttccgagtattacttcaagatgagtagtaggcgcatgcgctgcaaagaggttcaggtgatcccttgggtactggctgactcaaattttgttcgcagccccagtcaaagactggacccatccagaacagtcttcgtcggggctctgcatgggatgcttaacgctgaagccctggcggcaatattgaacgacctgttcgggggagtggtgtatgctggcattgatactgacaagcacaaataccctatcggtagcggcagagttacgttcaataaccagagaagttacctgaaggccgtttcggccgcatttgttgagattaagactaccaaattcacaaagaaggttcagatagatccttacctggaagattctttgtgccacatctgctcttcacagcctggccctttcttttgtagggatcaggtgtgttttaagtacttctgcagaagttgctggcattggcggcactctatggaaggactccgccaccatagtccacttatgcgcaatcagaaaaatagggattctagctag

SEQ ID NO: 219296 - DNA, 1686 bp, Artificial Sequence
  derived and/or modified sequence
atgtccatgccgctggaggaggaagctggcagaatcaaagactgttgggacaatcaggaggccccagccctgtctacatgtagcaatgctaatattttcaggcggataaacgcaatcctcgacaactccctcgacttctcccgcgtgtgtacaacacctatcaataggggtattcacgatcatctcccagacttccaggactccgaggaaacagtgacttcccgcatgctctttccaacttcagcacaggagagcagccgcggtctcccagacgctaacgatctatgtctgggactgcaaagcttgtcactgacgggctgggatcggccttggtccacccaggactccgactcaagtgcccagtcttccacacactcggttttgtccatgctgcataatccactgggtaacgtgctgggcaagccgccattatccttcctgcctcttgacccacttggttctgacctcgtagataagttccccgctccctccgtacggggatcaagattagacacaaggccaattctggactccaggtcttcatccccctccgacagcgatacttccggtttttcatccggcagcgaccatctgtccgacctcatttctagcttaagaattagcccgcctcttccctttctctcactgagtggcggtggcccaagagacccactgaagatgggcgtagggtcacgtatggatcaggagcaggccgcactcgccgcagttactccctctccaacgagcgccagtaagcgatggcctggagctagcgtgtggccatcctgggatctgttggaggcccctaaagacccattctcaattgagcgcgaagccagattacataggcaggccgcagcagtgaacgaggccacctgtacgtggagcggccagctcccccctcgaaactacaagaatcctatttactcctgcaaagtgttcctgggaggagttccatgggacattaccgaggcaggtctggtgaacacgttccgcgtttttggtagcctgagtgtagagtggccgggaaaagatggcaagcaccccagatgtccaccaaaagggtatgtgtacttagtgtttgagcttgaaaagagcgttcggagtttgttacaagcctgcagtcatgatcccctttctcccgatggattatccgaatactattttaagatgtcttcccgaagaatgcgctgtaaggaggtacaggtcatcccatgggtgctcgcggatagcaacttcgtgagaagtcccagccagagattggatcccagccggacagtcttcgtgggagcactccacggtatgctaaatgcagaggccttggcagcaatcctcaacgacctgttcggtggcgtggtctacgcaggtattgatactgacaaacataaataccctatcggcagcggcagagtcacctttaacaatcagcgttcctatttaaaggccgtgtcagcggctttcgttgagatcaagaccaccaaattcactaaaaaagtacagatcgacccttatctcgaggacagtttatgccacatttgctcttcgcagcccggaccgttcttctgtagggatcaggtttgctttaagtacttctgtaggtcctgttggcactggcgacattctatggagggactgcggcaccacagccccctgatgaggaatcaaaagaaccgggattcatcatag

SEQ ID NO: 219297 - DNA, 1686 bp, Artificial Sequence
  derived and/or modified sequence
atggccttcccactggaagaggaagcgggacgcatcaaggactgctgggataatcaggaggcccctgcccttagcacttgctctaacgcaaacatcttccgccgtattaacgcaatattggacaatagcctggacttctctagagtgtgtactacacctatcaatagagggattcacgatcacctgccagacttccaggattcggaggagacagtgaccagcaggatgctcttcccgacctcagcacaggaatcttctcgagggttgcccgacgccaacgatctatgtctcggcctgcagagcctgagtctgactggttgggatagaccttggtcaacccaggacagtgacagctccgcccaaagctccacccatagcgttctgagtatgctgcataatcccctgggcaacgtgctaggaaagcctcctctaagctttctgccattggatcccttgggctctgacctcgtggataagtttcctgcgccttctgtgcggggaagtaggctggatactaggccaatcctggactctaggagtagcagtccaagcgactccgatacatcagggttttctagcggtagcgatcatcttagtgaccttatttctagtttgcggatttctccaccgctcccttttctgtcgctgtcgggagggggtcccagagatcctctgaaaatgggggtcggatcacgaatggaccaagaacaggccgcattggcggcagtgactccatcaccaacgtccgcttccaagcggtggcccggtgccagcgtatggccttcatgggatctgcttgaggcccctaaagatccgttcagcattgaacgggaggctaggctgcaccgccaggcagcagccgtaaatgaagccacctgtacatggtccggtcagctgcctccgaggaactataagaacccgatatactcatgcaaggtgttcttaggaggcgtgccctgggatatcacagaggcgggtttagtgaatacctttcgagtatttggctccctatcggttgagtggccaggtaaagacgggaagcatccacggtgcccaccgaagggctacgtgtacttagtatttgagctggaaaaaagtgtgcggtcgcttttacaggcatgttcacacgaccctctcagcccagatgggctttcggagtactatttcaaaatgagcagtaggcgaatgcgatgcaaagaagtccaggttatcccctgggttctcgcggatagcaacttcgtgcgtagtccttcacagcgcttggacccaagtcggactgtgtttgtgggcgctttgcacgggatgcttaacgctgaggctctggctgccattctgaatgacctattcggaggggttgtgtatgcagggatagatacagacaagcacaaatatcccatcggctcgggtagagtgaccttcaataaccagcggtcatatctgaaggcagtttcagctgccttcgtggagattaaaaccacaaagtttacgaagaaggttcagatcgatccgtacctggaagattctctatgtcatatctgttccagccagccaggaccatttttctgccgcgaccaggtgtgttttaagtacttctgtaggagctgttggcattggaggcactccatggaggggctacgccaccactctcctctgatgagaaatcagaaaaaccgcgattcctcgtag

SEQ ID NO: 219298 - DNA, 1686 bp, Artificial Sequence
  derived and/or modified sequence
atggcctttcctctagaagaggaagcaggacgtattaaggactgctgggacaatcaggaggctccagcattgagcacatgttcgaacgcgaacatatttaggaggattaacgcaattctggacaattcattggatttctcgcgcgtgtgtactactcctataaaccggggtatccatgaccacttgccagattttcaggattccgaagagacagttaccagtcgcatgcttttccccaccagcgcacaagagtctagcaggggactcccagacgcaaacgatctgtgtctgggcctgcagagcctgtcacttactgggtgggatcgtccctggtcaacgcaggactcagactcaagcgctcagtcttccactcatagcgtcctgtccatgctgcataaccccttaggaaatgtcctggggaaaccccctttaagctttctgcctcttgaccccctaggatcagacctcgttgataaattccctgccccaagcgtccggggatccagattggacacaagacccatcctcgatagtagaagctcttccccctcagactcagatacgtccggattttcatctgggagtgaccatttgtcagacctgatatcttcactgcgcatctctccaccccttccattcctctctttgtcaggagggggaccaagagaccctcttaagatgggtgtgggcagcagaatggatcaggagcaggctgccctggcagctgtaaccccctccccaacatccgcaagcaagagatggcccggagcttcggtgtggcctagttgggacttactggaagctcccaaggacccattctcaatcgaaagagaagctcgcttgcataggcaggccgctgcagtaaacgaagctacctgcacctggtccggacaattgccacccagaaattataagaatcctatctatagctgcaaagtgttcctgggaggcgtgccctgggacattacggaagcgggattggttaacacttttagagtctttggatctctgagcgtggagtggccaggcaaggacggaaagcatccccgatgtccaccaaaaggctacgtgtacctcgtcttcgagctcgaaaaaagtgtgagatcgctgcttcaggcctgctcccacgatcccttgagccccgacggtctgtccgagtattacttcaaaatgagcagtaggcgcatgcgatgtaaggaagtgcaagtaatcccctgggttctggctgatagcaattttgtccgctctccctctcagcgcctggatccatcccgcacagtgttcgtcggggcactgcacgggatgttgaatgctgaagccctagcagctattctgaacgatttatttggtggtgtggtttatgccggtatcgacaccgacaagcataaatatcctatcgggtcaggacgagttaccttcaacaatcagagaagctatctgaaggctgtatccgccgcatttgttgaaattaagactaccaagttcaccaaaaaagtgcagattgacccatacttagaggattcgctgtgtcacatttgcagttcccagccgggaccctttttttgtagagaccaggtgtgttttaaatacttctgccggtcttgttggcactggcgacattccatggagggattacggcaccattctcccctgatgagaaaccagaaaaaccgcgatagctcctag

SEQ ID NO: 219299 - protein, 384 aa, Artificial Sequence
  derived and/or modified sequence
MTWTSGQLQREKQARPGSGAVLAFPDDKDLRVYGPAESQSAVFGDVCPLLTSLLDGYNVCVMAYGQTGSGKSYTMLGRHSDDGPVLPLDPQSDLGIIPRVAEELFRLILENTSRSPKVEVSIVEVYNNDIFDLLAKDSIAAVSGVKREVVTAKDGRTEVALLASEAVGSASKLMELVHGGLQLRAKHPTLVHADSSRSHLIITVTLTTASCSDSTADQACSATLPREQTEAGRAGRSRRASQGALAPQLVPGNPAGHAEQVQARLQLVDSAGSECVGVSGVTGLALREMACISRSLAALAGVLGALLEHRGHAPYRNSRLTHLLQDCLGGDAKLLVILCISPSQRHLAQTLQGLGFGIRARQVQRGPARKKPPSSQTEGKRRPD

SEQ ID NO: 219300 - DNA, 1155 bp, Artificial Sequence
  derived and/or modified sequence
atgacatggacgagtggccaattgcagagggaaaaacaggctcgcccaggcagcggcgctgtcttggcatttccagacgacaaggatctgagggtttacggtccggccgagtcacagtcagcagttttcggggacgtttgtcccctcctgacatcacttttggacgggtacaatgtgtgcgtgatggcttatggccagaccgggtctgggaagtcctataccatgctgggtaggcattcagatgatggcccggtcctccccttagatccccagtctgatctaggcatcattccccgggttgccgaagaattgttccgtctgattttggaaaatacaagccggagccctaaggtggaggtgtcaattgtcgaagtttacaataatgatattttcgacctgcttgccaaggatagcattgctgccgtgagtggcgttaaacgagaagtagtcacagccaaagatggtaggaccgaggtagctcttctagcttccgaggctgtcgggtcagcaagcaaattgatggagttagtccatggagggctccagctgcgcgccaagcaccccacacttgtgcacgctgactccagcagaagccacctgattatcactgtcacgctgacaaccgcctcttgttctgactcaacagccgatcaggcatgctccgctacgctgccccgagaacaaactgaagcgggcagagcagggcgcagtcgcagagcaagtcagggcgcgctggctccccagctagtccctggaaacccagccggccacgctgaacaggtacaggcccgtctgcagctggtcgacagtgcgggaagtgaatgtgtcggcgtgtccggcgtaactggcctcgctctccgagagatggcttgcatatccaggagtctcgcagctctcgcgggagtcctcggagcactcctcgaacaccggggccacgccccgtacaggaattcccggctcacacatctgttgcaggattgtctcggaggagacgcaaagctgctcgtgattctatgtatctctccatcgcaaaggcacctggcccagactctgcaaggcctcgggtttggcattcgcgcccgacaggtgcagcgcggaccagccaggaaaaagccaccaagctctcagactgaagggaagagaaggcccgactag

SEQ ID NO: 219301 - DNA, 1155 bp, Artificial Sequence
  derived and/or modified sequence
atgacatggacctccggccagctccagagggagaaacaagcgaggcctggctctggagcagtcttggccttccccgacgataaagacttgcgagtgtatggtccggctgagtcccagtcagcagtgttcggcgacgtatgtcccctgctgactagcctgttggatgggtacaacgtttgcgtcatggcgtacggtcagacaggtagtggcaagtcatatactatgttgggaaggcatagcgatgatgggccggtgctgccattggacccgcagtcggacttaggtatcattccacgagtggcagaagagctgttcaggctgatattggagaatacttccagatctccaaaggtcgaggttagcatcgtggaagtttataataacgacatcttcgatttactagcaaaagattccatcgctgctgtgtccggggttaagcgagaagtcgtcaccgccaaggacggcagaaccgaagtcgccctgctggcctctgaggcagtaggcagcgcgtccaagctaatggagcttgttcacggaggcctccagctccgggctaaacatcccactttagtccacgcggactccagccggtcccacttgatcatcactgtgacgctgaccaccgcaagttgctcagactcaactgccgatcaggcctgtagcgccaccttgccccgcgaacagacagaagccgggagagctggccggagtaggagagcaagtcagggagccctggccccacagctagtaccgggaaaccctgccggccatgcggagcaagtccaggcccggctgcagctggtggactccgctggatcagagtgcgtgggggtatcaggcgtcaccggtctggccctgcgcgagatggcgtgtatcagtcgaagtctcgccgctctcgcgggcgtcctcggtgccttgttggaacatcgcggccacgctccttatagaaacagccgccttacgcatttgctgcaggattgcctggggggcgacgcgaaactgctggtgatcctgtgcattagccctagccagcggcacctggcccagacgcttcagggtctaggcttcggtattagggcccggcaggtgcaaagaggcccagcacggaagaaacccccttcctctcagacagaaggcaagcgtcgccctgactag

SEQ ID NO: 219302 - DNA, 1510 bp, Artificial Sequence
  derived and/or modified sequence
ttgtttacaaaaacaggcggcaggctggggttggtggggcttgtgtttaattaacgcagcacacaaagtcttatgacgtcgttttactcttttctctcaggaaacaattctggtgaaatgtgatcgtcctggccaccctctgattgataagacatatcattttgaaagatatactggccttcccagctgacatggacctcaggtcagcttcagcgtgagaagcaggccaggcctgggtctggagccgtcctggccttcccagatgacatggacctcaggtcagcttcagcgtgagaagcaggccaggcctgggtctggagccgtcctggccttcccagatgacaaggacctcagggtttatggtccagcagagtctcagagcgcggtctttggagatgtgtgccccctactcacttctctcttggatgggtacaatgtttgtgttatggcgtatggacagacgggcagcggaaagagctataccatgctgggacgccattcggacgacggccctgttctgccgcttgacccacagagtgacttaggaattatccctagagtggctgaggagctcttcaggctcattttggaaaatacctcaagaagcccaaaggttgaagtctccatagtggaagtttacaataatgacatttttgaccttctggccaaagacagcattgcagcagtgtcgggggtcaagcgtgaggtggtgacagccaaggatggacggacagaggttgcgctgctggcctctgaggctgtcggcagcgcctcgaaactgatggagctcgttcatggaggtctgcagctcagggcgaagcaccccaccctggtgcacgcggattcctccaggtctcacctgataattacggtgactctaaccacagcctcctgctctgacagcactgcagaccaagcctgcagtgccaccctccccagggagcaaacagaggcaggaagggcaggaaggagccgcagagcttctcaaggggccttggctccacagctggttcctgggaaccccgcagggcatgcggagcaggtgcaggctcgactacagctcgtggactcggccggcagcgagtgcgttggtgtgtctggagtgaccgggttggccctgagggagatggcgtgcatcagccgcagccttgcggccctggcaggcgtcctgggggctttgttggagcaccgtggccatgccccgtaccggaacagcaggctcacccacctccttcaggactgcctcggaggcgatgcgaagttactggtgattctctgcatttctcccagccagaggcacctggcacagacgttgcagggcctgggtttcgggatccgagctcggcaagtccagcgaggccctgcccgaaagaagccgcccagctcccaaacggaggggaagaggaggccggattgaatgcattaacaagtttttctcctaaaactgtgtttcttgtccttgctttataatgcatatgtgcttagaaataaacaggtttcacgtggactc

SEQ ID NO: 219303 - DNA, 1613 bp, Artificial Sequence
  derived and/or modified sequence
gggtctttcgaagtggagacaggtgctgcagatctcacggccgcgtctcaggagctggtgcccggtgcacgttcagtgggggatgctccgcagtgcaggctcgcgcccgggttgacacgcagacctcttgatcattgcaggagctgaaacgaaatatcagagttcactgtcggattcgtcctttgttgccttttgatagtgaatccgacgatccagttttgcagagcaggaaacaattctggtgaaatgtgatcgtcctggccaccctctgattgataagacatatcattttgaaagatatactggccttcccagctgacatggacctcaggtcagcttcagcgtgagaagcaggccaggcctgggtctggagccgtcctggccttcccagatgacatggacctcaggtcagcttcagcgtgagaagcaggccaggcctgggtctggagccgtcctggccttcccagatgacaaggacctcagggtttatggtccagcagagtctcagagcgcggtctttggagatgtgtgccccctactcacttctctcttggatgggtacaatgtttgtgttatggcgtatggacagacgggcagcggaaagagctataccatgctgggacgccattcggacgacggccctgttctgccgcttgacccacagagtgacttaggaattatccctagagtggctgaggagctcttcaggctcattttggaaaatacctcaagaagcccaaaggttgaagtctccatagtggaagtttacaataatgacatttttgaccttctggccaaagacagcattgcagcagtgtcgggggtcaagcgtgaggtggtgacagccaaggatggacggacagaggttgcgctgctggcctctgaggctgtcggcagcgcctcgaaactgatggagctcgttcatggaggtctgcagctcagggcgaagcaccccaccctggtgcacgcggattcctccaggtctcacctgataattacggtgactctaaccacagcctcctgctctgacagcactgcagaccaagcctgcagtgccaccctccccagggagcaaacagaggcaggaagggcaggaaggagccgcagagcttctcaaggggccttggctccacagctggttcctgggaaccccgcagggcatgcggagcaggtgcaggctcgactacagctcgtggactcggccggcagcgagtgcgttggtgtgtctggagtgaccgggttggccctgagggagatggcgtgcatcagccgcagccttgcggccctggcaggcgtcctgggggctttgttggagcaccgtggccatgccccgtaccggaacagcaggctcacccacctccttcaggactgcctcggaggcgatgcgaagttactggtgattctctgcatttctcccagccagaggcacctggcacagacgttgcagggcctgggtttcgggatccgagctcggcaagtccagcgaggccctgcccgaaagaagccgcccagctcccaaacggaggggaagaggaggccggattgaatgcattaacaagtttttctcctaaaactgtgtttcttgtccttgctttataatgcatatgtgctta

SEQ ID NO: 219304 - DNA, 1155 bp, Artificial Sequence
  derived and/or modified sequence
atgacctggaccagcggccagctgcagcgggagaagcaggcccggcccggcagcggggctgtgctggccttcccagatgacaaggacctgcgggtgtatggccctgctgagagccagagcgctgtgtttggagatgtgtgccccctgctgaccagcctgctggatggctacaacgtgtgtgtgatggcctacggccagacaggcagcggcaagagctacaccatgctgggccgccacagtgatgatggccctgtgctgcccctggacccccagagcgacctgggcatcatcccccgggtggccgaggagctgttccgcctcatcctggagaacaccagccgcagccccaaggtggaggtgtccatcgtggaggtgtacaacaatgacatctttgacctgctggccaaggacagcattgctgctgtgtctggagtgaagcgggaggtggtgacagccaaggatggccgcacagaggtggccctgctggccagcgaggccgtgggcagcgccagcaagctgatggagctggtgcacggcggcctgcagctgcgggccaagcaccccaccctggtgcatgctgacagcagccgcagccacctgatcatcaccgtgaccctgaccacagccagctgcagcgacagcacagctgaccaggcctgcagcgccaccctgccccgggagcagacagaagctggccgggccggccgcagccggcgggccagccagggcgccctggccccccagctggtgcccggcaacccagctggccacgccgagcaggtgcaggcccggctgcagctggtggacagcgctggctctgaatgtgtgggcgtgtctggagtgacaggcctggccctgcgggagatggcctgcatcagccgcagcctggccgccctggccggcgtgctgggcgccctgctggagcaccggggccacgccccctacagaaacagccggctgacccacctgctgcaggactgcctgggcggagatgccaagctgctggtgatcctgtgcatcagccccagccagaggcacctggcccagaccctgcagggcctgggcttcggcatccgggcccggcaggtgcagaggggccctgccaggaagaagccacccagcagccagacagagggcaagagaagaccagactag

SEQ ID NO: 219305 - DNA, 1155 bp, Artificial Sequence
  derived and/or modified sequence
atgacctggaccagcggccagctgcagcgggagaagcaggcccggccggggtccggggccgtactggctttccctgatgataaggatctgagagtgtacggacctgccgagagtcagtcagctgtgttcggcgatgtgtgcccactcttgaccagtttgctggacggctacaacgtctgtgtgatggcgtatggccagaccgggtcaggaaagtcttataccatgctgggtagacattcagacgacggcccagtgcttcctctcgacccccagagcgatctgggaatcattcctagagtggcagaggaattattcagactgattttagaaaacacctcacgtagtccaaaagttgaagtgtccattgtcgaggtttacaacaacgacatctttgatctgctggccaaagacagcatcgcggccgtgtccggggtcaagagagaagtggtgaccgccaaggacggtcggaccgaggtggctttattggcgagcgaagcagttggctctgcttctaaactgatggagctggtgcatggagggctgcagcttcgcgccaagcaccccacactcgtccatgcagattcttccaggagccacctcatcattactgttacacttacaactgcaagctgcagcgacagcactgctgaccaggcatgctccgcaactctccctcgtgagcagaccgaggctggacgtgctgggcgctctcgccgcgcaagccaaggagccttagccccacagctggttcccggtaatcccgctggccacgcagaacaggtccaggcccggctgcagttagtcgattccgctggctctgaatgcgtgggagtgtctggtgttactggcctggccttacgggaaatggcatgcatctctagatctctggcagcgctcgccggcgtgctgggagccctgctcgaacaccgtggtcacgccccatatcgaaactccaggcttacacacttactccaagactgcctgggcggtgatgcaaaactgctggttatcctttgtatctccccttcgcaaagacacctcgcgcagacgctccagggcctcgggtttggcatccgtgccaggcaagtccaacgcggccccgcccgcaaaaagccaccgtcctcccagacagaggggaaaaggaggcccgactag

SEQ ID NO: 219306 - DNA, 1155 bp, Artificial Sequence
  derived and/or modified sequence
atgacctggaccagcggccagctgcagcgggagaagcaggcccggcccggatccggagccgtcctcgcttttcctgatgacaaagatcttagggtatacggtccagctgagagccaatcagccgtattcggtgatgtgtgtcctctgctcacctcactgcttgatggatataacgtttgcgtgatggcttatggacagactgggtctggaaagtcctatactatgctgggcagacacagcgacgatggccctgtgctgccactggacccacaatcagatctgggaatcatcccccgggttgcagaggagctcttcagactgatcttggaaaacaccagccggagcccaaaggtagaggtgtccatcgttgaagtgtacaacaacgacatcttcgacctactggcaaaggactcaatcgctgccgttagtggagtgaaaagagaagttgtgactgcgaaggatgggagaactgaggtcgcccttctggcctctgaagccgtcggcagcgcctccaagctgatggagttggtgcatggtggattgcaattgcgcgctaaacaccctactcttgtacatgcagatagcagtcgaagccatctcatcattactgtcaccctgaccactgcctcctgttctgattctacagcggatcaagcctgtagcgccacattgccacgggagcagactgaggcgggccgcgccgggagaagtcggcgggcctcccagggtgctttagcaccacagctggtacctgggaaccctgccggacatgcagaacaggtgcaggctcggctgcagctggtggactcagccggcagtgaatgcgtgggcgtgagtggagtaaccgggctagcacttagagaaatggcttgtatatcccggtcgctggcagcgctggccggggtcttgggcgctctgcttgagcatcggggacacgcaccttatcgaaactctaggctgacgcatctcctgcaggactgtctagggggtgatgcaaagctcctcgtgattttgtgtatctctccgtcacagcggcacctggcacagacactgcagggcctggggtttggcataagagcccgccaagtccaacgcggccctgcccgaaaaaagccgccttcctcccagactgaggggaagcggcgaccagactag

SEQ ID NO: 219307 - DNA, 1155 bp, Artificial Sequence
  derived and/or modified sequence
atgacatggacctctgggcagctgcagagggagaaacaggctcggccagggtcgggcgcagtcctcgcatttccagacgataaggatttgcgggtttacgggccagccgaatcccagagtgctgtgtttggggatgtctgccctcttttaacaagtctgttggacggctacaatgtgtgcgtaatggcctatgggcaaacaggctcaggcaaatcctataccatgctcgggaggcactccgacgatggaccggttcttcctctcgacccccagtccgacctgggcatcatccccagagtcgctgaagagctgtttagactgatactggagaacaccagcagatctcctaaggtcgaggtttccatcgtcgaggtgtacaataacgacatcttcgatttgttggccaaggatagcattgctgcggtgtcaggagtgaagcgcgaggtggtgaccgctaaagatggcaggaccgaagtggcgctgctagcctccgaggccgtgggcagcgcatcgaagcttatggaactggtacatggaggccttcagctcagggcgaaacaccccacgctagtccatgccgattctagccgatctcacctgattattaccgttaccctgacgaccgcctcctgtagtgactcaacagctgaccaggcctgctccgcaaccctgccaagagagcagaccgaagccggaagggcgggtagaagccgcagagctagtcagggcgctcttgcaccacagctggtacctggcaaccccgctggacacgctgaacaggtccaagccaggctgcagctggtagattccgccggaagcgaatgtgtgggcgtatccggtgttactgggctggccctccgcgagatggcatgcatcagcagaagtctggcggcattggccggagttctgggagctctcctggagcatagggggcacgcaccctaccggaatagtcggctcacccatctgctgcaggactgcctgggcggagatgcaaagttactggtgatcctgtgcattagccccagccagcgacatctggctcagaccttacaagggttgggatttggcattagagcacgtcaagttcaacgaggccctgcccgtaagaaaccaccttcctcacagacagaaggtaagagaaggccggattag

SEQ ID NO: 219308 - DNA, 1155 bp, Artificial Sequence
  derived and/or modified sequence
atgacctggacaagcggtcagctgcagagagaaaaacaggctagaccaggttctggggcagtcctggcttttcccgacgacaaagacttgcgcgtttacggacctgctgagtcacaatcagcagtttttggagatgtttgtcctttgctgacatctctgctggacgggtataacgtctgtgtgatggcatatggtcagactggaagtgggaagagttataccatgttaggcagacactcagatgacgggcctgtgttgcccctcgatcctcagtctgacctcggaattattccacgggtggctgaggaactgttccgactcattcttgagaatacttctcgaagtcctaaagtggaagtctccatcgttgaggtgtacaataatgatattttcgatctactggcaaaggactccatcgctgcagtctcaggcgttaaaagagaagtggtcactgctaaagacgggaggacagaggtcgccctcctggcctctgaggccgtggggtctgcatccaagctcatggaactcgtccacgggggtttgcagctacgagccaagcaccccaccctggtccatgccgatagttccagaagtcacctgatcataacggttacgttgaccacagcctcttgttccgacagcaccgccgaccaggcatgtagcgcgacattgcctcgcgaacagactgaggctgggcgagcaggccgttccagaagagcgtctcagggagctctggcacctcagctggtacctggaaatcccgcaggacacgcagagcaggttcaagctaggcttcagttggttgattcggccggaagcgagtgcgtgggcgtgtcgggagtgaccgggctggccctccgcgagatggcttgcataagccgatctctggctgctttagcgggtgtccttggggctttactggaacaccggggtcatgctccttacagaaactcccgtttaacacatttacttcaggattgcttgggcggagatgcgaagctcctggtgatcttgtgtataagccccagccaacggcacctcgcgcaaacactccaggggctcggattcggcatccgggctcgccaggtacagagggggcctgctcgtaagaagcccccttcgtcccagacggagggtaaaagaaggccagactag

SEQ ID NO: 219309 - DNA, 1155 bp, Artificial Sequence
  derived and/or modified sequence
atgacctggaccagcggccagctgcagagagagaagcaggccagacccggcagcggcgccgtgctggccttccccgacgacaaggacctgagagtgtacggccccgccgagagccagagcgccgtgttcggcgacgtgtgccccctgctgaccagcctgctggacggctacaacgtgtgcgtgatggcctacggccagaccggcagcggcaagagctacaccatgctgggcagacacagcgacgacggccccgtgctgcccctggacccccagagcgacctgggcatcatccccagagtggccgaggagctgttcagactgatcctggagaacaccagcagaagccccaaggtggaggtgagcatcgtggaggtgtacaacaacgacatcttcgacctgctggccaaggacagcatcgccgccgtgagcggcgtgaagagagaggtggtgaccgccaaggacggcagaaccgaggtggccctgctggccagcgaggccgtgggcagcgccagcaagctgatggagctggtgcacggcggcctgcagctgagagccaagcaccccaccctggtgcacgccgacagcagcagaagccacctgatcatcaccgtgaccctgaccaccgccagctgcagcgacagcaccgccgaccaggcctgcagcgccaccctgcccagagagcagaccgaggccggcagagccggcagaagcagaagagccagccagggcgccctggccccccagctggtgcccggcaaccccgccggccacgccgagcaggtgcaggccagactgcagctggtggacagcgccggcagcgagtgcgtgggcgtgagcggcgtgaccggcctggccctgagagagatggcctgcatcagcagaagcctggccgccctggccggcgtgctgggcgccctgctggagcacagaggccacgccccctacagaaacagcagactgacccacctgctgcaggactgcctgggcggcgacgccaagctgctggtgatcctgtgcatcagccccagccagagacacctggcccagaccctgcagggcctgggcttcggcatcagagccagacaggtgcagagaggccccgccagaaagaagccccccagcagccagaccgagggcaagagaagacccgactag

SEQ ID NO: 219310 - protein, 564 aa, Artificial Sequence
  derived and/or modified sequence
MEATGTWALLLALALLLLLTLALSGTRARGHLPPGPTPLPLLGNLLQLRPGALYSGLMRLSKKYGPVFTIYLGPWRPVVVLVGQEAVREALGGQAEEFSGRGTVAMLEGTFDGHGVFFSNGERWRQLRKFTMLALRDLGMGKREGEELIQAEARCLVETFQGTEGRPFDPSLLLAQATSNVVCSLLFGLRFSYEDKEFQAVVRAAGGTLLGVSSQGGQTYEMFSWFLRPLPGPHKQLLHHVSTLAAFTVRQVQQHQGNLDASGPARDLVDAFLLKMAQEEQNPGTEFTNKNMLMTVIYLLFAGTMTVSTTVGYTLLLLMKYPHVQKWVREELNRELGAGQAPSLGDRTRLPYTDAVLHEAQRLLALVPMGIPRTLMRTTRFRGYTLPQGTEVFPLLGSILHDPNIFKHPEEFNPDRFLDADGRFRKHEAFLPFSLGKRVCLGEGLAKAELFLFFTTILQAFSLESPCPPDTLSLKPTVSGLFNIPPASTVGMDRVNVSRVYTAGSHIYTPAVVFRSLSHGPHAHLTHAAKMHNRTPIHNYKGHKATAGLAFHRHKYSPSAITST

SEQ ID NO: 219311 - protein, 504 aa, Artificial Sequence
  derived and/or modified sequence
MEATGTWALLLALALLLLLTLALSGTRARGHLPPGPTPLPLLGNLLQLRPGALYSGLMRLSKKYGPVFTIYLGPWRPVVVLVGQEAVREALGGQAEEFSGRGTVAMLEGTFDGHGVFFSNGERWRQLRKFTMLALRDLGMGKREGEELIQAEARCLVETFQGTEGRPFDPSLLLAQATSNVVCSLLFGLRFSYEDKEFQAVVRAAGGTLLGVSSQGGQTYEMFSWFLRPLPGPHKQLLHHVSTLAAFTVRQVQQHQGNLDASGPARDLVDAFLLKMAQEEQNPGTEFTNKNMLMTVIYLLFAGTMTVSTTVGYTLLLLMKYPHVQKWVREELNRELGAGQAPSLGDRTRLPYTDAVLHEAQRLLALVPMGIPRTLMRTTRFRGYTLPQGTEVFPLLGSILHDPNIFKHPEEFNPDRFLDADGRFRKHEAFLPFSLGKRVCLGEGLAKAELFLFFTTILQAFSLESPCPPDTLSLKPTVSGLFNIPPAFQLQVRPTDLHSTTQTR

SEQ ID NO: 219312 - protein, 229 aa, Artificial Sequence
  derived and/or modified sequence
MAMEEQNPGTEFTNKNMLMTVIYLLFAGTMTVSTTVGYTLLLLMKYPHVQKWVREELNRELGAGQAPSLGDRTRLPYTDAVLHEAQRLLALVPMGIPRTLMRTTRFRGYTLPQGTEVFPLLGSILHDPNIFKHPEEFNPDRFLDADGRFRKHEAFLPFSLGKRVCLGEGLAKAELFLFFTTILQAFSLESPCPPDTLSLKPTVSGLFNIPPAFQLQVRPTDLHSTTQTR

SEQ ID NO: 219313 - DNA, 1695 bp, Artificial Sequence
  derived and/or modified sequence
atggaggctaccggcacatgggccttgctgctggctctcgccctattgctcctcctgacattagccctctcaggtacccgggcccgcggccatctccctccgggacctacacccctgccactgctgggaaatctgttgcaactaagaccaggcgccttatatagcgggttgatgcggttgagtaagaagtatgggcctgtttttaccatctacctggggccctggaggccggtggttgtcctggtcggacaggaagcagtgcgtgaagcactggggggccaggctgaggagttttccggaagaggcactgtggccatgctcgagggtacttttgatgggcatggggttttcttctctaacggtgaaagatggcgccagctccgcaagttcacaatgttagctctccgtgacctgggaatgggcaaaagagagggcgaggagctgatccaggccgaagcccgatgcctggttgagacattccaaggcacggaagggaggccctttgacccctccctactgctggcgcaggctaccagcaatgtggtatgcagcctgctattcggcctaagattttcttacgaggacaaagagttccaagcggttgtgagagccgcaggaggtaccctgctgggtgtgagcagccagggaggccagacttacgaaatgtttagttggttcctaaggcccttgcctggtccacacaagcagctactacaccacgtcagtactctggctgcctttacagtgaggcaggttcagcaacatcagggcaacctcgacgccagcgggccagcgagggatctggtggacgcattcctgctgaagatggctcaggaggaacagaaccccggaactgaatttacaaacaaaaatatgctgatgacagtgatctacctccttttcgccggcaccatgaccgtcagcaccacagtaggctacacactcctgcttttgatgaaatacccccatgtacagaagtgggtgcgcgaagaattgaatagggagctgggggcagggcaagcacccagtctcggcgaccggacacggttaccctacacggatgcagtcctgcatgaggcccagaggcttctggctcttgtaccaatggggatcccccgcactctgatgcgaaccacaaggtttcgaggctatacgttgccgcagggcactgaggttttccccctcctgggaagtattctgcatgaccctaacatcttcaagcacccagaggaatttaatccggaccgttttctcgacgcggacgggcgcttccggaagcacgaggctttcctacctttctctctgggcaagcgggtctgcctgggcgaggggttggccaaagccgagttatttcttttcttcaccaccattctgcaagcattctcacttgagagcccttgtccacctgataccctgtcactcaaacctaccgttagtgggctgttcaacatcccccccgccagcactgtgggcatggaccgggtgaatgtgagcagggtatatacagcaggcagccacatttacaccccagccgtagtgttccggtctctgagccatggccctcacgcgcacctcactcatgccgcaaagatgcacaatcgaacccctatccataactacaagggtcacaaggctaccgccggcttggcgtttcatagacacaaatacagcccgagcgccattacttctacttag

SEQ ID NO: 219314 - DNA, 1515 bp, Artificial Sequence
  derived and/or modified sequence
atggaagccactggaacgtgggccttactcctagcactcgccctactcctcttgctcacgttagccctcagcggcacccgcgcacgcgggcacttgccacctggccctaccccccttccattactcgggaacctcttacaactgcggccaggagctctgtatagtgggctcatgcgcctgtctaagaagtacgggcccgttttcacgatatacctcggcccttggcgtccagtggtggttcttgtaggccaggaagccgttcgggaggccttaggtggccaggctgaagaattttccggacgaggcacagtggcgatgctcgagggtaccttcgatggccacggggttttctttagcaacggcgaaagatggcgtcaactgaggaaattcactatgttggctctgcgggacctgggcatgggaaagcgcgagggagaggaattgattcaagccgaggcacggtgcttggtcgaaactttccagggtaccgaaggtcgcccttttgatccatcacttctgctggcacaggccacaagcaatgtggtgtgctcccttcttttcggtctgcgcttctcctacgaagacaaggaatttcaagcggtcgtgcgggcagcaggtggaactttactcggggtctcctctcaaggcggacagacatacgaaatgttctcctggtttttgcggcctctgcctggaccccacaagcagcttctccaccatgtgtctaccctggctgcctttacagtgagacaggttcagcagcaccaaggaaatttagacgccagtggaccagcgcgggatctagtagatgcttttctgctgaaaatggcccaagaagaacaaaatcctgggaccgaatttacaaataaaaatatgctaatgaccgtaatttatctgctattcgccggaacgatgacagtaagcacaacggtggggtatacactcctcctcttaatgaaatacccccatgtgcaaaagtgggtgcgcgaggaattaaacagagagctaggtgccgggcaggcccccagcttgggggacagaactcgcctcccatacaccgatgcagttttgcatgaagcccaacggctgttggcccttgtgcctatggggataccacgcacccttatgaggactacacgttttagaggatacacccttccgcagggaacagaagtcttcccgctgttggggtcaatcctgcacgacccaaatatcttcaagcatcctgaggaatttaacccagatagattcctcgacgctgatggtcgctttcgcaaacacgaagcatttttgcctttttctttgggaaagcgtgtgtgcctgggcgagggccttgccaaagccgaactgttcttattttttacaaccatactgcaggcattctcactggaaagcccctgtcctcccgacaccctgtctttgaagcccactgtcagcgggttatttaatatccctccagctttccagctgcaagtcagaccaacggatctgcatagtaccacacaaacaagatag

SEQ ID NO: 219315 - DNA, 690 bp, Artificial Sequence
  derived and/or modified sequence
atggccatggaggaacagaaccccggcactgaatttaccaataagaatatgctcatgacagttatctacctgctgtttgccgggacaatgacagtctccactacggtcggctacaccctcctgctacttatgaagtacccacacgtccagaaatgggtaagggaagaacttaatagagaactgggagccggccaagcaccatctttgggggaccgaacacgattgccttatacagatgctgtgcttcatgaggctcaaaggcttttagcattggtcccaatgggcatcccaagaaccctcatgcgcactacacggtttaggggctacacactgccgcagggaaccgaagtatttccactgcttggtagcatcctccatgacccaaacatcttcaagcatccagaggaatttaatcctgataggtttcttgatgcggatggaagatttagaaagcacgaagcttttcttccattctcacttggcaagcgagtttgccttggagaagggttggccaaggctgaactgttcctattcttcactactatcctgcaggcgttttctcttgagtccccttgccctcccgatacactctcactgaaacccactgtctcagggttattcaacataccaccagccttccagctacaggtaagacctaccgacttgcactctaccacccaaacccgctag

SEQ ID NO: 219316 - DNA, 1695 bp, Artificial Sequence
  derived and/or modified sequence
atggaggccaccggcacctgggccctgctgctggccctggccctgctgctgctgctgaccctggccctgagcggcacccgggcccggggccacctgcccccaggccccacccccctgcccctgctgggcaacctgctgcagctgcggcctggggccctgtacagcggcctgatgaggctgagcaagaagtatggccctgtgttcaccatctacctgggcccctggaggcctgtggtggtgctggtgggccaggaggccgtgcgggaggccctgggcggccaggccgaggagttcagcggccggggcaccgtggccatgctggagggcacctttgatggccacggcgtcttcttcagcaatggagagcgctggaggcagctgaggaagttcaccatgctggccctgcgggacctgggcatgggcaagcgggagggggaggagctgatccaggccgaggcccgctgcctggtggagaccttccagggcacagagggccggccctttgaccccagcctgctgctggcccaggccaccagcaatgtggtgtgcagcctgctgtttggcctgcgcttctcctatgaggacaaggagttccaggccgtggtgcgggctgctgggggcaccctgctgggcgtgagcagccagggcggccagacctatgagatgttctcctggttcctgcggcccctgcccggcccccacaagcagctgctgcaccacgtgtccaccctggccgccttcaccgtgcggcaggtgcagcagcaccagggcaacctggatgccagcggccctgcccgggacctggtggatgccttcctgctgaagatggcccaggaggagcagaaccctggaacagagttcaccaacaagaacatgctgatgaccgtcatctacctgctgtttgctggcaccatgacagtgtccaccaccgtgggctacaccctgctgctgctgatgaagtacccccacgtgcagaagtgggtgcgggaggagctgaaccgggagctgggcgccggccaggcccccagcctgggggacaggacccggctgccctacacagatgctgtgctgcacgaggcccagaggctgctggccctggtgcccatgggcatccccaggaccctgatgaggaccacccgcttccggggctacaccctgccccagggcacagaggtgttccccctgctgggcagcatcctgcatgaccccaacatcttcaagcaccctgaggagttcaacccagaccgcttcctggatgctgatggccgcttcaggaagcatgaggccttcctgcccttcagcctgggcaagagggtgtgcctgggggagggcctggccaaggccgagctgttcctgttcttcaccaccatcctgcaggccttcagcctggagagcccctgccccccagacaccctgagcctgaagcccaccgtgtctggcctcttcaacatccccccagccagcacagtgggcatggacagagtgaatgtgtcccgggtgtacacagctggcagccacatctacaccccagctgtggtgttccgcagcctgagccacggcccccacgcccacctgacccacgccgccaagatgcacaacagaacacccatccacaactacaagggccacaaggccacagctggcctggccttccaccgccacaagtacagccccagcgccatcaccagcacctag

SEQ ID NO: 219317 - DNA, 1515 bp, Artificial Sequence
  derived and/or modified sequence
atggaggccaccggcacctgggccctgctgctggccctggccctgctgctgctgctgaccctggccctgagcggcacccgggcccggggccacctgcccccaggccccacccccctgcccctgctgggcaacctgctgcagctgcggcctggggccctgtacagcggcctgatgaggctgagcaagaagtatggccctgtgttcaccatctacctgggcccctggaggcctgtggtggtgctggtgggccaggaggccgtgcgggaggccctgggcggccaggccgaggagttcagcggccggggcaccgtggccatgctggagggcacctttgatggccacggcgtcttcttcagcaatggagagcgctggaggcagctgaggaagttcaccatgctggccctgcgggacctgggcatgggcaagcgggagggggaggagctgatccaggccgaggcccgctgcctggtggagaccttccagggcacagagggccggccctttgaccccagcctgctgctggcccaggccaccagcaatgtggtgtgcagcctgctgtttggcctgcgcttctcctatgaggacaaggagttccaggccgtggtgcgggctgctgggggcaccctgctgggcgtgagcagccagggcggccagacctatgagatgttctcctggttcctgcggcccctgcccggcccccacaagcagctgctgcaccacgtgtccaccctggccgccttcaccgtgcggcaggtgcagcagcaccagggcaacctggatgccagcggccctgcccgggacctggtggatgccttcctgctgaagatggcccaggaggagcagaaccctggaacagagttcaccaacaagaacatgctgatgaccgtcatctacctgctgtttgctggcaccatgacagtgtccaccaccgtgggctacaccctgctgctgctgatgaagtacccccacgtgcagaagtgggtgcgggaggagctgaaccgggagctgggcgccggccaggcccccagcctgggggacaggacccggctgccctacacagatgctgtgctgcacgaggcccagaggctgctggccctggtgcccatgggcatccccaggaccctgatgaggaccacccgcttccggggctacaccctgccccagggcacagaggtgttccccctgctgggcagcatcctgcatgaccccaacatcttcaagcaccctgaggagttcaacccagaccgcttcctggatgctgatggccgcttcaggaagcatgaggccttcctgcccttcagcctgggcaagagggtgtgcctgggggagggcctggccaaggccgagctgttcctgttcttcaccaccatcctgcaggccttcagcctggagagcccctgccccccagacaccctgagcctgaagcccaccgtgtctggcctcttcaacatccccccagccttccagctgcaggtgcggcccacagacctgcacagcaccacccagaccaggtag

SEQ ID NO: 219318 - DNA, 690 bp, Artificial Sequence
  derived and/or modified sequence
atggccatggaggagcagaaccctggaacagagttcaccaacaagaacatgctgatgaccgtcatctacctgctgtttgctggcaccatgacagtgtccaccaccgtgggctacaccctgctgctgctgatgaagtacccccacgtgcagaagtgggtgcgggaggagctgaaccgggagctgggcgccggccaggcccccagcctgggggacaggacccggctgccctacacagatgctgtgctgcacgaggcccagaggctgctggccctggtgcccatgggcatccccaggaccctgatgaggaccacccgcttccggggctacaccctgccccagggcacagaggtgttccccctgctgggcagcatcctgcatgaccccaacatcttcaagcaccctgaggagttcaacccagaccgcttcctggatgctgatggccgcttcaggaagcatgaggccttcctgcccttcagcctgggcaagagggtgtgcctgggggagggcctggccaaggccgagctgttcctgttcttcaccaccatcctgcaggccttcagcctggagagcccctgccccccagacaccctgagcctgaagcccaccgtgtctggcctcttcaacatccccccagccttccagctgcaggtgcggcccacagacctgcacagcaccacccagaccaggtag

SEQ ID NO: 219319 - DNA, 1695 bp, Artificial Sequence
  derived and/or modified sequence
atggaggccaccggcacctgggccctgctgctggccctggccctgctcctcctcttgacgttagctctcagcggtacgagggcccgcggccatcttccccctgggccgacaccattgccactgctcggcaatcttctgcaattgaggcctggcgctttgtatagcgggctaatgcgcctgagcaaaaaatacggccctgttttcaccatctatctgggcccatggcgccccgttgtcgtactggtggggcaggaagccgtacgcgaagccctgggtggacaggccgaggagttcagtgggcggggaacagtggccatgctggagggcacgttcgatgggcacggcgtgtttttctccaatggggagcggtggcgccagctgcggaaattcacgatgttggcacttcgggatctcggtatgggaaagcgcgagggggaggagttgattcaggcagaggccagatgcctagtggaaacctttcagggcaccgagggacgaccattcgacccatcgttattgctggctcaggccacttctaatgtagtgtgctccctcctgttcggtctgcgattcagctacgaggacaaagagttccaggccgtggtgagagcagcaggaggcacccttctgggtgtcagtagccaaggagggcagacatacgaaatgtttagctggttcctgcgccccttgcccggaccccataaacaactgctgcaccatgtgagcacactcgctgcctttaccgttcgccaggttcagcagcaccagggtaatcttgatgcctctggccctgcacgggacctcgttgatgcctttcttctcaaaatggcccaggaagaacagaatcctggcacagagttcactaataagaatatgttaatgacagtgatatacctgctcttcgcgggcacgatgactgtttccaccaccgttggctataccttgcttctactgatgaagtatccacacgtgcagaagtgggtgagagaggaactcaacagggagctcggggctggccaggcccccagcctgggggatcggactcgcctaccttatacggacgcagtgctccacgaggcccagaggctactggctttggtcccgatgggcatacccagaacactcatgcggacaacaagattccgcggctataccttgccccagggtactgaagtatttcctctgctcgggtctatcctgcacgatccaaacatcttcaaacaccctgaagaattcaatcccgaccgattcctggacgcggacggacgatttcgtaagcacgaggcctttctgccgttttcgcttggtaaaagggtgtgtttgggtgagggactggccaaagccgagcttttcctcttttttactactatcctgcaggctttcagcctcgagtccccgtgcccacccgatacattgagcctcaaacccacagtgagcgggttgttcaacatcccaccagcatctactgtcgggatggatagggtaaatgtatctcgtgtctacaccgcaggcagccatatatatacgccagccgtggtgtttcggtccctgtcccatgggccacatgcacacctgacccatgcggcgaaaatgcataatcggacacctatccacaactataaggggcacaaagctaccgctggcctcgctttccacaggcacaagtactcccctagcgcgattacttccacgtag

SEQ ID NO: 219320 - DNA, 1515 bp, Artificial Sequence
  derived and/or modified sequence
atggaggccaccggcacctgggccctgctgctggccctggccctgctgctcctcctaacccttgcactgagtggcacccgagctagaggtcatctgcctccaggcccgacaccacttccccttctgggcaacctgcttcagctgcgccctggagctctgtattccggcctcatgcgcctcagcaagaagtacggccctgtctttacaatctatctgggaccttggcggcctgtggtggtgctggtcggccaggaagcagtgcgagaagccctggggggacaagcagaggaattcagtggtagaggtactgtggctatgctagaaggcacttttgacggtcacggagtatttttctccaacggcgaaagatggcggcagctgcggaagttcactatgttggcgctccgtgatctgggaatgggtaagagggagggggaggaattaattcaggcggaagcacggtgtctggttgagacatttcaaggcactgaagggcgccccttcgatccttcgttactgctggcacaggccacctctaatgtcgtgtgcagtctcctgtttggccttaggttcagctatgaagacaaggaatttcaggcagtggttagggctgccggggggaccttgcttggggtatcttcacagggaggacagacatatgaaatgttctcttggtttctgcgccctcttccaggaccccataagcaactgctccatcatgtttcaaccctcgccgcctttactgttcgtcaagtccagcagcaccagggtaacctggatgcctcaggccccgcgagagatctggtcgacgctttcctgctcaagatggcacaggaggaacagaatcctgggaccgaattcactaataagaacatgctgatgaccgtgatatacctgctgttcgccggaactatgaccgtatcaacgactgtgggctatactctcttgctcctcatgaaatatccccacgtccagaagtgggttcgggaagaactcaaccgcgaactcggagccggccaagccccctcattgggggaccggacccggctgccctatacagacgccgtgctccatgaggcccagcggctgctcgccctggtgcccatgggcattcctaggaccctgatgcgaaccactcgctttcgtggatacacgctgccacagggcactgaagtattcccccttcttggctccatactccatgaccctaacatcttcaagcatcccgaggaatttaatcccgacagatttctagatgcggatgggcgttttagaaagcacgaagccttcctgccatttagtctgggaaagagggtctgtttgggcgagggcctagcaaaagccgaactgttcctctttttcacaacaatcttacaggcgtttagccttgaaagcccatgcccacccgacacacttagcttgaagccaacagtgagcggactgttcaatatccctcccgcctttcagctgcaagtgcgccctacagatctccattctaccacgcagacacgctag

SEQ ID NO: 219321 - DNA, 690 bp, Artificial Sequence
  derived and/or modified sequence
atggccatggaggagcagaaccccggcaccgagttcaccaacaagaatatgctcatgactgtgatatacctattgttcgccggcactatgacagtgtcaactaccgtgggatacacccttctcttacttatgaaataccctcacgtccagaagtgggttcgggaggagctaaaccgggaactgggcgcaggccaggccccttctctgggggacaggacgcgtctgccttacaccgacgctgttttacacgaagctcagcggctactggcactcgtccctatggggatccccaggactctgatgagaaccactcgcttccgagggtatactcttcctcagggcaccgaggtgtttccactgctgggatcaattcttcacgaccccaatatcttcaagcaccccgaggaattcaaccccgacaggttcctggatgctgacggtcgctttcggaagcacgaggctttcctccctttttccctggggaagagggtgtgcctgggggaggggctagccaaagcagagctcttcctgttctttacgactatcctccaggcattcagcctggaatctccctgccctcctgacactctctctttgaagcctacagtgtctgggctcttcaatattccccccgcttttcagctgcaggttcggccaactgatctgcacagtacaacccagactaggtag

SEQ ID NO: 219322 - DNA, 1695 bp, Artificial Sequence
  derived and/or modified sequence
atggaagctaccggcacgtgggcgctgctgctggctctcgcactcctcctgttactgacactcgccctgagtgggacccgcgcacggggacatctgccccctggacccacacccctacctctgcttggaaacctgctgcagctccggcctggggcactgtactctgggctgatgagactatcaaaaaagtacggaccggttttcactatatacctgggcccttggcggccagtggtcgtgttggtggggcaggaagcagtgcgggaagcccttgggggacaggcagaagagtttagtgggaggggtacagttgccatgctggaaggcaccttcgacggccatggagtgttcttcagtaacggagagcggtggcgacagctacggaagtttacgatgctggcactgagggatctcgggatgggcaagagagagggtgaggagctgatacaggctgaggccagatgcttggtcgaaaccttccaaggcaccgagggacgaccctttgacccaagcctgctgttggcccaagccaccagcaatgtcgtgtgcagtctgttatttggcttaagattctcttacgaagacaaggagttccaggccgtggtgcgggctgccggagggacactgctgggtgtgtcctcccaagggggacagacttacgagatgttctcttggtttttgagaccactccctggcccacataagcagctgctgcatcatgtgagtacccttgccgctttcacagtgagacaggtccagcagcaccaggggaatttggatgcttccgggcctgccagggatctggtcgacgcctttctgctcaagatggctcaggaggaacaaaatcctggaacggagtttaccaataagaatatgctgatgaccgtgatttacctcttgttcgctgggacgatgactgtgtcaactaccgtaggttacaccctgctgctgctgatgaaataccctcacgtgcagaaatgggtgagagaggagcttaaccgggagctgggtgcagggcaagcgcctagtctgggggaccgtaccaggcttccatataccgacgctgtcctgcatgaagcccagagactgctggccctcgttcccatgggaatcccccgtactttaatgcgcactacccggtttcgaggatacacccttccccaaggcaccgaagtctttccactgcttgggtcaattctccacgatcctaatatttttaagcaccctgaagaatttaacccggacagatttctcgatgcggacggacgctttcggaagcacgaggcattccttccctttagtctgggaaagcgcgtttgtctgggggaaggactagccaaagccgaattattccttttttttaccacgatacttcaagcattttcactcgagtctccgtgcccacccgacactttaagcctcaaacccacagtgtcaggactctttaatattccacccgcttccacagtgggaatggacagagtcaatgtaagcagggtgtatactgccggatcacatatctataccccagccgtagtgtttcggtccctcagccatgggcctcacgcccacctgactcacgccgctaagatgcacaaccgaacaccaattcataattacaagggccacaaagcaaccgccggactcgcctttcatcgacataagtactcacccagtgcgattacctccacatag

SEQ ID NO: 219323 - DNA, 1515 bp, Artificial Sequence
  derived and/or modified sequence
atggaagctacaggaacatgggctctcctcctcgcactagctctgctactgctgctcaccctcgcccttagcgggaccagagctagaggccatctgcccccaggcccaactccacttcccctgctaggtaacctgctgcagctcaggccaggcgctctgtacagcggtcttatgcgcctcagcaaaaaatacgggcctgtttttactatataccttgggccatggcgcccagtcgtggtcctggtgggacaagaggcggtacgagaggctttgggcggtcaggcagaggagtttagtgggcgaggaacagtagccatgctggagggtacctttgacgggcacggcgtgtttttttctaacggcgaaagatggcgccagcttcggaagtttacaatgctggcgctgcgtgatctcgggatgggaaaacgtgagggggaggagctcatccaagctgaagctcgatgcttagtcgaaacctttcagggcaccgaaggaaggccatttgacccgagcctgctcttggcccaagccacaagtaatgttgtctgctccctcttatttggcctgcggttcagctatgaggataaggaattccaggccgtcgtccgcgctgctgggggaactctgctgggggtgagctcacagggtggtcagacatacgaaatgttcagttggtttctgagacccttacctggcccacacaaacagctattacaccacgtttccaccctggcggctttcactgtacggcaggtgcagcaacaccaagggaatctggacgctagcggtccggctcgcgatctcgtagacgccttcctgttgaaaatggcacaagaagaacagaaccctggtactgagttcacaaacaaaaacatgctgatgaccgtgatttaccttttattcgctgggactatgacagtttctaccacggtaggctataccctgctactactgatgaagtacccgcacgtacagaaatgggtacgggaagagttgaatcgcgaacttggcgctggacaggccccttccttgggggaccggacaaggctcccgtataccgatgctgtgctacacgaggcccagaggctcctggctctcgtccctatgggcattcctcgaacactgatgaggactacaaggtttagaggctacactctgccacagggtactgaggtgtttcctctcctcggcagcattctgcacgatccgaacatcttcaagcaccccgaagagtttaaccctgaccggttcctggatgcagatggcagatttagaaagcacgaagcctttctcccgttttcactgggtaagcgagtgtgcctcggcgagggcttggcaaaggctgagctgttcctgttctttacgacaatcctgcaagccttcagcttagaatcaccatgtccgccagatacactcagcctgaaacctacagtgagtggattgtttaacatccctccagcctttcagctccaggttaggcctaccgatctgcacagcacaacccagacaagatag

SEQ ID NO: 219324 - DNA, 690 bp, Artificial Sequence
  derived and/or modified sequence
atggctatggaagaacagaacccagggacagagtttacaaataagaacatgttaatgaccgtaatctatctgctcttcgccggaacaatgactgtgagcacaaccgttggctacacacttttgctgcttatgaagtatcctcacgtccagaaatgggtgcgcgaagaactcaaccgtgagctgggggcaggccaggcccctagtcttggtgacagaacacggttaccatataccgacgcagtcctgcacgaagcacagaggttgttggcgctggttccgatggggatcccaagaacgctcatgcgaaccaccagattcagaggatacactctgcctcaaggcacagaagtgttcccccttctcggaagcattctacatgatccaaatattttcaagcatcctgaagagtttaatcccgaccggttcctcgacgcggacggaaggttccgaaagcatgaggcctttcttccattctcactgggtaaacgcgtgtgtctgggcgagggcttagctaaggcagagctgtttctgttttttactactatcctacaggctttctccctggaatccccttgtccacctgatacattgagtttgaagcctactgtgtcgggcctcttcaatatcccaccagctttccagttgcaggtgagaccaactgatctccattccacgacccagacccgttag

SEQ ID NO: 219325 - DNA, 1750 bp, Artificial Sequence
  derived and/or modified sequence
aactagcccagccgcgcggagcgcctgggagaggagaaggagccgacctgccgagatggaggcgaccggcacctgggcgctgctgctggcgctggcgctgctcctgctgctgacgctggcgctgtccgggaccagggcccgaggccacctgccccccgggcccacgccgctaccactgctgggaaacctcctgcagctacggcccggggcgctgtattcagggctcatgcggctgagtaagaagtacggaccggtgttcaccatctacctgggaccgtggcggcctgtggtggtcctggttgggcaggaggctgtgcgggaggccctgggaggtcaggctgaggagttcagcggccggggaaccgtagcgatgctggaagggacttttgatggccatggggttttcttctccaacggggagcggtggaggcagctgaggaagtttaccatgcttgctctgcgggacctgggcatggggaagcgagaaggcgaggagctgatccaggcggaggcccggtgtctggtggagacattccaggggacagaaggacgcccattcgatccctccctgctgctggcccaggccacctccaacgtagtctgctccctcctctttggcctccgcttctcctatgaggataaggagttccaggccgtggtccgggcagctggtggtaccctgctgggagtcagctcccaggggggtcagacctacgagatgttctcctggttcctgcggcccctgccaggcccccacaagcagctcctccaccacgtcagcaccttggctgccttcacagtccggcaggtgcagcagcaccaggggaacctggatgcttcgggccccgcacgtgaccttgtcgatgccttcctgctgaagatggcacaggaggaacaaaacccaggcacagaattcaccaacaagaacatgctgatgacagtcatttatttgctgtttgctgggacgatgacggtcagcaccacggtcggctataccctcctgctcctgatgaaataccctcatgtccaaaagtgggtacgtgaggagctgaatcgggagctgggggctggccaggcaccaagcctaggggaccgtacccgcctcccttacaccgacgcggttctgcatgaggcgcagcggctgctggcgctggtgcccatgggaataccccgcaccctcatgcggaccacccgcttccgagggtacaccctgccccagggcacggaggtcttccccctccttggctccatcctgcatgaccccaacatcttcaagcacccagaagagttcaacccagaccgtttcctggatgcagatggacggttcaggaagcatgaggcgttcctgcccttctccttagggaagcgtgtctgccttggagagggcctggcaaaagcggagctcttcctcttcttcaccaccatcctacaagccttctccctggagagcccgtgcccgccggacaccctgagcctcaagcccaccgtcagtggccttttcaacattcccccagcctcaacagtgggcatggacagggttaatgtctccagagtgtacactgcaggcagccacatttacacgcctgcagttgttttccggagtctgtcccacggcccacacgctcacttgactcatgctgctaagatgcacaaccgcacacccatacacaactacaagggccacaaagcaactgctgggttagctttccacagacataaatatagtccatctgcaatcacaagcacatag

SEQ ID NO: 219326 - DNA, 2620 bp, Artificial Sequence
  derived and/or modified sequence
aactagcccagccgcgcggagcgcctgggagaggagaaggagccgacctgccgagatggaggcgaccggcacctgggcgctgctgctggcgctggcgctgctcctgctgctgacgctggcgctgtccgggaccagggcccgaggccacctgccccccgggcccacgccgctaccactgctgggaaacctcctgcagctacggcccggggcgctgtattcagggctcatgcggctgagtaagaagtacggaccggtgttcaccatctacctgggaccgtggcggcctgtggtggtcctggttgggcaggaggctgtgcgggaggccctgggaggtcaggctgaggagttcagcggccggggaaccgtagcgatgctggaagggacttttgatggccatggggttttcttctccaacggggagcggtggaggcagctgaggaagtttaccatgcttgctctgcgggacctgggcatggggaagcgagaaggcgaggagctgatccaggcggaggcccggtgtctggtggagacattccaggggacagaaggacgcccattcgatccctccctgctgctggcccaggccacctccaacgtagtctgctccctcctctttggcctccgcttctcctatgaggataaggagttccaggccgtggtccgggcagctggtggtaccctgctgggagtcagctcccaggggggtcagacctacgagatgttctcctggttcctgcggcccctgccaggcccccacaagcagctcctccaccacgtcagcaccttggctgccttcacagtccggcaggtgcagcagcaccaggggaacctggatgcttcgggccccgcacgtgaccttgtcgatgccttcctgctgaagatggcacaggaggaacaaaacccaggcacagaattcaccaacaagaacatgctgatgacagtcatttatttgctgtttgctgggacgatgacggtcagcaccacggtcggctataccctcctgctcctgatgaaataccctcatgtccaaaagtgggtacgtgaggagctgaatcgggagctgggggctggccaggcaccaagcctaggggaccgtacccgcctcccttacaccgacgcggttctgcatgaggcgcagcggctgctggcgctggtgcccatgggaataccccgcaccctcatgcggaccacccgcttccgagggtacaccctgccccagggcacggaggtcttccccctccttggctccatcctgcatgaccccaacatcttcaagcacccagaagagttcaacccagaccgtttcctggatgcagatggacggttcaggaagcatgaggcgttcctgcccttctccttagggaagcgtgtctgccttggagagggcctggcaaaagcggagctcttcctcttcttcaccaccatcctacaagccttctccctggagagcccgtgcccgccggacaccctgagcctcaagcccaccgtcagtggccttttcaacattcccccagccttccagctgcaagtccgtcccactgaccttcactccaccacgcagaccagatgaaggaaggcaacttggaagtggtgggtgcccaggacggtgcctccagcctcaacagtgggcatggacagggttaatgtctccagagtgtacactgcaggcagccacatttacacgcctgcagttgttttccggagtctgtcccacggcccacacgctcacttgactcatgctgctaagatgcacaaccgcacacccatacacaactacaagggccacaaagcaactgctgggttagctttccacagacataaatatagtccatctgcaatcacaagcacatagccaggtaacccaccaactcccctggatctgcagcccacacgtgggagtctggctgtcaccttcacaagccacagaaacggccacacatgttcacagctcacacgccctctccattcatcgaacttctcagtgtccctgtccctggtgcctggcacagggaacagcatgccccctccggggtcatgccacccagagactgtcgctgtctatggccccaactcatgctccctctcttggctacaccactctcccagcctgtgaccaccgatgtccacacacccccaaccacttgtccacacagctacccacgtacgacatcgtcctggctccccagagtatcttcccactgagacacgccgcccccacagaggcacagtccccagccacctctgcaactgcagccctcagtcacccctttttaagcaccctgattctaccaaatgcaaacacatctgggtctgcgattatgcacagagactttggacatacgaggaccctcagaccggaggaacacctgcccaaccccaacacgtgcttatgtaaccacgtggaaagcggcccctgctgcccctccacacacacatacacactcactgatctacagcccctgttcggcgtcagagtccccactagacccagtggaaggggttagagaccaagtaggggccagtttccaattcaccctgtcagggagtgagccggatctgacgttccttgtgacttaagggtccggcttgggaattaaagtttgtttctggcctttagcct

SEQ ID NO: 219327 - DNA, 1479 bp, Artificial Sequence
  derived and/or modified sequence
agaggagaaggagccgacctgccgagatggaggcgaccggcacctgggcgctgctgctggcgctggcgctgctcctgctgctgacgctggcgctgtccgggaccagggcccgaggccacctgccccccgggcccacgccgctaccactgctgggaaacctcctgcagctacggcccggggcgctgtattcagggctcatgcggctgagtaagaagtacggaccggtgttcaccatctacctgggaccgtggcggcctgtggtggtcctggttgggcaggaggctgtgcgggaggccctgggaggtcaggctgaggagttcagcggccggggaaccgtagcgatgctggaagggacttttgatggccatggaggaacaaaacccaggcacagaattcaccaacaagaacatgctgatgacagtcatttatttgctgtttgctgggacgatgacggtcagcaccacggtcggctataccctcctgctcctgatgaaataccctcatgtccaaaagtgggtacgtgaggagctgaatcgggagctgggggctggccaggcaccaagcctaggggaccgtacccgcctcccttacaccgacgcggttctgcatgaggcgcagcggctgctggcgctggtgcccatgggaataccccgcaccctcatgcggaccacccgcttccgagggtacaccctgccccagggcacggaggtcttccccctccttggctccatcctgcatgaccccaacatcttcaagcacccagaagagttcaacccagaccgtttcctggatgcagatggacggttcaggaagcatgaggcgttcctgcccttctccttagggaagcgtgtctgccttggagagggcctggcaaaagcggagctcttcctcttcttcaccaccatcctacaagccttctccctggagagcccgtgcccgccggacaccctgagcctcaagcccaccgtcagtggccttttcaacattcccccagccttccagctgcaagtccgtcccactgaccttcactccaccacgcagaccagatgaaggaaggcaacttggaagtggtgggtgcccaggacggtgcctccagcctcaacagtgggcatggacagggttaatgtctccagagtgtacactgcaggcagccacatttacacgcctgcagttgttttccggagtctgtcccacggcccacacgctcacttgactcatgctgctaagatgcacaaccgcacacccatacacaactacaagggccacaaagcaactgctgggttagctttccacagacataaatatagtccatctgcaatcacaagcacatagccaggtaacccaccaactcccctggatctgcagcccacacgtgggagtctggctgtcaccttcacaagccacagaaacggccacacatgttcacagctcacacgccctctccattcatcgaacttctcagtgtccctgtccctggtg

SEQ ID NO: 219328 - DNA, 1695 bp, Artificial Sequence
  derived and/or modified sequence
atggaggccaccggcacctgggccctgctgctggccctggccctgctgctgctgctgaccctggccctgagcggcaccagagccagaggccacctgccccccggccccacccccctgcccctgctgggcaacctgctgcagctgagacccggcgccctgtacagcggcctgatgagactgagcaagaagtacggccccgtgttcaccatctacctgggcccctggagacccgtggtggtgctggtgggccaggaggccgtgagagaggccctgggcggccaggccgaggagttcagcggcagaggcaccgtggccatgctggagggcaccttcgacggccacggcgtgttcttcagcaacggcgagagatggagacagctgagaaagttcaccatgctggccctgagagacctgggcatgggcaagagagagggcgaggagctgatccaggccgaggccagatgcctggtggagaccttccagggcaccgagggcagacccttcgaccccagcctgctgctggcccaggccaccagcaacgtggtgtgcagcctgctgttcggcctgagattcagctacgaggacaaggagttccaggccgtggtgagagccgccggcggcaccctgctgggcgtgagcagccagggcggccagacctacgagatgttcagctggttcctgagacccctgcccggcccccacaagcagctgctgcaccacgtgagcaccctggccgccttcaccgtgagacaggtgcagcagcaccagggcaacctggacgccagcggccccgccagagacctggtggacgccttcctgctgaagatggcccaggaggagcagaaccccggcaccgagttcaccaacaagaacatgctgatgaccgtgatctacctgctgttcgccggcaccatgaccgtgagcaccaccgtgggctacaccctgctgctgctgatgaagtacccccacgtgcagaagtgggtgagagaggagctgaacagagagctgggcgccggccaggcccccagcctgggcgacagaaccagactgccctacaccgacgccgtgctgcacgaggcccagagactgctggccctggtgcccatgggcatccccagaaccctgatgagaaccaccagattcagaggctacaccctgccccagggcaccgaggtgttccccctgctgggcagcatcctgcacgaccccaacatcttcaagcaccccgaggagttcaaccccgacagattcctggacgccgacggcagattcagaaagcacgaggccttcctgcccttcagcctgggcaagagagtgtgcctgggcgagggcctggccaaggccgagctgttcctgttcttcaccaccatcctgcaggccttcagcctggagagcccctgcccccccgacaccctgagcctgaagcccaccgtgagcggcctgttcaacatcccccccgccagcaccgtgggcatggacagagtgaacgtgagcagagtgtacaccgccggcagccacatctacacccccgccgtggtgttcagaagcctgagccacggcccccacgcccacctgacccacgccgccaagatgcacaacagaacccccatccacaactacaagggccacaaggccaccgccggcctggccttccacagacacaagtacagccccagcgccatcaccagcacctag

SEQ ID NO: 219329 - DNA, 1515 bp, Artificial Sequence
  derived and/or modified sequence
atggaggccaccggcacctgggccctgctgctggccctggccctgctgctgctgctgaccctggccctgagcggcaccagagccagaggccacctgccccccggccccacccccctgcccctgctgggcaacctgctgcagctgagacccggcgccctgtacagcggcctgatgagactgagcaagaagtacggccccgtgttcaccatctacctgggcccctggagacccgtggtggtgctggtgggccaggaggccgtgagagaggccctgggcggccaggccgaggagttcagcggcagaggcaccgtggccatgctggagggcaccttcgacggccacggcgtgttcttcagcaacggcgagagatggagacagctgagaaagttcaccatgctggccctgagagacctgggcatgggcaagagagagggcgaggagctgatccaggccgaggccagatgcctggtggagaccttccagggcaccgagggcagacccttcgaccccagcctgctgctggcccaggccaccagcaacgtggtgtgcagcctgctgttcggcctgagattcagctacgaggacaaggagttccaggccgtggtgagagccgccggcggcaccctgctgggcgtgagcagccagggcggccagacctacgagatgttcagctggttcctgagacccctgcccggcccccacaagcagctgctgcaccacgtgagcaccctggccgccttcaccgtgagacaggtgcagcagcaccagggcaacctggacgccagcggccccgccagagacctggtggacgccttcctgctgaagatggcccaggaggagcagaaccccggcaccgagttcaccaacaagaacatgctgatgaccgtgatctacctgctgttcgccggcaccatgaccgtgagcaccaccgtgggctacaccctgctgctgctgatgaagtacccccacgtgcagaagtgggtgagagaggagctgaacagagagctgggcgccggccaggcccccagcctgggcgacagaaccagactgccctacaccgacgccgtgctgcacgaggcccagagactgctggccctggtgcccatgggcatccccagaaccctgatgagaaccaccagattcagaggctacaccctgccccagggcaccgaggtgttccccctgctgggcagcatcctgcacgaccccaacatcttcaagcaccccgaggagttcaaccccgacagattcctggacgccgacggcagattcagaaagcacgaggccttcctgcccttcagcctgggcaagagagtgtgcctgggcgagggcctggccaaggccgagctgttcctgttcttcaccaccatcctgcaggccttcagcctggagagcccctgcccccccgacaccctgagcctgaagcccaccgtgagcggcctgttcaacatcccccccgccttccagctgcaggtgagacccaccgacctgcacagcaccacccagaccagatag

SEQ ID NO: 219330 - DNA, 690 bp, Artificial Sequence
  derived and/or modified sequence
atggccatggaggagcagaaccccggcaccgagttcaccaacaagaacatgctgatgaccgtgatctacctgctgttcgccggcaccatgaccgtgagcaccaccgtgggctacaccctgctgctgctgatgaagtacccccacgtgcagaagtgggtgagagaggagctgaacagagagctgggcgccggccaggcccccagcctgggcgacagaaccagactgccctacaccgacgccgtgctgcacgaggcccagagactgctggccctggtgcccatgggcatccccagaaccctgatgagaaccaccagattcagaggctacaccctgccccagggcaccgaggtgttccccctgctgggcagcatcctgcacgaccccaacatcttcaagcaccccgaggagttcaaccccgacagattcctggacgccgacggcagattcagaaagcacgaggccttcctgcccttcagcctgggcaagagagtgtgcctgggcgagggcctggccaaggccgagctgttcctgttcttcaccaccatcctgcaggccttcagcctggagagcccctgcccccccgacaccctgagcctgaagcccaccgtgagcggcctgttcaacatcccccccgccttccagctgcaggtgagacccaccgacctgcacagcaccacccagaccagatag

SEQ ID NO: 219331 - protein, 1671 aa, Artificial Sequence
  derived and/or modified sequence
MDGNSLLSVPSNLESSRMYDVLEPQQGRGCGSSGSGPGNSITACKKVLRSNSLLESTDYWLQNQRMPCQIGFVEDKSENCASVCFVNLDVNKDECSTEHLQQKLVNVSPDLPKLISSMNVQQPKENEIVVLSGLASGNLQADFEVSQCPWLPDICLVQCARGNRPNSTNCIIFEINKFLIGLELVQERQLHLETNILKLEDDTNCSLSSIEEDFLTASEHLEEESEVDESRNDYENINVSANVLESKQLKGATQVEWNCNKEKWLYALEDKYINKYPTPLIKTERSPENLTKNTALQSLDPSAKPSQWKREAVGNGRQATHYYHSEAFKGQMEKSQALYIPKDAYFSMMDKDVPSACAVAEQRSNLNPGDHEDTRNALPPRQDGEVTTGKYATNLAESVLQDAFIRLSQSQSTLPQESAVSVSVGSSLLPSCYSTKDTVVSRSWNELPKIVVVQSPDGSDAAPQPGISSWPEMEVSVETSSILSGENSSRQPQSALEVALACAATVIGTISSPQATERLKMEQVVSNFPPGSSGALQTQAPQGLKEPSINEYSFPSALCGMTQVASAVAVCGLGEREEVTCSVAPSGSLPPAAEASEAMPPLCGLASMELGKEAIAKGLLKEAALVLTRPNTYSSIGDFLDSMNRRIMETASKSQTLCSENVVRNELAHTLSNVILRHSIDEVHHKNMIIDPNDNRHSSEILDTLMESTNQLLLDVICFTFKKMSHIVRLGECPAVLSKETIRRRETEPSCQPSDPGASQAWTKATESSSSSPLSNSHNTSLVINNLVDGMYSKQDKGGVRPGLFKNPTLQSQLSRSHRVPDSSTATTSSKEIYLKGIAGEDTKSPHHSENECRASSEGQRSPTVSQSRSGSQEAEESIHPNTQEKYNCATSRINEVQVNLSLLGDDLLLPAQSTLQTKHPDIYCITDFAEELADTVVSMATEIAAICLDNSSGKQPWFCAWKRGSEFLMTPNVPCRSLKRKKESQGSGTAVRKHKPPRLSEIKRKTDEHPELKEKLMNRVVDESMNLEDVPDSVNLFANEVAAKIMNLTEFSMVDGMWQAQGYPRNRLLSGDRWSRLKASSCESIPEEDSEARAYVNSLGLMSTLSQPVSRASSVSKQSSCESITDEFSRFMVNQMENEGRGFELLLDYYAGKNASSILNSAMQQACRKSDHLSVRPSCPSKQSSTESITEEFYRYMLRDIERDSRESASSRRSSQDWTAGLLSPSLRSPVCHRQSSMPDSRSPCSRLTVNVPIKANSLDGFAQNCPQDFLSVQPVSSASSSGLCKSDSCLYRRGGTDHITNMLIHETWASSIEALMRKNKIIVDDAEEADTEPVSGGSPSQAEKCANRLAASRMCSGPTLLVQESLDCPRKDSVTECKQPPVSSLSKTASLTNHSPLDSKKETSSCQDPVPINHKRRSLCSREVPLIQIETDQREACAGEPEPFLSKSSLLEEAEGHSNDKNIPDVVRGGDTAVSACQIHSDSLDTRDVPEAEASTEARAPDEAPNPPSSSEESTGSWTQLANEEDNPDDTSSFLQLSERSMSELVEEKKILKGQSESTEAPASGPPTGTASPQRSLLVINFDLEPECPDAELRATLQWIAASELGIPTIYFKKSQENRIEKFLDVVQLVHRKSWKVGDIFHAVVQYCKMHEEQKDGRLSLFDWLLELG

SEQ ID NO: 219332 - DNA, 5016 bp, Artificial Sequence
  derived and/or modified sequence
atggacggcaacagcctgctgagcgtgcccagcaacctggagagcagcagaatgtacgacgtgctggagccccagcagggcagaggctgcggcagcagcggcagcggccccggcaacagcatcaccgcctgcaagaaggtgctgagaagcaacagcctgctggagagcaccgactactggctgcagaaccagagaatgccctgccagatcggcttcgtggaggacaagagcgagaactgcgccagcgtgtgcttcgtgaacctggacgtgaacaaggacgagtgcagcaccgagcacctgcagcagaagctggtgaacgtgagccccgacctgcccaagctgatcagcagcatgaacgtgcagcagcccaaggagaacgagatcgtggtgctgagcggcctggccagcggcaacctgcaggccgacttcgaggtgagccagtgcccctggctgcccgacatctgcctggtgcagtgcgccagaggcaacagacccaacagcaccaactgcatcatcttcgagatcaacaagttcctgatcggcctggagctggtgcaggagagacagctgcacctggagaccaacatcctgaagctggaggacgacaccaactgcagcctgagcagcatcgaggaggacttcctgaccgccagcgagcacctggaggaggagagcgaggtggacgagagcagaaacgactacgagaacatcaacgtgagcgccaacgtgctggagagcaagcagctgaagggcgccacccaggtggagtggaactgcaacaaggagaagtggctgtacgccctggaggacaagtacatcaacaagtaccccacccccctgatcaagaccgagagaagccccgagaacctgaccaagaacaccgccctgcagagcctggaccccagcgccaagcccagccagtggaagagagaggccgtgggcaacggcagacaggccacccactactaccacagcgaggccttcaagggccagatggagaagagccaggccctgtacatccccaaggacgcctacttcagcatgatggacaaggacgtgcccagcgcctgcgccgtggccgagcagagaagcaacctgaaccccggcgaccacgaggacaccagaaacgccctgccccccagacaggacggcgaggtgaccaccggcaagtacgccaccaacctggccgagagcgtgctgcaggacgccttcatcagactgagccagagccagagcaccctgccccaggagagcgccgtgagcgtgagcgtgggcagcagcctgctgcccagctgctacagcaccaaggacaccgtggtgagcagaagctggaacgagctgcccaagatcgtggtggtgcagagccccgacggcagcgacgccgccccccagcccggcatcagcagctggcccgagatggaggtgagcgtggagaccagcagcatcctgagcggcgagaacagcagcagacagccccagagcgccctggaggtggccctggcctgcgccgccaccgtgatcggcaccatcagcagcccccaggccaccgagagactgaagatggagcaggtggtgagcaacttcccccccggcagcagcggcgccctgcagacccaggccccccagggcctgaaggagcccagcatcaacgagtacagcttccccagcgccctgtgcggcatgacccaggtggccagcgccgtggccgtgtgcggcctgggcgagagagaggaggtgacctgcagcgtggcccccagcggcagcctgccccccgccgccgaggccagcgaggccatgccccccctgtgcggcctggccagcatggagctgggcaaggaggccatcgccaagggcctgctgaaggaggccgccctggtgctgaccagacccaacacctacagcagcatcggcgacttcctggacagcatgaacagaagaatcatggagaccgccagcaagagccagaccctgtgcagcgagaacgtggtgagaaacgagctggcccacaccctgagcaacgtgatcctgagacacagcatcgacgaggtgcaccacaagaacatgatcatcgaccccaacgacaacagacacagcagcgagatcctggacaccctgatggagagcaccaaccagctgctgctggacgtgatctgcttcaccttcaagaagatgagccacatcgtgagactgggcgagtgccccgccgtgctgagcaaggagaccatcagaagaagagagaccgagcccagctgccagcccagcgaccccggcgccagccaggcctggaccaaggccaccgagagcagcagcagcagccccctgagcaacagccacaacaccagcctggtgatcaacaacctggtggacggcatgtacagcaagcaggacaagggcggcgtgagacccggcctgttcaagaaccccaccctgcagagccagctgagcagaagccacagagtgcccgacagcagcaccgccaccaccagcagcaaggagatctacctgaagggcatcgccggcgaggacaccaagagcccccaccacagcgagaacgagtgcagagccagcagcgagggccagagaagccccaccgtgagccagagcagaagcggcagccaggaggccgaggagagcatccaccccaacacccaggagaagtacaactgcgccaccagcagaatcaacgaggtgcaggtgaacctgagcctgctgggcgacgacctgctgctgcccgcccagagcaccctgcagaccaagcaccccgacatctactgcatcaccgacttcgccgaggagctggccgacaccgtggtgagcatggccaccgagatcgccgccatctgcctggacaacagcagcggcaagcagccctggttctgcgcctggaagagaggcagcgagttcctgatgacccccaacgtgccctgcagaagcctgaagagaaagaaggagagccagggcagcggcaccgccgtgagaaagcacaagccccccagactgagcgagatcaagagaaagaccgacgagcaccccgagctgaaggagaagctgatgaacagagtggtggacgagagcatgaacctggaggacgtgcccgacagcgtgaacctgttcgccaacgaggtggccgccaagatcatgaacctgaccgagttcagcatggtggacggcatgtggcaggcccagggctaccccagaaacagactgctgagcggcgacagatggagcagactgaaggccagcagctgcgagagcatccccgaggaggacagcgaggccagagcctacgtgaacagcctgggcctgatgagcaccctgagccagcccgtgagcagagccagcagcgtgagcaagcagagcagctgcgagagcatcaccgacgagttcagcagattcatggtgaaccagatggagaacgagggcagaggcttcgagctgctgctggactactacgccggcaagaacgccagcagcatcctgaacagcgccatgcagcaggcctgcagaaagagcgaccacctgagcgtgagacccagctgccccagcaagcagagcagcaccgagagcatcaccgaggagttctacagatacatgctgagagacatcgagagagacagcagagagagcgccagcagcagaagaagcagccaggactggaccgccggcctgctgagccccagcctgagaagccccgtgtgccacagacagagcagcatgcccgacagcagaagcccctgcagcagactgaccgtgaacgtgcccatcaaggccaacagcctggacggcttcgcccagaactgcccccaggacttcctgagcgtgcagcccgtgagcagcgccagcagcagcggcctgtgcaagagcgacagctgcctgtacagaagaggcggcaccgaccacatcaccaacatgctgatccacgagacctgggccagcagcatcgaggccctgatgagaaagaacaagatcatcgtggacgacgccgaggaggccgacaccgagcccgtgagcggcggcagccccagccaggccgagaagtgcgccaacagactggccgccagcagaatgtgcagcggccccaccctgctggtgcaggagagcctggactgccccagaaaggacagcgtgaccgagtgcaagcagccccccgtgagcagcctgagcaagaccgccagcctgaccaaccacagccccctggacagcaagaaggagaccagcagctgccaggaccccgtgcccatcaaccacaagagaagaagcctgtgcagcagagaggtgcccctgatccagatcgagaccgaccagagagaggcctgcgccggcgagcccgagcccttcctgagcaagagcagcctgctggaggaggccgagggccacagcaacgacaagaacatccccgacgtggtgagaggcggcgacaccgccgtgagcgcctgccagatccacagcgacagcctggacaccagagacgtgcccgaggccgaggccagcaccgaggccagagcccccgacgaggcccccaacccccccagcagcagcgaggagagcaccggcagctggacccagctggccaacgaggaggacaaccccgacgacaccagcagcttcctgcagctgagcgagagaagcatgagcgagctggtggaggagaagaagatcctgaagggccagagcgagagcaccgaggcccccgccagcggcccccccaccggcaccgccagcccccagagaagcctgctggtgatcaacttcgacctggagcccgagtgccccgacgccgagctgagagccaccctgcagtggatcgccgccagcgagctgggcatccccaccatctacttcaagaagagccaggagaacagaatcgagaagttcctggacgtggtgcagctggtgcacagaaagagctggaaggtgggcgacatcttccacgccgtggtgcagtactgcaagatgcacgaggagcagaaggacggcagactgagcctgttcgactggctgctggagctgggctag

SEQ ID NO: 219333 - DNA, 5016 bp, Artificial Sequence
  derived and/or modified sequence
atggacggcaactctctgctgagcgtgccatcaaatctggagtcttccagaatgtacgatgtgctggagcctcagcaaggtcgcggctgtggctccagcggcagtggcccaggcaactcgattacggcctgcaagaaggtgttgcgcagcaactccttactcgagagtacagactactggcttcaaaaccagcggatgccctgccagatcggattcgtcgaggacaaaagcgaaaattgtgctagtgtctgcttcgtgaaccttgatgtgaataaggacgaatgcagcacagaacacctgcagcagaagctggtgaatgtgtcccccgatcttcccaagttgatcagctcaatgaacgtgcagcagcctaaggagaatgagatcgttgtgttaagtggcctggcgagcggaaatcttcaggctgatttcgaggtgagccagtgtccctggctgcccgacatatgtctggtgcagtgcgccagggggaatagacctaacagcacaaactgcatcattttcgagattaataaattcctgatcggcctcgagctggttcaggaacgacagctgcatttagagacaaatatactgaagctcgaagacgacacaaattgttctctgagttccatcgaggaggattttttaaccgcttctgagcatttagaagaagagagcgaggtagatgaatcccgcaacgattatgagaacatcaacgtgtccgccaatgtactcgaaagtaaacagctaaagggagctactcaagtggaatggaattgcaataaagagaagtggctttatgctcttgaagataagtacatcaataaatatcccacacctctaataaaaactgaaaggtctcctgagaacctgactaagaacaccgccctgcaatcactcgatccatccgcaaagccctctcaatggaagcgggaggcagtgggtaacggaaggcaggcaacccactattaccactccgaagccttcaaaggacagatggaaaagtcccaggccctctatattcccaaagatgcatacttttccatgatggataaggacgtcccttccgcgtgtgcagtggctgaacagaggagcaaccttaatcctggcgatcatgaggatacaagaaatgccttacctcctagacaggacggagaagtcaccaccgggaagtacgccactaacctggccgagagcgtgttgcaagatgcttttatccgactgtctcagtcccagtctacgctgccccaggaaagcgctgtttcagtgtcggtcggctcctcactgttgccaagctgttatagcaccaaagatactgttgtatcgcgttcttggaatgagctcccaaagatcgtcgtggtgcaaagcccagatggttcagatgctgccccccagcccggaatctcatcctggcccgaaatggaggtttcagtggagacgtccagcattctcagcggagagaactctagtagacaaccacaatccgccctagaggtggccctcgcatgcgctgcaaccgtgatcggaacgatcagtagccctcaggctacagaacgcctcaaaatggagcaggtggtctcaaactttcctcccggatcgtccggcgctctgcaaactcaggccccacagggattgaaggagccttctattaacgaatattccttcccatctgcactttgcgggatgacacaagtcgcttccgccgtggcggtatgcggcctcggcgagcgcgaagaagtcacgtgctctgtcgctccatcaggcagtctgcccccggccgccgaagcgagcgaggctatgccacctttgtgtggcctggctagcatggaattagggaaggaggccatcgccaagggcttgttgaaggaggctgcacttgttctgaccagaccaaatacgtattcttccataggggatttccttgactccatgaatcggcggattatggaaacggcctcaaagtcccaaaccctgtgctcagaaaacgtggttaggaatgagctggctcacactctgagcaatgttattctgcgacactcgatcgatgaagttcatcacaagaatatgatcatcgacccaaacgataatcgccacagttccgaaatcctcgacaccctgatggaatctactaaccagctgttgctggacgtcatctgttttacatttaaaaaaatgtctcacatcgttcgcctcggggagtgccccgctgtgctatctaaggaaacaatccgtagacgcgagaccgagcctagctgtcagcctagcgacccaggtgccagccaggcttggaccaaggccaccgagagctcttcctctagccctctgtctaatagtcacaataccagcctcgtgatcaacaatttagtggacggaatgtatagcaaacaagacaaggggggggtccgcccaggcctctttaagaaccctactctgcaatcccagttatccaggagtcatagggtgccggacagcagcacagccaccacctcaagcaaagaaatctatttgaaagggatcgccggagaggatacaaagagtcctcaccactccgagaacgagtgtcgcgctagttctgaaggacagcgcagccccaccgtctcacagtctaggagcggatcccaagaagccgaagagtccatccacccaaatactcaagaaaaatacaactgcgcaacctccaggatcaacgaggtccaggtgaacctgtctcttctaggcgacgatctgctattgccagcacagtccacgctgcaaaccaaacaccctgacatctattgcatcaccgatttcgcagaagagctcgcagatacagtggtgtccatggctacagagatcgcagctatttgtctggacaattcttctggcaagcaaccctggttctgtgcctggaagagaggctcagaatttcttatgacaccaaacgtcccatgtcggtcattgaagaggaagaaggagtcccagggatctgggactgccgttcggaaacacaaacctccccgactgagcgagattaagaggaaaactgacgaacaccccgaactgaaggaaaagctaatgaatcgagtagtcgacgaaagtatgaatctggaggacgtgccagactcagttaacctttttgctaatgaagtggcggccaagatcatgaaccttacagagttctcaatggttgatggcatgtggcaagcccaggggtatccgaggaatcgcctccttagcggggataggtggtcacgactgaaggcctcatcttgcgagagcatccctgaagaggattccgaggcacgtgcctacgtgaacagtctcgggttgatgtctacgctgtctcagccggtctcccgtgcatcctcagtgagtaagcagagctcctgcgaatctattacggacgagttctccaggttcatggtgaaccagatggagaacgaggggcgtgggttcgagctgcttctagactactacgccggtaagaacgcttcttcgatcctcaattccgcgatgcagcaggcttgtagaaaatctgaccacctcagcgtccgccctagttgcccctcaaaacaaagtagcaccgagtcaattacagaagagttctacaggtatatgctaagagatattgagcgcgatagcagggagagtgcctccagccgaaggtcaagtcaggattggaccgctgggttgttgagtccatccctgagatcaccagtctgtcatcggcagtccagtatgcctgactcccgctctccatgtagccgtctgactgtgaacgttcccataaaagccaactcattagacgggttcgcacagaattgtccacaggatttcctctctgtgcagcctgttagttctgctagcagctctggactttgcaaatctgatagctgtctgtacagaagggggggcactgatcacattactaacatgttgatccacgagacatgggcttcatctatagaagcactgatgagaaagaataaaataatagttgacgacgccgaggaagccgacactgagccagtgtctggaggctcccccagccaggcagagaagtgcgctaaccgactggcagcctctaggatgtgtagcggcccaactctgcttgttcaagaaagcctcgactgtcctcggaaagactcagtcaccgagtgcaaacagcctccggtgtcatccctaagtaaaactgcttctcttacaaaccactcccccctggacagtaagaaggaaacatcttcatgtcaggaccctgtgcccattaatcacaaacggagatccctgtgtagtcgggaggtgcccttgatacagatagagacggaccaaagagaagcctgcgcaggtgaaccagaaccctttctgtcgaaaagctcactgctggaggaagccgaaggtcatagtaacgataagaacatcccagacgtggttcgaggcggcgacacagctgtgagtgcctgccagattcatagcgattcactggacactagagatgtcccagaagccgaggccagcactgaggccagggcccctgacgaagcaccaaaccctccatcctcatcagaggaaagcacaggcagttggacgcagttggcaaatgaggaggataaccccgatgatacctcttcattcctccaattgtccgaacgatccatgtccgagcttgtagaagagaagaaaatcctgaagggccaaagcgaatctacagaagctcctgcctcgggtcctccgacagggacggccagtcctcagcgttctcttttagttatcaattttgatctggagcctgagtgccccgatgcggagcttcgagccactttgcagtggatagccgcatccgaactgggtattccaacaatttactttaagaaatctcaggagaatcgaatcgagaagtttttggatgtggtgcagctagtgcaccggaagagctggaaggtgggcgacatcttccacgcagtcgtgcagtattgcaagatgcacgaagagcagaaggatggccgcctgtctcttttcgactggctgctcgagctcgggtag

SEQ ID NO: 219334 - DNA, 5016 bp, Artificial Sequence
  derived and/or modified sequence
atggatggcaacagcctgctgtctgtgcccagcaacctggagagcagcaggatgtatgatgtgctggagccccagcagggccggggctgcggcagcagcggcagcggccctggcaacagcatcacagcctgcaagaaggtgctgcggagcaacagcctgctggagagcacagactactggctgcagaaccagaggatgccctgccagatcggctttgtggaggacaagtctgagaactgtgcctctgtgtgctttgtgaacctggatgtgaacaaggatgagtgcagcacagagcacctgcagcagaagctggtgaatgtgtccccagacctgcccaagctgatcagctccatgaatgtgcagcagcccaaggaaaatgagatcgtggtgctgagcggcctggccagcggcaacctgcaggccgactttgaggtgtcccagtgcccctggctgcctgacatctgcctggtgcagtgtgcccggggcaaccggcccaacagcaccaactgcatcatctttgagatcaacaagttcctgattggcctggagctggtgcaggagcggcagctgcacctggagaccaacatcctgaagctggaggatgacaccaactgcagcctgagcagcattgaggaggacttcctgacagccagcgagcacctggaggaggagagcgaggtggatgagagcagaaatgactatgagaacatcaacgtgtctgccaacgtgctggagagcaagcagctgaagggggccacccaggtggagtggaactgcaacaaggagaagtggctgtatgccctggaggacaagtacatcaacaagtaccccacccccctcatcaagacagagaggagccctgagaacctgaccaagaacacagccctgcagagcctggaccccagcgccaagcccagccagtggaagcgggaggccgtgggcaatggccggcaggccacccactactaccacagcgaggccttcaagggccagatggagaagagccaggccctgtacatccccaaggatgcctacttctccatgatggacaaggatgtgcccagcgcctgtgctgtggccgagcagaggagcaacctgaaccctggggaccacgaggacaccagaaatgccctgcccccccggcaggatggagaggtgaccaccgggaagtatgccaccaacctggccgagagcgtgctgcaggatgccttcatccggctgagccagagccagagcaccctgccccaggagagcgctgtgtctgtgtctgtgggcagcagcctgctgcccagctgctacagcaccaaggacacagtggtgagccgctcctggaatgagctgcccaagatcgtggtggtgcagagcccagatggcagtgatgctgccccccagcccggcatcagctcctggccagagatggaggtgtctgtggagaccagcagcatcctgagcggggagaacagcagccggcagccccagagcgccctggaggtggccctggcctgtgccgccaccgtgattggcaccatcagcagcccccaggccacagagcggctgaagatggagcaggtggtgagcaacttccccccaggcagcagcggggccctgcagacccaggccccccagggcctgaaggagcccagcatcaatgagtacagcttccccagcgccctgtgtggcatgacccaggtggccagcgctgtggccgtgtgtggcctgggggagcgggaggaggtgacctgcagcgtggcccccagcggcagcctgcccccagctgctgaggccagcgaggccatgccacccctgtgtggcctggcctccatggagctgggcaaggaggccatcgccaagggcctgctgaaggaggccgccctggtgctgacccggcccaacacctacagcagcatcggggacttcctggacagcatgaacagacgcatcatggagacagccagcaagagccagaccctgtgcagtgaaaatgtggtgagaaatgagctggcccacaccctgagcaatgtcatcctgcggcacagcattgatgaggtgcaccacaagaacatgatcatcgaccccaatgacaacagacacagcagcgagatcctggacaccctgatggagagcaccaaccagctgctgctggatgtgatctgcttcaccttcaagaagatgagccacatcgtgcggctgggggagtgcccagctgtgctgagcaaggagaccatcagaagaagagaaacagagcccagctgccagcccagcgaccccggggccagccaggcctggaccaaggccacagagagcagcagcagcagccccctgagcaacagccacaacaccagcctggtgatcaacaacctggtggatggcatgtacagcaagcaggacaagggcggcgtgcggcccggcctcttcaagaaccccaccctgcagagccagctgagccgcagccaccgggtgcctgacagcagcacagccaccaccagcagcaaggagatctacctgaagggcattgctggggaggacaccaagagcccccaccacagtgaaaatgaatgtcgggccagcagcgagggccagaggagccccaccgtgtcccagagccgcagcggcagccaggaggccgaggagagcatccaccccaacacccaggagaagtacaactgtgccaccagccgcatcaatgaggtgcaggtgaacctgagcctgctgggagatgacctgctgctgcctgcccagagcaccctgcagaccaagcacccagacatctactgcatcacagactttgctgaggagctggccgacacagtggtgtccatggccacagaaattgctgccatctgcctggacaacagcagcggcaagcagccctggttctgtgcctggaagaggggcagcgagttcctgatgaccccaaatgtgccctgccgcagcctgaagaggaagaaggagagccagggcagcggcacagctgtgaggaagcacaagccaccccggctgtctgagatcaagaggaagacagatgagcaccctgagctgaaggagaagctgatgaacagagtggtggatgagagcatgaacctggaggatgtgcctgacagcgtgaacctgtttgccaatgaggtggccgccaagatcatgaacctgacagagttctccatggtggatggcatgtggcaggcccagggctaccccaggaaccggctgctgagcggggaccgctggagccggctgaaggccagcagctgtgagagcatcccagaagaagattctgaggcccgggcctacgtgaacagcctgggcctgatgagcaccctgagccagcctgtgtcccgggccagctctgtgtccaagcagagcagctgtgagagcatcacagatgagttcagccgcttcatggtgaaccagatggagaatgaaggccggggctttgagctgctgctggactactatgctgggaagaatgccagcagcatcctgaacagcgccatgcagcaggcctgcaggaagagtgaccacctgtctgtgcggcccagctgccccagcaagcagagcagcacagagagcatcacagaggagttctaccgctacatgctgcgggacatcgagcgggacagccgggagagcgccagcagcagaagaagcagccaggactggacagctggcctgctgagccccagcctgcggagccctgtgtgccaccggcagagctccatgccagacagccgcagcccctgcagccggctgactgtgaatgtgcccatcaaggccaacagcctggatggctttgcccagaactgcccccaggacttcctgtctgtgcagcctgtgtcctctgccagcagcagcggcctgtgcaagagtgacagctgcctgtaccgccggggcggcacagaccacatcaccaacatgctgattcatgagacctgggccagcagcattgaggccctgatgaggaagaacaagatcatcgtggatgatgctgaggaggccgacacagagcctgtgtctgggggcagccccagccaggccgagaagtgtgccaaccggctggccgccagcaggatgtgcagcggccccaccctgctggtgcaggagagcctggactgccccaggaaggacagcgtgacagagtgcaagcagccccctgtgagcagcctgagcaagacagccagcctgaccaaccacagccccctggacagcaagaaggagaccagcagctgccaggaccctgtgcccatcaaccacaagaggaggagcctgtgcagccgggaggtgcccctcatccagattgaaacagaccagcgggaggcctgtgccggggagcctgagcccttcctgagcaagagcagcctgctggaggaggccgagggccacagcaatgacaagaacatcccagatgtggtgcggggcggggacacagctgtgtctgcctgccagatccacagcgacagcctggacaccagagatgtgcctgaggccgaggccagcacagaggcccgggccccagatgaggcccccaacccccccagcagcagcgaggagagcacaggctcctggacccagctggccaatgaggaggacaacccagatgacaccagcagcttcctgcagctgtctgagaggtccatgtctgagctggtggaggagaagaagatcctgaagggccagagcgagagcacagaggccccagccagcggcccccccaccggcacagccagcccccagaggagcctgctggtgatcaactttgacctggagccagaatgtccagatgctgagctgcgggccaccctgcagtggattgctgccagcgagctgggcatccccaccatctacttcaagaagagccaggagaaccgcatcgagaagttcctggatgtggtgcagctggtgcacaggaagtcctggaaggtgggggacatcttccacgctgtggtgcagtactgcaagatgcatgaggagcagaaggatggccgcctgagcctgtttgactggctgctggagctgggctag

SEQ ID NO: 219335 - DNA, 5016 bp, Artificial Sequence
  derived and/or modified sequence
atggacggcaacagcctgctgagcgtgcccagcaacctggagagctccagaatgtacgatgtgcttgagcctcagcagggtagaggttgcggtagttccggatctggacccggcaattccattaccgcttgcaaaaaagtgctgcgcagcaatagtttgctcgaatctaccgactattggttgcaaaatcagaggatgccctgccaaatcggcttcgtggaggacaaatctgaaaattgtgccagtgtgtgtttcgtaaatctggatgttaataaagatgagtgcagtaccgagcacctgcaacagaagttggtgaacgtttccccggacctgccaaagctgatttcctccatgaatgtgcaacaacccaaggagaacgagattgtggtgttgtcagggctggcttccgggaatctacaggctgactttgaggtgagtcaatgtccatggctgcctgatatttgcctcgtacaatgcgccagagggaaccgccccaattctactaactgcatcatcttcgagattaacaagttccttattgggctagaactggtacaggagcggcagctgcacctcgaaaccaacatcttgaagctagaagatgatactaactgttccctatcaagcattgaggaagattttcttaccgccagtgagcacctcgaagaagagtccgaggtggacgaatcaagaaatgactacgaaaacataaacgtgagcgccaacgtacttgaatcaaagcaactcaaaggagccactcaggtggagtggaactgtaacaaagaaaaatggctgtacgctctagaggataagtacataaacaaataccctacccctctgattaagaccgaaaggtctcccgagaacctcacaaagaacacagctctccagtccctggatccttcagccaaaccctcccaatggaagcgggaagcggttgggaacggaaggcaggccacacactactatcactcggaggcctttaaaggccaaatggaaaagagccaggcactgtatatacctaaagatgcatatttttctatgatggacaaggatgtcccctccgcttgtgccgtagcggagcaacgctccaacctgaacccaggtgaccacgaagatacaagaaacgccctccctccaagacaagacggcgaggtgaccacaggaaagtatgcgacaaacctcgccgaaagtgttctgcaagatgcctttatccgactgtcccaatcccagtccactttgccacaggagagcgcagtgagcgtgagtgtgggttcaagccttctaccgtcctgttattccacaaaagataccgtggtgtccagaagttggaatgagctccccaagatcgtggtagtgcaatccccagatgggtctgacgccgcccctcagcctgggatttcaagttggcctgagatggaagtgtcagtcgaaacatccagtatcctgtcaggcgaaaacagttctagacagccccaatctgccttggaagtcgcactggcttgtgcagccactgtgatcggtaccatatcctccccccaggcaacagaacgcctcaaaatggagcaggtggtgtcaaacttcccgccagggagtagcggagcgcttcaaacacaggcacctcagggactgaaggagccctccatcaacgaatacagttttccatcagctctgtgcggcatgactcaggtagcgagtgctgttgctgtctgtggcctcggcgagagggaagaagtcacgtgctccgtggccccttctggctcattgcccccggctgccgaggcctctgaagcgatgccgcctttgtgcggcttggcttctatggaacttggaaaggaggccatagcaaaagggctgctcaaagaggccgccttggtcctgacacggccaaacacgtacagtagcatcggagatttcctcgatagtatgaacagacgtattatggagaccgccagtaagtcacagaccctttgctctgaaaatgtcgtgaggaatgaattggcccataccctttccaacgtcatcctgaggcactccatcgacgaagtccatcataaaaacatgattatcgatcccaacgataataggcatagttcggaaatcttggataccttgatggaaagtaccaatcagctcctactggacgtgatttgtttcacttttaaaaaaatgagccatatcgtgagattgggggagtgccctgccgtcttgtcaaaagagacaataagaagacgggagaccgagccgtcttgtcagccgagtgaccctggggcttctcaggcatggacaaaagctacagagagcagtagttcctccccactgtccaattcccacaacacaagcttagtgataaacaatcttgtcgacggcatgtactccaagcaagataaaggcggtgtcaggccgggcctcttcaagaatcccacactacagagtcagttaagccggagccacagggttcctgatagctcgacagcaaccacctcttccaaggagatctacctgaaaggcatcgccggtgaggacaccaaaagccctcaccacagcgagaacgagtgtagggcttcctcggaaggccagaggagccccacagtctctcagagtcggtccgggtctcaggaagctgaggaatccatccatcccaacacacaggagaagtataattgcgccacatcacggatcaacgaggtccaggtgaatctttcactgctgggcgatgacttgctgcttcctgcccagagcacacttcagaccaaacatcctgacatctactgtatcacagattttgccgaggagctcgctgatactgtggtttcaatggccaccgaaatagccgccatatgtctcgataactcaagcggtaagcaaccctggttctgtgcctggaagagggggagtgaattcctcatgacacccaacgttccatgtcggtccttaaagcggaagaaggaatcccagggctccggaacagccgtgcgtaagcacaagcctccgagactctcggagatcaagcggaaaacggacgagcatcccgaacttaaagagaagctgatgaatagggtcgtggacgagagcatgaatttggaggatgtgccggattcagtgaacctttttgcgaacgaggtggccgctaagataatgaatttgacggaattctcaatggttgatggcatgtggcaggcccagggataccctagaaataggctgttaagtggagaccgctggtctcgactgaaagcatcctcctgtgagtctatccctgaggaggattccgaggcaagagcgtacgtgaatagtctcggcctgatgagtacactgtcacagcctgttagtcgagccagttccgtgagcaagcagtcgagttgcgaaagtatcaccgacgagtttagccggtttatggtgaatcaaatggaaaatgaggggcggggattcgagcttctcctggactattacgccgggaaaaacgccagctctatcttaaactcagccatgcagcaagcttgccgcaagagtgatcacctctctgtccgcccgtcttgtccaagcaaacaatccagtacagagtccatcacagaagaattttatcgctatatgctgagggacattgaacgcgactctagagagagtgcttcttctagacgatcatctcaagactggacagcagggttgcttagtcctagtcttcgaagcccagtatgccatcggcaatcttccatgccagattcacgtagcccatgttcgcgactgacagtgaacgtgccaattaaagctaacagcctggatgggtttgcccagaactgccctcaggatttcctgagcgtgcagccggtctccagtgcctcatccagcggactttgcaagtcagactcctgcctgtacagacgagggggcacagatcatattacgaatatgttgatccatgagacgtgggcttcgtccatcgaggcactgatgcggaagaacaagatcatcgtggacgacgccgaggaggcagacacggaaccagtgtctggaggcagcccttcacaggcagagaagtgtgcaaaccgtctggctgctagccgaatgtgttctggaccaaccctcctggtccaggaaagccttgactgtcccaggaaggactctgtcactgagtgcaagcagcctcccgtgagcagtctttccaaaacagctagtctcacgaaccattctcctctggactccaaaaaagagaccagctcctgccaggacccagtgcctatcaatcacaagcggcgtagcttatgctctcgcgaggtgcctctgatacagatcgaaacagatcagcgcgaggcctgcgcaggcgaaccagaacctttcctgtcgaagtcctctttactcgaagaggcagaagggcactccaacgataagaacattcccgacgtggtgcgtggaggggacacagcagtgagcgcctgtcaaattcactccgactcactcgatacacgagacgtgcccgaggccgaggcatccacggaagcacgggcccccgacgaggccccaaatccacccagctcatctgaagaatccacaggcagttggacccagcttgccaacgaggaggataatccggacgatacctcgtctttcctccaactgagcgagagatctatgagcgagcttgttgaggaaaagaagattctcaagggtcagtctgagtccactgaagcccccgccagtggccctcccactgggactgcaagccctcagaggtcattactcgtgattaacttcgacctcgagccggagtgcccagatgcagagttgcgcgcaacccttcagtggatcgcagcatccgagctggggattcctacaatttatttcaaaaagagccaggaaaatcgtatagagaagtttctcgacgttgtgcagctggttcatcgaaagtcttggaaagtgggagatatattccatgctgttgttcagtactgtaagatgcacgaggagcagaaggatggtaggctgtcccttttcgactggctcctggagttaggctag

SEQ ID NO: 219336 - DNA, 5015 bp, Artificial Sequence
  derived and/or modified sequence
atggatggtaattccctgctctctgtcccatccaatctcgaatcatcacgcatgtatgacgtgttggagcctcaacagggacggggatgcggtagttcgggtagtggacccggaaactcaataactgcttgtaaaaaggtgctcagatcaaattctttactagagtccaccgactactggttgcagaaccagagaatgccctgccagatcggatttgtcgaagacaagagtgagaattgcgctagcgtttgcttcgtcaacttagacgttaacaaagacgagtgctccacggaacacctacagcaaaaacttgtcaatgtgagtccggatttacccaagctgatcagtagcatgaacgtgcagcagcctaaggaaaacgagattgtggtcctaagcggtctcgcttctggaaacctgcaggcagactttgaggtgtcccagtgtccctggctgcccgatatctgcctggtacagtgcgctcgtggcaataggccaaattctaccaattgcataatattcgagattaataaattcctcatcggcctggagctggttcaagaaaggcaactgcacttggagaccaacatcctgaagctggaggacgacaccaattgctcgttgagcagcatcgaagaggatttcttgacggcctctgaacacctcgaggaggaatcagaagtggacgagagtaggaacgactatgaaaacatcaacgtgtcggccaacgtgctggaaagcaagcaattgaaaggcgcaacccaagtcgaatggaattgcaacaaagagaagtggttatacgcccttgaagacaaatacatcaataagtaccccacacctctgattaaaaccgaaaggagcccagaaaacctcactaaaaacactgcactacagtcactcgacccaagcgccaagccatcacagtggaagagggaggcggtgggtaatgggaggcaggctacccattattaccatagcgaggccttcaaaggacagatggagaaatcccaagctctatacattccgaaggacgcttacttctctatgatggacaaagacgttccatcagcatgcgccgtggcagaacagaggtctaatttgaatcccggtgaccatgaggacacaaggaatgcactacctcctaggcaggatggcgaagtgacaacagggaagtacgccacaaatttggccgagtccgttctgcaagatgccttcatcaggttgtcccaatcacagtccacattgccccaagaaagtgcggtaagcgtctcggtggggtcttccttgcttccttcatgctatagcactaaagatacagtcgtgagcagaagctggaatgagctccccaaaattgtggtggtgcagtcccctgatggctctgacgccgcaccccagccgggaatctcctcttggccagagatggaagtgtcggttgaaacttcttctatcttaagcggggaaaactcttctcgacaacctcagtcagcgttagaggtggcactcgcatgtgccgcaacagtcatcgggacgataagctctcctcaggccactgagagactgaagatggagcaggtagtaagtaattttccgccagggagtagtggggctcttcagacacaagcccctcaagggctaaaggaaccctccattaacgaatacagctttccgtctgcactctgtggaatgacccaggttgcaagtgcagtcgcggtctgcggcctgggtgaaagggaggaggtcacatgctctgtggcaccgagcggctctcttccaccggctgcagaagcctctgaggcgatgcctccgctatgtggactcgcatctatggaactggggaaggaagcaatagccaaaggactgttgaaggaggcggctttggtgctgacccggccaaacacttatagttcgatcggggacttcttggactccatgaaccgcaggattatggaaacagcttccaaaagccaaaccttgtgttcggagaatgtggtacgtaatgaacttgcccatacactgtcaaacgtaatacttcgacactctatcgacgaggtgcatcataagaatatgatcattgatcccaacgacaacaggcactccagcgaaatacttgacacgctgatggagtcgactaaccagctgttgcttgatgtaatctgctttacctttaaaaagatgagccatatcgttaggcttggagagtgccccgctgtgctcagcaaggaaaccatccgaaggcgagaaacagaacctagctgccagccaagtgatccaggggcaagccaggcctggactaaggcaaccgagtcctcaagttcaagtccactgtcaaactcgcacaacactagccttgtgattaacaatctagtcgacggcatgtattccaagcaagacaaaggaggcgttagacctgggctgttcaagaatccgactctgcagtcacaactgagtcggtcccacagggtgcctgattcttccactgctactacctcctcgaaagagatctatctgaagggcattgccggagaggatacgaagagtcctcaccactcagagaacgaatgtcgcgcaagctccgaaggtcagcgttcccccacggtgtctcagtcccgtagtggttcccaggaagctgaagagtctatccacccaaacacccaggaaaaatacaactgcgctacatctaggatcaatgaggtgcaagtgaacctgagcctcttaggagatgacttattgctgcccgctcagtctacgctgcagaccaagcacccagatatatattgcattactgatttcgctgaagagctcgcagataccgtagtcagtatggctacagagatcgctgccatatgcctagacaacagcagtggcaagcagccgtggttttgcgcctggaaacgtggcagcgaattcctcatgacccccaacgtaccgtgcagaagcctcaaaagaaaaaaggagagccaaggatcagggactgccgtgcggaagcacaagccccctagattgagcgagattaaacgtaaaacggatgagcacccagagcttaaagagaaattgatgaaccgggtcgtggatgaatccatgaacttggaggacgtgccagacagcgtgaacctgttcgcaaatgaagtcgcagccaaaattatgaaccttaccgaattctccatggtcgacggaatgtggcaggcgcaggggtacccacggaaccgtctcctgagcggggatagatggtcacggctcaaggcatcttcttgcgagtccattccagaggaggattccgaagccagggcgtatgttaacagtttgggactcatgagtacattaagtcaacccgttagcagggctagctctgtgtccaaacagagctcctgcgagagtattaccgacgagttcagcaggttcatggtgaaccagatggagaatgagggtcgcggattcgagttgcttctggactattatgctggtaagaacgcttctagtatcctaaattctgccatgcagcaagcctgcagaaaaagcgatcacctctccgtgagacctagttgtccctccaaacagtcaagtaccgagagcatcacagaggaattctatcgctatatgctgagagacatagaacgtgatagtcgagaatctgcatcgtccagaaggtcctcacaagattggaccgctgggctactgagcccttccttacggtcccctgtttgccatagacaaagcagtatgccagacagccggtcaccctgtagccgcctcacggtgaacgtgcctattaaggctaacagcctcgacggatttgcccaaaattgtcctcaggacttcctgagcgtgcaaccagtgtcatccgccagctcttccgggctgtgtaagagcgattcttgcctttatcgcagaggaggcacagaccacattaccaatatgctgatccatgagacatgggctagctcaattgaggctctgatgaggaagaataagattattgttgacgatgcggaggaggccgacacggaacctgtgagtggcggaagccctagccaagccgagaaatgcgctaaccgactcgccgcttcgcgtatgtgttcagggccaaccttgttggtgcaggaaagtcttgactgccctcgaaaagattcggtcaccgagtgcaaacagcctcccgtgtcttctctgtccaagaccgcatctctgacaaaccacagccccctggatagtaagaaagagacaagttcctgccaggatccagtgcccatcaaccacaaacgcaggtcattatgcagcagggaggtgcccctgatacaaattgaaactgatcagagggaggcctgcgctggggagcctgaaccctttctgtctaagagttctcttctggaagaggctgagggacacagcaatgataaaaatataccggatgtcgttcgaggcggagacaccgccgtttctgcgtgtcagatccacagcgacagcctggacaccagagatgtgcctgaagcagaggcgtctactgaagctcgcgcacccgatgaggcacctaatccgccaagctcatccgaagagtcaaccggatcatggacacagctggcaaacgaggaggacaatccggacgacacaagtagtttcctgcaactaagtgaacgctcgatgagcgagctcgtggaagagaagaagattctgaaaggacaaagcgagtcaactgaggcaccggcttcaggcccacccacggggaccgcttctccccagcgctctttgctcgtgatcaatttcgacctcgaacctgagtgcccagatgccgagctgagggctaccctgcagtggattgctgccagtgaattaggaataccaaccatctactttaagaagtctcaggaaaatcgaattgagaagttcctagacgtcgtccagcttgtgcataggaaatcgtggaaggttggcgacattttccatgccgtcgtgcaatattgcaagatgcacgaggagcagaaagatgggagactgtctttattcgattggctgttagagctaggcta

SEQ ID NO: 219337 - DNA, 6804 bp, Artificial Sequence
  derived and/or modified sequence
gtctttcttctctgggcgcccaccaacaatggatggcaactccctgctctcggtaccaagcaacttggagtcatcacggatgtatgacgttttggaaccgcagcagggcagaggctgtggcagctcaggaagcggcccggggaactccatcacagcctgtaagaaggttcttcgcagcaatagcctgctggagtcaacagactactggttgcagaatcagaggatgccctgccaaattggttttgtagaagacaagtctgaaaactgtgcttctgtctgctttgtgaatcttgatgtgaacaaggatgaatgcagcacagagcacctgcaacagaaactggtcaacgtttcaccagatcttccaaaacttatcagttccatgaatgtccaacaaccaaaagaaaatgaaattgttgtcctaagtgggttagcctctggaaatctccaggcagattttgaagtttcacagtgcccttggctgccagatatctgcttggtccaatgtgcaagagggaacagaccaaacagtaccaactgcatcatctttgaaatcaacaaatttctgattggtctggaactggtgcaggagcgacagctccacctggaaacaaacatcttgaaactggaggatgacacgaactgttccttatcttcaatcgaggaagactttctcaccgcttctgagcacttggaggaggaaagcgaggtggatgaatctaggaacgattatgaaaatataaatgtctcagccaatgttttggaaagtaaacagctaaagggagccacccaggtggaatggaattgcaacaaggaaaagtggctttatgctttggaagacaaatacatcaacaaatatcccacaccattgattaaaacagaacgatctccagaaaacctaacaaagaacacagccttgcagagtctagatccctcagccaagccatcacagtggaaaagagaagctgtggggaatgggagacaagccacacattattatcattcagaagcttttaaaggtcaaatggaaaaatcacaggcactgtatattccaaaagatgcttatttctccatgatggataaagatgtaccttctgcatgtgctgtggcagagcagagaagcaacctaaacccaggagaccatgaagacacaagaaacgctctccctcctagacaagatggagaagtcaccactggcaagtatgctacaaatttagcagaatccgtgctgcaggatgcatttattagattatctcaatctcagtccacattaccccaggaatctgcagtcagtgtttctgtaggaagttctctgcttcccagttgctattccacaaaagatacagtggtttctcggtcatggaatgagctccccaaaatcgtcgttgttcagagtccagatggcagtgatgctgccccacagccaggcatctcctcctggcctgagatggaagtctctgttgaaacctcaagcatcctctctggagagaactccagcagacaaccccagagtgctctagaagtggcgttagcttgtgcagccactgtgattggaactatttccagtccacaggccacagaaagactcaaaatggagcaagtggtctcgaactttcccccagggagcagtggtgcactgcaaactcaagcaccccaaggactcaaggaaccttccatcaatgagtactcctttccatctgctttgtgtggcatgactcaggtggccagtgccgtggctgtctgtggtctgggtgaaagagaagaggtgacatgctcagtggctccaagtggtagcctcccgcctgcagctgaggcttctgaagccatgcccccactttgtggtttagcaagcatggagcttggcaaggaagccattgccaagggattgctcaaggaggctgctctggttttaacaaggcctaatacctacagcagcattggagactttctggactccatgaacaggagaatcatggaaactgcttcaaagtctcagaccctgtgctcagaaaatgtcgtcaggaatgaactggcacataccctgtccaatgttatcctgaggcattccattgatgaagttcaccacaaaaatatgataatcgaccccaatgacaacaggcattcatctgaaattctggacaccttaatggaaagtacaaatcaactgcttttagatgtgatatgcttcacgttcaagaagatgagtcatattgtacggcttggtgaatgtcctgctgtcctttctaaggagaccatcagaaggagggagacagaaccaagctgccagccatctgatccgggtgctagtcaagcttggacaaaagccactgaatcctccagcagctctccacttagcaattcacacaacacgagtcttgtcatcaacaatcttgtggatggcatgtattcaaaacaagacaagggtggagtgaggccaggcctcttcaagaaccccacgctgcagtcacaattatcacgtagtcacagagtgcccgattcttcaactgctacaacatcctccaaggaaatatatctgaaaggaatagcaggagaggatacaaaaagccctcatcacagtgagaatgaatgcagagcctcttccgaaggacaaaggtccccaacggtcagccagtccagaagtggttcccaggaggctgaggagagtatccacccaaacacccaagaaaagtacaactgtgccacatctcgcatcaacgaagttcaagtcaacctgtccttgttaggggatgacctgctgcttcctgctcaatccacgcttcaaacaaagcatccagacatctactgcattacagactttgcggaagaattagcagacacggtcgtctccatggcaactgaaattgcagcgatttgccttgacaactccagtggaaaacaaccctggttttgtgcatggaaaagagggagtgagtttctgatgacacccaacgtaccctgccgatccttgaagaggaagaaagagagccaggggagcgggaccgctgtgaggaaacacaagcctccccggctcagtgagatcaagaggaagacggacgagcaccctgagcttaaagaaaagctgatgaacagggttgtggatgagtccatgaaccttgaagatgtcccagattctgtcaatctttttgccaatgaagtggcagccaagatcatgaacctaacggagttctctatggtggacggcatgtggcaggcgcagggctatccccggaatcggttactgagtggcgacaggtggagccggctgaaggcctccagctgcgaaagcattcctgaggaagactccgaggccagggcctatgtcaacagcctgggcttaatgagcacgctgagccagccggtcagcagggccagctctgtctccaagcagtcgagctgtgagagcatcaccgatgagttttccaggttcatggtgaaccagatggaaaatgaagggagaggatttgagttactgctggattactatgctggcaagaacgccagcagcattctgaactcagccatgcaacaggcgtgccggaaaagtgaccacctcagtgtgaggcctagctgtccctctaagcagtccagcacagagagcatcactgaggagttctacaggtacatgctgagggacatcgaaagagacagcagagaaagtgcctcctccagacggagcagccaggattggacagccggcctgctgtctccttctctgcgatccccagtgtgccacagacagtcgtccatgccagacagcagatccccatgctccaggctgacagtgaatgtgcccatcaaagccaactctttagatggctttgctcagaactgcccacaagatttcctaagcgtgcagccggtcagtagcgcgtcctcatccggtctctgcaaatctgactcttgcttgtatcggagaggtgggactgaccacatcaccaacatgttaattcatgaaacgtgggctagctccattgaggctctcatgcgcaagaacaaaatcattgtggatgatgcagaggaagctgacactgagcctgtttctggtggctctccctcgcaagcagagaagtgtgcaaatagattagctgcgagcaggatgtgcagtgggccaactctgcttgttcaggagtctctcgattgcccgaggaaagactctgttaccgaatgtaaacagcccccagtgtcatctttgagcaaaactgcttctcttacaaaccacagccctttagattctaaaaaagaaacttcctcgtgccaggaccctgtaccaataaaccacaaaaggcgatcactttgctcgagggaagtgcctttgattcagattgaaacagatcagagagaagcctgtgctggggaacctgaacccttcctttccaaaagcagcctcctagaggaagcagaagggcattcgaatgacaaaaacatcccagatgtggtgagaggtggagacacagccgtgagcgcttgtcaaatccatagtgacagccttgataccagagatgtaccagaggctgaagcctccacagaagccagagcccccgatgaggcccccaaccctccaagcagcagcgaggagagcacaggcagctggacccagcttgccaatgaggaagacaacccagatgacacaagtagctttctccagctcagtgagcgatccatgagtgaattagtagaagaaaagaagattcttaaaggacagtcagaaagcacagaggcacctgcatctggaccgcctacgggaacagccagcccccagaggagcctgctggtgatcaactttgacctggagccagagtgtccagatgccgagctccgagccactctgcagtggatagctgcctctgaactggggattcccaccatctactttaagaaatctcaggaaaacagaattgaaaagtttctagatgtcgtgcagctggttcatcggaagtcctggaaagtgggtgatatcttccatgcagttgtccagtactgcaaaatgcatgaggagcagaaggatgggagactgagtctctttgactggctcttggaactgggataataaggcagtctgccgtatagatcattccttccctttattccaacttagattacagtggtttgttctaaatgctctaaacattctcaaaacatcacatcacattagcagaactataaaaaaaaatctgctactcagatccactgcatacagaataagtcagaggaaaagcaaaatataggtctgtccaaattcatacaacttgtgggtgagttccaaagagcttggattagaagggctggacaaagagagaattcaatggggcccaaattagaatgcttataatgagacccaatctccaggaaaacaacactcacataagtttaatcatataaaatgatttgtaatgtctctaattagatgaatcaactagaaacaaactcagtggtcaaaataatttttaagagtattccgtaacctatattttacttttctgattatattaaggggctgccagcccggagaaatacttaagatatgggtgagaaatccccagacttttatacaaaagatttccactttcaaatcaatgtcagtagacattgataaaagtatagcagcatcctctactgaggtgatttcatttattccctgcagcccactgataaatatctcacttctcccaaatagtatgtggactcccagctaagcagaaaactattgtcattcaactgaagaagaggaagataaaagattgtcttgtttccatcactgtattacttgtgtaacatgattacataattcttatcctaagagaaagctttcatatttaaaaaaaagtcttttcagataaaatctgcttgtgtcttgaataatatgaaatacaaactttcactttattttattgtaaattataaagagattattgtcttaaataatatattgagttagcttcaagcttcctaaaatatgaagagattgttgtctaaagtcacatattgacattgagctcagtggcctgtttcatcacgtatgtgctgctacctgtacagcagacatgccgctccagtgacatttataatgacagaagcagggtaatggtcttgtgtttgacatgatcagttaggatcatagactttccctgactcgtagatattagccttgaattgggggaaaagaagactttgacacattttagttattttaataacagagatttactcttttgaaaaataaaggtatctaatgtctccctaataagtcttctttccttccaactaaatgacctacacggacttttattttcttgatcaaagaggtgtttattaaggacttctggataactatacttttactctatttttaaagatcacaaagtaattttaaatgtgaacaggttcccataccatgaatgctggcctcaccttctctatcatccacattttgaaatgcaaagaaagctcccttgtaagccatacttccttccccactcccatcctaggatacttgcccagtgctcattaggcatttcttattcagatagtccaaatttaggttattatgcttaatttgacacattaactaaatgcccagttttaaaatatatccatcaattcacgctgaaatgtgcttctttgtgctatcaaatggaatagaatacacttattttttaaacaatcccagaatactgtgtgtagacttttgttgtgctcaaataaatgtttacttatcttacaaagctcaaatactggattgtaaccatgtgatgaagttatctatgttgtacctaacattgcaaattaatcaataaatctctgttgtca

SEQ ID NO: 219338 - protein, 2136 aa, Artificial Sequence
  derived and/or modified sequence
MSRSRHARPSRLVRKEDVNKKKKNSQLRKTTKGANKNVASVKTLSPGKLKQLIQERDVKKKTEPKPPVPVRSLLTRAGAARMNLDRTEVLFQNPESLTCNGFTMALRSTSLSRRLSQPPLVVAKSKKVPLSKGLEKQHDCDYKILPALGVKHSENDSVPMQDTQVLPDIETLIGVQNPSLLKGKSQETTQFWSQRVEDSKINIPTHSGPAAEILPGPLEGTRCGEGLFSEETLNDTSGSPKMFAQDTVCAPFPQRATPKVTSQGNPSIQLEELGSRVESLKLSDSYLDPIKSEHDCYPTSSLNKVIPDLNLRNCLALGGSTSPTSVIKFLLAGSKQATLGAKPDHQEAFEATANQQEVSDTTSFLGQAFGAIPHQWELPGADPVHGEALGETPDLPEIPGAIPVQGEVFGTILDQQETLGMSGSVVPDLPVFLPVPPNPIATFNAPSKWPEPQSTVSYGLAVQGAIQILPLGSGHTPQSSSNSEKNSLPPVMAISNVENEKQVHISFLPANTQGFPLAPERGLFHASLGIAQLSQAGPSKSDRGSSQVSVTSTVHVVNTTVVTMPVPMVSTSSSSYTTLLPTLEKKKRKRCGVCEPCQQKTNCGECTYCKNRKNSHQICKKRKCEELKKKPSVVVPLEVIKENKRPQREKKPKVLKADFDNKPVNGPKSESMDYSRCGHGEEQKLELNPHTVENVTKNEDSMTGIEVEKWTQNKKSQLTDHVKGDFSANVPEAEKSKNSEVDKKRTKSPKLFVQTVRNGIKHVHCLPAETNVSFKKFNIEEFGKTLENNSYKFLKDTANHKNAMSSVATDMSCDHLKGRSNVLVFQQPGFNCSSIPHSSHSIINHHASIHNEGDQPKTPENIPSKEPKDGSPVQPSLLSLMKDRRLTLEQVVAIEALTQLSEAPSENSSPSKSEKDEESEQRTASLLNSCKAILYTVRKDLQDPNLQGEPPKLNHCPSLEKQSSCNTVVFNGQTTTLSNSHINSATNQASTKSHEYSKVTNSLSLFIPKSNSSKIDTNKSIAQGIITLDNCSNDLHQLPPRNNEVEYCNQLLDSSKKLDSDDLSCQDATHTQIEEDVATQLTQLASIIKINYIKPEDKKVESTPTSLVTCNVQQKYNQEKGTIQQKPPSSVHNNHGSSLTKQKNPTQKKTKSTPSRDRRKKKPTVVSYQENDRQKWEKLSYMYGTICDIWIASKFQNFGQFCPHDFPTVFGKISSSTKIWKPLAQTRSIMQPKTVFPPLTQIKLQRYPESAEEKVKVEPLDSLSLFHLKTESNGKAFTDKAYNSQVQLTVNANQKAHPLTQPSSPPNQCANVMAGDDQIRFQQVVKEQLMHQRLPTLPGISHETPLPESALTLRNVNVVCSGGITVVSTKSEEEVCSSSFGTSEFSTVDSAQKNFNDYAMNFFTNPTKNLVSITKDSELPTCSCLDRVIQKDKGPYYTHLGAGPSVAAVREIMENRYGQKGNAIRIEIVVYTGKEGKSSHGCPIAKWVLRRSSDEEKVLCLVRQRTGHHCPTAVMVVLIMVWDGIPLPMADRLYTELTENLKSYNGHPTDRRCTLNENRTCTCQGIDPETCGASFSFGCSWSMYFNGCKFGRSPSPRRFRIDPSSPLHEKNLEDNLQSLATRLAPIYKQYAPVAYQNQVEYENVARECRLGSKEGRPFSGVTACLDFCAHPHRDIHNMNNGSTVVCTLTREDNRSLGVIPQDEQLHVLPLYKLSDTDEFGSKEGMEAKIKSGAIEVLAPRRKKRTCFTQPVPRSGKKRAAMMTEVLAHKIRAVEKKPIPRIKRKNNSTTTNNSKPSSLPTLGSNTETVQPEVKSETEPHFILKSSDNTKTYSLMPSAPHPVKEASPGFSWSPKTASATPAPLKNDATASCGFSERSSTPHCTMPSGRLSGANAAAADGPGISQLGEVAPLPTLSAPVMEPLINSEPSTGVTEPLTPHQPNHQPSFLTSPQDLASSPMEEDEQHSEADEPPSDEPLSDDPLSPAEEKLPHIDEYWSDSEHIFLDANIGGVAIAPAHGSVLIECARRELHATTPVEHPNRNHPTRLSLVFYQHKNLNKPQHGFELNKIKFEAKEAKNKKMKASEQKDQAANEGPEQSSEVNELNQIPSHKALTLTHDNVVTVSPYALTHVAGPYNHWV

SEQ ID NO: 219339 - DNA, 6411 bp, Artificial Sequence
  derived and/or modified sequence
atgagcagaagcagacacgccagacccagcagactggtgagaaaggaggacgtgaacaagaagaagaagaacagccagctgagaaagaccaccaagggcgccaacaagaacgtggccagcgtgaagaccctgagccccggcaagctgaagcagctgatccaggagagagacgtgaagaagaagaccgagcccaagccccccgtgcccgtgagaagcctgctgaccagagccggcgccgccagaatgaacctggacagaaccgaggtgctgttccagaaccccgagagcctgacctgcaacggcttcaccatggccctgagaagcaccagcctgagcagaagactgagccagccccccctggtggtggccaagagcaagaaggtgcccctgagcaagggcctggagaagcagcacgactgcgactacaagatcctgcccgccctgggcgtgaagcacagcgagaacgacagcgtgcccatgcaggacacccaggtgctgcccgacatcgagaccctgatcggcgtgcagaaccccagcctgctgaagggcaagagccaggagaccacccagttctggagccagagagtggaggacagcaagatcaacatccccacccacagcggccccgccgccgagatcctgcccggccccctggagggcaccagatgcggcgagggcctgttcagcgaggagaccctgaacgacaccagcggcagccccaagatgttcgcccaggacaccgtgtgcgcccccttcccccagagagccacccccaaggtgaccagccagggcaaccccagcatccagctggaggagctgggcagcagagtggagagcctgaagctgagcgacagctacctggaccccatcaagagcgagcacgactgctaccccaccagcagcctgaacaaggtgatccccgacctgaacctgagaaactgcctggccctgggcggcagcaccagccccaccagcgtgatcaagttcctgctggccggcagcaagcaggccaccctgggcgccaagcccgaccaccaggaggccttcgaggccaccgccaaccagcaggaggtgagcgacaccaccagcttcctgggccaggccttcggcgccatcccccaccagtgggagctgcccggcgccgaccccgtgcacggcgaggccctgggcgagacccccgacctgcccgagatccccggcgccatccccgtgcagggcgaggtgttcggcaccatcctggaccagcaggagaccctgggcatgagcggcagcgtggtgcccgacctgcccgtgttcctgcccgtgccccccaaccccatcgccaccttcaacgcccccagcaagtggcccgagccccagagcaccgtgagctacggcctggccgtgcagggcgccatccagatcctgcccctgggcagcggccacaccccccagagcagcagcaacagcgagaagaacagcctgccccccgtgatggccatcagcaacgtggagaacgagaagcaggtgcacatcagcttcctgcccgccaacacccagggcttccccctggcccccgagagaggcctgttccacgccagcctgggcatcgcccagctgagccaggccggccccagcaagagcgacagaggcagcagccaggtgagcgtgaccagcaccgtgcacgtggtgaacaccaccgtggtgaccatgcccgtgcccatggtgagcaccagcagcagcagctacaccaccctgctgcccaccctggagaagaagaagagaaagagatgcggcgtgtgcgagccctgccagcagaagaccaactgcggcgagtgcacctactgcaagaacagaaagaacagccaccagatctgcaagaagagaaagtgcgaggagctgaagaagaagcccagcgtggtggtgcccctggaggtgatcaaggagaacaagagaccccagagagagaagaagcccaaggtgctgaaggccgacttcgacaacaagcccgtgaacggccccaagagcgagagcatggactacagcagatgcggccacggcgaggagcagaagctggagctgaacccccacaccgtggagaacgtgaccaagaacgaggacagcatgaccggcatcgaggtggagaagtggacccagaacaagaagagccagctgaccgaccacgtgaagggcgacttcagcgccaacgtgcccgaggccgagaagagcaagaacagcgaggtggacaagaagagaaccaagagccccaagctgttcgtgcagaccgtgagaaacggcatcaagcacgtgcactgcctgcccgccgagaccaacgtgagcttcaagaagttcaacatcgaggagttcggcaagaccctggagaacaacagctacaagttcctgaaggacaccgccaaccacaagaacgccatgagcagcgtggccaccgacatgagctgcgaccacctgaagggcagaagcaacgtgctggtgttccagcagcccggcttcaactgcagcagcatcccccacagcagccacagcatcatcaaccaccacgccagcatccacaacgagggcgaccagcccaagacccccgagaacatccccagcaaggagcccaaggacggcagccccgtgcagcccagcctgctgagcctgatgaaggacagaagactgaccctggagcaggtggtggccatcgaggccctgacccagctgagcgaggcccccagcgagaacagcagccccagcaagagcgagaaggacgaggagagcgagcagagaaccgccagcctgctgaacagctgcaaggccatcctgtacaccgtgagaaaggacctgcaggaccccaacctgcagggcgagccccccaagctgaaccactgccccagcctggagaagcagagcagctgcaacaccgtggtgttcaacggccagaccaccaccctgagcaacagccacatcaacagcgccaccaaccaggccagcaccaagagccacgagtacagcaaggtgaccaacagcctgagcctgttcatccccaagagcaacagcagcaagatcgacaccaacaagagcatcgcccagggcatcatcaccctggacaactgcagcaacgacctgcaccagctgccccccagaaacaacgaggtggagtactgcaaccagctgctggacagcagcaagaagctggacagcgacgacctgagctgccaggacgccacccacacccagatcgaggaggacgtggccacccagctgacccagctggccagcatcatcaagatcaactacatcaagcccgaggacaagaaggtggagagcacccccaccagcctggtgacctgcaacgtgcagcagaagtacaaccaggagaagggcaccatccagcagaagccccccagcagcgtgcacaacaaccacggcagcagcctgaccaagcagaagaaccccacccagaagaagaccaagagcacccccagcagagacagaagaaagaagaagcccaccgtggtgagctaccaggagaacgacagacagaagtgggagaagctgagctacatgtacggcaccatctgcgacatctggatcgccagcaagttccagaacttcggccagttctgcccccacgacttccccaccgtgttcggcaagatcagcagcagcaccaagatctggaagcccctggcccagaccagaagcatcatgcagcccaagaccgtgttcccccccctgacccagatcaagctgcagagataccccgagagcgccgaggagaaggtgaaggtggagcccctggacagcctgagcctgttccacctgaagaccgagagcaacggcaaggccttcaccgacaaggcctacaacagccaggtgcagctgaccgtgaacgccaaccagaaggcccaccccctgacccagcccagcagcccccccaaccagtgcgccaacgtgatggccggcgacgaccagatcagattccagcaggtggtgaaggagcagctgatgcaccagagactgcccaccctgcccggcatcagccacgagacccccctgcccgagagcgccctgaccctgagaaacgtgaacgtggtgtgcagcggcggcatcaccgtggtgagcaccaagagcgaggaggaggtgtgcagcagcagcttcggcaccagcgagttcagcaccgtggacagcgcccagaagaacttcaacgactacgccatgaacttcttcaccaaccccaccaagaacctggtgagcatcaccaaggacagcgagctgcccacctgcagctgcctggacagagtgatccagaaggacaagggcccctactacacccacctgggcgccggccccagcgtggccgccgtgagagagatcatggagaacagatacggccagaagggcaacgccatcagaatcgagatcgtggtgtacaccggcaaggagggcaagagcagccacggctgccccatcgccaagtgggtgctgagaagaagcagcgacgaggagaaggtgctgtgcctggtgagacagagaaccggccaccactgccccaccgccgtgatggtggtgctgatcatggtgtgggacggcatccccctgcccatggccgacagactgtacaccgagctgaccgagaacctgaagagctacaacggccaccccaccgacagaagatgcaccctgaacgagaacagaacctgcacctgccagggcatcgaccccgagacctgcggcgccagcttcagcttcggctgcagctggagcatgtacttcaacggctgcaagttcggcagaagccccagccccagaagattcagaatcgaccccagcagccccctgcacgagaagaacctggaggacaacctgcagagcctggccaccagactggcccccatctacaagcagtacgcccccgtggcctaccagaaccaggtggagtacgagaacgtggccagagagtgcagactgggcagcaaggagggcagacccttcagcggcgtgaccgcctgcctggacttctgcgcccacccccacagagacatccacaacatgaacaacggcagcaccgtggtgtgcaccctgaccagagaggacaacagaagcctgggcgtgatcccccaggacgagcagctgcacgtgctgcccctgtacaagctgagcgacaccgacgagttcggcagcaaggagggcatggaggccaagatcaagagcggcgccatcgaggtgctggcccccagaagaaagaagagaacctgcttcacccagcccgtgcccagaagcggcaagaagagagccgccatgatgaccgaggtgctggcccacaagatcagagccgtggagaagaagcccatccccagaatcaagagaaagaacaacagcaccaccaccaacaacagcaagcccagcagcctgcccaccctgggcagcaacaccgagaccgtgcagcccgaggtgaagagcgagaccgagccccacttcatcctgaagagcagcgacaacaccaagacctacagcctgatgcccagcgccccccaccccgtgaaggaggccagccccggcttcagctggagccccaagaccgccagcgccacccccgcccccctgaagaacgacgccaccgccagctgcggcttcagcgagagaagcagcaccccccactgcaccatgcccagcggcagactgagcggcgccaacgccgccgccgccgacggccccggcatcagccagctgggcgaggtggcccccctgcccaccctgagcgcccccgtgatggagcccctgatcaacagcgagcccagcaccggcgtgaccgagcccctgaccccccaccagcccaaccaccagcccagcttcctgaccagcccccaggacctggccagcagccccatggaggaggacgagcagcacagcgaggccgacgagccccccagcgacgagcccctgagcgacgaccccctgagccccgccgaggagaagctgccccacatcgacgagtactggagcgacagcgagcacatcttcctggacgccaacatcggcggcgtggccatcgcccccgcccacggcagcgtgctgatcgagtgcgccagaagagagctgcacgccaccacccccgtggagcaccccaacagaaaccaccccaccagactgagcctggtgttctaccagcacaagaacctgaacaagccccagcacggcttcgagctgaacaagatcaagttcgaggccaaggaggccaagaacaagaagatgaaggccagcgagcagaaggaccaggccgccaacgagggccccgagcagagcagcgaggtgaacgagctgaaccagatccccagccacaaggccctgaccctgacccacgacaacgtggtgaccgtgagcccctacgccctgacccacgtggccggcccctacaaccactgggtgtag

SEQ ID NO: 219340 - DNA, 6411 bp, Artificial Sequence
  derived and/or modified sequence
atgtctcgctcacgccacgcaaggccttcaaggctggtgaggaaggaggatgtgaacaaaaaaaagaaaaacagccaactgcgcaagaccacaaagggcgctaacaagaacgtggcgtctgtgaaaacactttctccaggaaaactcaagcaattgattcaggagagagacgtaaagaaaaagacggagcccaagccccccgtgcccgtgaggtctctcctgaccagagccggcgctgccagaatgaacctagatcggacagaggtcctcttccagaatcctgaatctcttacctgtaatggtttcaccatggccctcaggagtacctccctatctagacgactaagccagccaccgctggttgtcgcgaagtccaaaaaggttcccctgtccaaaggactggaaaagcaacacgactgcgactacaaaatcctgcccgctctcggcgtgaagcatagcgagaacgattctgtgcctatgcaggacactcaagtcctgcccgatatcgagacacttattggcgtacagaacccatccttgctcaagggaaaaagccaagaaacaacgcaattttggtcccaacgcgtggaggacagtaagataaacatcccaacacatagtgggccagcggctgaaatcctgcctgggcccctggaagggacccgatgtggcgagggactcttctccgaagagacactgaatgatacgtctggttccccaaagatgtttgcccaggatactgtgtgcgcacctttcccccagagggccacccccaaagtcacttcccaaggcaacccgagcattcagctggaggaactcggatcacgagtcgagtccttgaagctcagcgatagctatttggatcccattaagtccgagcacgactgctaccccacatcttctctaaataaagtcattcccgacctaaatctgagaaattgcctcgcgctcggtggctcaacctccccaacatcagtgattaaattcttgttagccggctcaaagcaggccaccctgggggcaaagcctgaccatcaggaagcttttgaagccaccgctaatcaacaggaagtcagcgacacaacatcctttctggggcaggcatttggagctatcccccaccagtgggagcttcccggagctgatcctgtgcacggagaggctctgggtgagacacccgatttgccagagatccctggagcaattcctgtgcagggcgaggtgttcggtacaatattggaccagcaggaaacactcggaatgtctggctccgtcgtgccagatctaccagttttcctcccggttcccccaaatcctatcgctaccttcaatgcaccgagcaaatggcccgagccccagagcactgtgtcctatggtctcgctgtccagggggccattcaaattcttcctctgggatcagggcacacccctcaatccagttccaatagcgagaaaaacagcctccccccggtgatggccatctcaaatgtggagaacgagaaacaagtacacattagtttcctccccgccaacactcagggctttcccctcgctccagagcgaggcctcttccacgcaagccttggcatcgcccagctgagtcaagccgggcccagtaaatccgatcgggggagcagccaggttagcgtgacctccacagtccacgtcgttaatactaccgtcgtgacgatgccggtccccatggtgtccaccagctcatccagttataccaccttgcttcccactctggaaaagaagaagcgcaagcgctgcggcgtatgtgaaccgtgtcagcaaaagaccaattgtggtgagtgtacctactgcaagaatcggaagaacagccatcaaatttgtaagaagagaaagtgtgaggaacttaagaaaaagccaagcgttgttgtccccctggaggtcatcaaagagaataaaaggccccaacgtgagaagaagcctaaggtcctcaaggcagacttcgacaataaacccgtcaatgggccgaagagtgaatcaatggactactcaagatgcgggcacggcgaggaacaaaagcttgagttaaacccacatacagtcgaaaatgtgacaaaaaacgaggacagtatgactggcattgaggtagaaaaatggacacagaataaaaaatcccagctgaccgaccatgttaagggtgattttagtgcgaacgttcctgaggcagaaaagtccaaaaattctgaagtggacaagaagagaacaaagtctcccaagctttttgtccagaccgtgaggaacgggatcaagcacgtccattgtctccctgccgagacgaacgtctcattcaaaaaattcaatatcgaggagttcggaaagacactcgagaacaactcatataagtttctgaaagacacagccaaccacaagaacgctatgtcttctgtagcgacagacatgagttgtgatcacctaaaaggtcggtcgaacgtcctggttttccagcagcctgggttcaattgttcatctataccccattcatcccacagtatcattaatcatcacgcctcaatccacaatgagggggatcagccaaagactccggaaaacataccctcaaaagagccaaaggacgggtcacctgtgcagccttccctactctcgctgatgaaggataggaggctcaccctggaacaggtggtcgcaatcgaagccctgacgcagctgtctgaagccccatccgaaaattcatctcctagcaaaagcgaaaaggatgaggaatccgagcagcgcactgcatccctgctgaactcttgcaaggccattctctatacagtcagaaaggatctccaggatcctaatctccagggtgaacctcccaaacttaatcattgtccatcccttgagaagcaatcttcgtgcaacacagtggtatttaacggccagactacgactctttccaactctcacatcaacagcgcgaccaatcaagcaagcactaagtctcacgagtatagcaaggtgactaactcactcagcctgttcattcctaagagcaacagtagcaagattgatacaaataagtctatagcccaaggcataatcaccctggataattgctcaaacgatctgcatcagctgcctcccagaaacaacgaggtagagtattgcaaccagctgcttgactcatcgaagaagcttgactccgatgatctgtcatgccaggatgctactcacacacaaatcgaggaggacgtcgcaacacagctcacgcagctcgcatcaataatcaaaataaactacatcaagccagaggataagaaggtagagagtactccaacgtccctggtgacctgtaacgtacagcagaaatataaccaggagaagggaaccattcagcagaagccgcccagctccgtgcacaacaaccatggctcttcccttactaaacagaagaatccaacccagaaaaaaactaagtcgaccccgtctagggacaggaggaaaaaaaagcctaccgtcgtttcatatcaagaaaacgaccggcagaaatgggagaagctgtcatacatgtacggaacaatttgtgacatatggatcgctagcaagtttcagaatttcggacagttctgccctcatgattttccaactgtgtttggcaagatctctagctccaccaaaatttggaaacctctcgcccagactcgcagcattatgcagccaaaaacagtcttcccacccctgacgcagattaagctccagcgctatccagaatctgccgaagaaaaggttaaggtggagccattagacagcctttcgttattccaccttaagaccgaatctaacggtaaagctttcactgataaggcctacaattctcaggtgcagctgacagtcaacgcaaaccagaaagctcacccactgactcaacctagttctccccctaatcaatgtgccaacgttatggcaggcgacgaccagatcagattccagcaagtggtgaaagagcagctgatgcaccaacggttaccaacattgcccggcatttctcatgagactcccctgccggaatctgccctgactttgagaaacgtcaacgtagtctgctcgggaggcattactgttgtgtcgacaaaatcggaagaggaagtgtgcagctcctcctttgggacctcagaattcagcaccgtagattccgctcaaaagaacttcaatgactatgctatgaactttttcaccaacccaaccaaaaatctcgtgtcaattaccaaagactctgagcttcctacttgcagctgcctggatagggtgatccagaaggataagggtccatattacacacatctgggggccggcccttccgtggcagcggtgcgtgagattatggaaaaccgatatggccagaaaggaaatgccatacggattgagattgtggtctatacaggcaaagagggaaagtcctcccatggctgtccgatcgcaaagtgggttctgaggagaagctccgatgaagaaaaggtgctgtgcctcgtgcgacagagaactggacatcactgtcccaccgctgtgatggtggtgttgatcatggtgtgggacggcatcccactccctatggctgatcggttatacaccgaacttaccgaaaacttgaaaagttataacggccatccaaccgacagaagatgtacactgaacgaaaaccggacctgcacatgtcagggaatagaccccgagacatgcggcgcttctttttcgtttgggtgttcttggagtatgtattttaacggttgcaaatttggtaggagtccatccccccggcggttccgcatagatccctcctcgccactgcatgagaaaaatcttgaagataatttgcagagtttggctacaaggctcgcgcccatatacaaacagtacgcccccgtggcatatcaaaatcaagttgaatacgaaaatgtcgctagggagtgcagactgggttcaaaggagggacggcctttctctggagtgaccgcctgtctcgacttctgtgcccacccccatcgcgacatccacaacatgaacaatggttccacagtagtgtgcacccttactcgtgaggacaataggtcgctaggcgtcatcccacaggatgagcaattacacgtgcttcctctctataaactttcggatacagacgagtttgggagtaaagaggggatggaggcaaagatcaaatccggagcaattgaggttctcgctccgagacggaagaagcgcacttgtttcacacagccagttcccagatcagggaagaagagggccgcaatgatgactgaggtcctggctcacaaaatccgagcagtggaaaagaaacctatcccaaggatcaagaggaagaataattcgacaacaacaaataattccaagccttcgtcgctgcccacccttggctcaaacaccgagacggttcagccagaggttaaaagcgagaccgaaccacacttcattctcaaatcgagcgacaatactaaaacatatagcctgatgccatccgctcctcatcccgttaaggaggctagtcccggcttcagctggagtcctaagacagcctccgccacacccgccccacttaaaaacgacgcgactgcctcatgcggcttttctgagcgcagctcaactccacattgtacaatgccgtcaggcaggttgagtggagccaatgctgccgctgccgatggccctgggatttctcagctcggcgaggttgctcccttgccaactctcagcgcacctgtgatggagccactgattaattccgagccgtcaactggggtgacagaacctctcacccctcaccagcccaaccaccagccatcattcctgacgtcaccccaggatctggcaagctcacctatggaagaggatgagcaacattccgaggcggatgaaccaccaagtgacgaacccctgtcggacgatccattatcgccagccgaggaaaagctgcctcacatcgatgagtactggtctgatagtgaacatatcttcctggacgcaaacatcggcggcgtggccattgcgccagcccacggctctgttttgatcgagtgtgcccgccgggagctccacgcgacaactccggtggaacatccaaatcgaaatcacccgacacgcctgtcgcttgtgttctaccagcacaagaacttgaacaagccccagcacggcttcgaacttaacaagatcaagttcgaagctaaagaggctaagaataagaagatgaaagcaagtgagcagaaggatcaggccgctaacgagggccctgaacagtcttctgaggtcaacgaactgaaccagattccatctcataaggcacttaccttgacccacgataatgtagtgactgtgtccccatacgcactgactcatgtggccgggccttataaccactgggtttag

SEQ ID NO: 219341 - DNA, 6411 bp, Artificial Sequence
  derived and/or modified sequence
atgagccgcagcagacatgcccggcccagccggctggtgaggaaggaggatgtgaacaagaagaagaagaacagccagctgaggaagaccaccaagggggccaacaagaatgtggcctctgtgaagaccctgagccctgggaagctgaagcagctgatccaggagagagatgtgaagaagaagacagagcccaagccccctgtgcctgtgcgcagcctgctgaccagggctggagctgccaggatgaacctggacagaacagaggtgctcttccagaaccctgagagcctgacctgcaatggcttcaccatggccctgcggagcaccagcctgagccggcggctgagccagccccccctggtggtggccaagagcaagaaggtgcccctgagcaagggcctggagaagcagcacgactgtgactacaagatcctgcctgccctgggcgtgaagcacagtgaaaatgattctgtgcccatgcaggacacccaggtgctgcctgacatcgagaccctgattggagtgcagaaccccagcctgctgaagggcaagagccaggagaccacccagttctggagccagagggtggaggacagcaagatcaacatccccacccacagcggccctgctgctgagatcctgcccggccccctggagggcacccgctgtggggagggcctcttcagcgaggagaccctgaatgacaccagcggcagccccaagatgtttgcccaggacacagtgtgtgcccccttcccccagagggccacccccaaggtgaccagccagggcaaccccagcatccagctggaggagctgggcagccgggtggagagcctgaagctgagtgacagctacctggaccccatcaagtcagaacatgactgctaccccaccagcagcctgaacaaggtgatcccagacctgaacctgaggaactgcctggccctgggcggcagcaccagccccaccagcgtcatcaagttcctgctggccggcagcaagcaggccaccctgggcgccaagccagaccaccaggaggcctttgaggccacagccaaccagcaggaggtgtctgacaccaccagcttcctgggccaggcctttggagccatcccccaccagtgggagctgcctggagctgaccctgtgcatggagaggccctgggggagaccccagacctgcctgagatccctggggccatccctgtgcagggcgaggtgtttggcaccatcctggaccagcaggagaccctgggcatgagcggctctgtggtgcctgacctgcccgtcttcctgcctgtgccccccaaccccatcgccaccttcaatgcccccagcaagtggccagagccccagagcacagtgtcctatggcctggccgtgcagggcgccatccagatcctgcccctgggcagcggccacaccccccagagcagcagcaacagcgagaagaacagcctgccccctgtgatggccatcagcaatgtggagaatgagaagcaggtgcacatctccttcctgcctgccaacacccagggcttccccctggcccctgagcggggcctcttccacgccagcctgggcatcgcccagctgagccaggccggccccagcaagagtgaccggggcagcagccaggtgtctgtgaccagcacagtgcacgtggtgaacaccaccgtggtgaccatgcctgtgcccatggtgtccaccagcagcagcagctacaccaccctgctgcccaccctggagaagaagaagaggaagagatgtggggtgtgtgagccctgccagcagaagaccaactgtggagaatgtacctactgcaagaacaggaagaacagccaccagatctgcaagaagaggaaatgtgaggagctgaagaagaagcccagcgtggtggtgcccctggaggtgatcaaggagaacaagaggccccagcgggagaagaagcccaaggtgctgaaggctgactttgacaacaagcctgtgaatggccccaagtctgagagcatggactacagccgctgtggccatggagaggagcagaagctggagctgaacccccacacagtggagaatgtgaccaagaatgaagattccatgactggaattgaggtggagaagtggacccagaacaagaagagccagctgacagaccacgtgaagggggacttcagcgccaacgtgcctgaggccgagaagagcaagaacagcgaggtggacaagaagaggaccaagagccccaagctgtttgtgcagacagtgagaaatggcatcaagcacgtgcactgcctgcctgctgagaccaacgtgtccttcaagaagttcaacatcgaggagtttgggaagaccctggagaacaacagctacaagttcctgaaggacacagccaaccacaagaatgccatgagctctgtggccacagacatgagctgtgaccacctgaagggccgcagcaatgtgctggtgttccagcagcccggcttcaactgcagcagcatcccccacagcagccacagcatcatcaaccaccacgccagcatccacaatgaaggagaccagcccaagaccccagagaacatccccagcaaggagcccaaggatggcagccctgtgcagcccagcctgctgagcctgatgaaggaccggcggctgaccctggagcaggtggtggccatcgaggccctgacccagctgtctgaggcccccagcgagaacagcagccccagcaagtctgagaaggatgaggagagcgagcagaggacagccagcctgctgaacagctgcaaggccatcctgtacacagtgaggaaggacctgcaggaccccaacctgcagggcgagccccccaagctgaaccactgccccagcctggagaagcagagcagctgcaacacagtggtgttcaacggccagaccaccaccctgagcaacagccacatcaacagcgccaccaaccaggccagcaccaagagccatgagtacagcaaggtgaccaacagcctgagcctcttcatccccaagagcaacagcagcaagattgacaccaacaagagcatcgcccagggcatcatcaccctggacaactgcagcaatgacctgcaccagctgcccccaagaaataatgaggtggagtactgcaaccagctgctggacagcagcaagaagctggacagtgatgacctgagctgccaggatgccacccacacccagattgaagaagatgtggccacccagctgacccagctggccagcatcatcaagatcaactacatcaagccagaggacaagaaggtggagagcacccccaccagcctggtgacctgcaatgtgcagcagaagtacaaccaggagaagggcaccatccagcagaagccacccagctctgtgcacaacaaccacggcagcagcctgaccaagcagaagaaccccacccagaagaagaccaagagcacccccagccgggacaggaggaagaagaagcccaccgtggtgtcctaccaggagaatgaccggcagaagtgggagaagctgagctacatgtatggcaccatctgtgacatctggatcgccagcaagttccagaactttggccagttctgcccccatgacttccccaccgtgtttgggaagatcagcagcagcaccaagatctggaagcccctggcccagaccaggagcatcatgcagcccaagacagtgtttcctcccctgacccagatcaagctgcagcgctacccagagagcgctgaggagaaggtgaaggtggagcccctggacagcctgagcctcttccacctgaagacagagagcaatggcaaggccttcacagacaaggcctacaacagccaggtgcagctgactgtgaatgccaaccagaaggcccaccccctgacccagcccagcagcccccccaaccagtgtgccaacgtgatggctggagatgaccagatccgcttccagcaggtggtgaaggagcagctgatgcaccagaggctgcccaccctgcccggcatcagccatgagacccccctgcctgagagcgccctgaccctgagaaatgtgaatgtggtgtgcagcggcggcatcaccgtggtgtccaccaagtctgaggaggaggtgtgcagcagcagctttggcaccagcgagttcagcacagtggacagcgcccagaagaacttcaatgactatgccatgaacttcttcaccaaccccaccaagaacctggtgtccatcaccaaggacagcgagctgcccacctgcagctgcctggacagagtcatccagaaggacaagggcccctactacacccacctgggcgccggccccagcgtggccgctgtgcgggagatcatggagaacagatatggccagaagggaaatgccatccgcatcgagatcgtggtgtacaccgggaaggagggcaagagcagccacggctgccccatcgccaagtgggtgctgcggcgcagcagtgatgaggagaaggtgctgtgcctggtgcggcagaggacaggccaccactgccccacagctgtgatggtggtgctgatcatggtgtgggatggcatccccctgcccatggctgaccggctgtacacagagctgacagagaacctgaagagctacaacggccaccccacagaccggcgctgcaccctgaatgaaaatagaacctgcacctgccagggcatcgaccctgagacctgtggggccagcttctcctttggctgctcctggagcatgtacttcaacggctgcaagtttggccgcagccccagcccccggcgcttcagaattgaccccagcagccccctgcacgagaagaacctggaggacaacctgcagagcctggccacccggctggcccccatctacaagcagtatgcccctgtggcctaccagaaccaggtggagtatgaaaatgtggccagagaatgtcggctgggcagcaaggagggccggcccttctctggagtgacagcctgcctggacttctgtgcccacccccaccgggacatccacaacatgaacaacggcagcacagtggtgtgcaccctgacccgggaggacaacagaagcctgggcgtcatcccccaggatgagcagctgcacgtgctgcccctgtacaagctgagtgacacagatgaatttggcagcaaggagggcatggaggccaagatcaagagcggggccatcgaggtgctggcccccaggaggaagaagaggacctgcttcacccagcctgtgcccaggtctgggaagaagagagctgccatgatgacagaggtgctggcccacaagatccgggctgtggagaagaagcccatcccccgcatcaagaggaagaacaacagcaccaccaccaacaacagcaagcccagcagcctgcccaccctgggcagcaacacagaaacagtgcagcctgaggtgaagtcagaaacagagccccacttcatcctgaagagcagtgacaacaccaagacctacagcctgatgcccagcgccccccaccctgtgaaggaggccagccctggcttctcctggagccccaagacagccagcgccaccccagcccccctgaagaatgatgccacagccagctgtggcttcagcgagaggagcagcaccccccactgcaccatgcccagcggccgcctgagcggggccaatgctgctgctgctgatggccctggcatcagccagctgggggaggtggcccccctgcccaccctgagcgcccctgtgatggagcccctcatcaacagcgagcccagcactggagtgacagagcccctgaccccccaccagcccaaccaccagcccagcttcctgaccagcccccaggacctggccagcagccccatggaggaggatgagcagcacagcgaggctgatgagcccccatctgatgagcccctgagtgatgaccccctgagccctgctgaggagaagctgccccacattgatgagtactggagcgacagcgagcacatcttcctggatgccaacatcggcggcgtggccatcgccccagcccacggctctgtgctgattgaatgtgcccggcgggagctgcacgccaccacccctgtggagcaccccaacagaaaccaccccacccggctgagcctggtgttctaccagcacaagaacctgaacaagccccagcacggctttgagctgaacaagatcaagtttgaggccaaggaggccaagaacaagaagatgaaggccagcgagcagaaggaccaggccgccaatgaaggacctgagcagagcagcgaggtgaatgagctgaaccagatccccagccacaaggccctgaccctgacccatgacaacgtggtgacagtgagcccctatgccctgacccacgtggccggcccctacaaccactgggtgtag

SEQ ID NO: 219342 - DNA, 6411 bp, Artificial Sequence
  derived and/or modified sequence
atgagccggagccggcacgcccggcccagccggctggtgcggaaggaggatgtaaacaagaaaaagaagaattctcaactacgcaagacaactaaaggggctaataagaacgttgcttcggtgaagaccctttctcccggcaagctgaaacagctgatacaggagcgcgacgtgaaaaagaagaccgagccgaagccgcccgtgcctgtgcgatccttgttgacccgcgccggggccgcacgcatgaacctggacaggacagaagtcttgttccaaaaccctgagagtctgacatgcaacggcttcactatggctctccggtctaccagcttaagtcgtaggctgagtcagcctcctctcgtggtagctaagtccaagaaggtgccactgtccaaaggcctcgaaaagcaacatgattgcgattataagattttacctgctctgggggtgaagcactcggagaacgactccgttccaatgcaagacactcaggtgcttcccgatatagagactctgattggcgtccagaacccgtccctcctgaaaggaaagagccaggagactacacagttttggtcccagcgagttgaagattcaaaaatcaacattcccacccattcaggtcccgccgctgaaatcttgccaggcccactggaaggcacccggtgcggagagggtctcttctcagaggagaccctgaatgacaccagcggttctccgaagatgttcgcccaggatactgtatgtgctcccttcccccaacgcgccacaccaaaggttacttcccagggtaacccatcgattcagctggaggagctgggatcccgcgtcgaatccctaaagttatctgacagctaccttgatcccattaagtctgagcatgactgctatccgacttcttcgctcaacaaggttatccccgacctcaacctcaggaactgcttagcactcggtggctccacaagtccgaccagcgtgataaagttcctgctcgcaggaagtaagcaggcaactcttggtgccaagcctgaccaccaggaagcttttgaggcaactgcaaatcagcaggaggtgtctgataccacctcatttttagggcaggcgtttggggctatcccccaccagtgggaactgcctggtgctgatccagttcacggcgaggcccttggagagacacccgaccttccggaaattccaggtgcaatacctgtacagggggaagtctttggtacaatacttgaccagcaagagaccttgggcatgtcaggctcggtggtgcccgatctccctgttttcctcccagttcctccgaatcccatcgctaccttcaatgctccttccaagtggcccgaacctcagtcaaccgtctcatatggcctggccgtgcagggcgcgattcagatcctccccctcgggagcggtcatacaccccaaagctcctctaactcagaaaaaaattcgcttcctcccgttatggctatcagcaacgtggagaacgaaaaacaggtgcacatcagctttctgcccgccaatacacagggattcccactggctcctgaacgagggctatttcatgcttccctgggaatagcgcaactttctcaggccggcccttccaagtctgatagaggatcctcacaagtgtctgttacatcaacggtgcacgtcgtgaataccaccgtggtgacaatgccagtgccaatggtgtccaccagcagctcttcctacactacgctgcttcctacactggaaaagaaaaaaagaaaaaggtgcggggtttgcgaaccttgtcagcaaaagaccaattgtggcgagtgtacctactgtaagaataggaagaatagccaccaaatctgcaagaagaggaaatgcgaggaactcaagaagaagccatctgtggtagtccctttggaagtgattaaggagaacaagcgccctcagcgcgagaagaagcctaaggtcctaaaagccgactttgataacaagcccgttaacggccctaagtctgagtccatggactacagcagatgtggtcatggcgaggagcaaaagctcgagctgaaccctcacaccgtagaaaatgtcaccaagaacgaagacagtatgacaggcattgaggttgagaagtggacacagaacaagaaatcccagctgactgatcatgtgaaaggggacttcagcgccaatgtgcctgaggccgagaagagtaaaaacagcgaagtggataagaaacggacaaaatctcccaagctattcgttcagaccgtacggaatggaattaaacacgtccactgtctgccggccgaaactaacgtctcgttcaagaaattcaatattgaggagtttggcaaaactctggagaataacagttataagtttctaaaagacaccgctaaccataaaaatgccatgtctagcgtggcaactgacatgagctgcgaccatctgaagggccggagtaatgtactcgttttccagcagcccggcttcaattgctcttccataccacactcttctcattccattattaaccaccacgcctccatccacaatgagggcgaccagcctaagacacctgaaaatattccatccaaagagcctaaagatggttcccccgttcaacctagcttactgtcacttatgaaggacaggcggttgacattggaacaggtcgtagctatcgaagcccttactcagctgagtgaagcacctagtgagaattcttccccatccaagagcgagaaagatgaggagagcgagcagcgaactgcatccttgctgaattcctgcaaggcgattctttataccgtgcgaaaagacctgcaagaccctaatctgcagggggaaccaccaaagttgaaccactgccctagcctggaaaaacagagttcttgcaacaccgttgtatttaacggccagacgactaccctcagcaactcccacataaacagcgccaccaaccaggcatcaactaaatcacatgagtattctaaagtaacaaatagcttgagcctttttattccaaagtccaacagcagcaagatcgacacaaacaagagcatcgcgcagggaatcataactctggacaattgcagcaacgacctacatcaacttcctccgcgaaataatgaggtggagtattgtaaccagctgctggactcttcaaaaaagttagattctgacgacctctcgtgccaagacgctacccatacccagattgaagaagacgtcgcaacccagctcacccaactggcatccattattaagattaattacatcaagccggaggataaaaaggtggagagcacaccgacttcactcgtgacatgtaatgtgcagcagaagtacaatcaggagaagggcaccattcagcagaagccgcctagctccgtgcacaataatcacgggtcttcactgaccaagcagaaaaatccaacacaaaaaaaaaccaaatctacaccttcacgcgacagacgcaaaaagaaaccgactgtcgtgtcttatcaggagaacgaccgtcagaagtgggagaaactgagctacatgtacgggacaatatgtgatatctggatagctagtaagttccagaacttcggccagttctgccctcacgacttcccaacagtttttgggaagattagctcctcgaccaaaatttggaaacccttagcccagactcgctccatcatgcaaccaaagacagtctttcccccactcacccagattaaactacagaggtaccctgagtctgctgaagagaaggtgaaagttgaaccgttggacagcctttcactgtttcacttgaagaccgagtctaatgggaaggcattcactgataaggcatacaatagccaggtccagctgaccgtaaacgccaaccaaaaggctcatcccctaacacagccgtcatcaccacctaaccagtgtgccaacgtaatggcgggggatgatcagattagatttcagcaggtggtcaaggagcagctcatgcatcagagactcccaacactcccaggcattagtcatgagacacctttacccgaatccgcactgaccctgaggaatgttaacgttgtgtgcagtgggggaataactgttgtttcgactaagagtgaggaggaagtgtgtagttcaagctttgggacaagcgagttcagcactgtggattcggcccagaaaaactttaatgattacgccatgaacttttttactaatcctacaaaaaatttggtgtcaatcacaaaagatagcgagttgccgacgtgttcctgcctggacagggtgattcagaaggacaaagggccgtactatactcacctgggcgcaggcccatctgtggcagccgtgcgtgaaatcatggagaatagatatggacagaaaggtaatgccattaggatcgaaatcgtggtttacactgggaaagaaggtaaatcttcacatggctgtccaattgcgaaatgggtcctacgccgaagctcagatgaggaaaaagtgctatgcctcgtgcgacagaggactggacaccactgcccaactgcggtgatggtagttttgataatggtctgggatggaatccccctccctatggccgataggctctacactgaattaacggaaaacctgaagagttacaacggtcacccaaccgataggcgctgcaccctgaacgagaacaggacttgcacttgccagggaattgacccagagacctgcggggcaagcttcagtttcgggtgcagttggtcgatgtacttcaatggctgtaaattcggacgatccccttcacctagaagattcaggatcgacccctcatccccactgcacgaaaaaaatctggaagacaacctgcaatcgttggccactcgtcttgcacccatctataagcaatatgctccggtggcctaccagaatcaggtggagtacgagaacgtggcccgggaatgtcgcctgggatctaaggagggaagacccttctccggcgtgaccgcatgtctcgacttctgcgctcacccccaccgagacatccacaatatgaataacggatctactgtggtgtgcacactcacgagagaagataataggagcctgggcgtcataccccaggatgaacaattgcacgttctccccctgtacaagctttcagatacggacgagttcggttccaaggaaggcatggaggccaagattaagtcaggagccattgaggtgctcgctcctcgcagaaagaagaggacttgttttacacaacccgtgccgagaagtgggaaaaaacgggcagctatgatgaccgaggtgcttgcacataagatcagggctgtggaaaagaagcccattccgagaattaaacggaagaacaattccaccaccactaacaattccaagccatcctcccttccaacactggggagtaacacagaaaccgtccagcctgaggtgaagtctgagaccgagcctcactttatccttaagtcctcggataacaccaagacctacagtctcatgccatcggctccgcacccagtgaaggaggcctccccgggttttagctggagccctaaaaccgcgagcgcgacacctgcccccctgaaaaacgacgcgacggcttcctgtggcttctcagagagatcctctacaccgcactgtaccatgccgtcaggaagactcagtggagccaacgcagctgctgccgatggccccgggatctcgcagttgggagaggtcgcacctttgcccacactttcagcaccagttatggaacctctgatcaactccgagccttctacaggggtgaccgagcctctcacgccccaccagcctaaccaccagccgagttttctgaccagcccccaagacctggcgagctcccctatggaggaggatgagcagcactctgaggctgatgaacccccatccgatgaacctctctctgacgatccgctgagcccagctgaagagaagctgcctcacatagacgagtattggtccgattccgagcacatatttctggacgccaatatcggcggagtcgcaatcgcaccagcccatggatcggtgctgattgagtgtgcccggcgtgaattgcatgcgacaacccccgtggaacacccaaatcgcaaccatccaacccgcctgtccctagttttctaccagcacaagaacctcaataagccccaacacgggttcgagctcaataaaatcaagttcgaggccaaggaagccaaaaataagaagatgaaggcgagcgaacagaaagaccaggccgctaatgaaggtcctgagcagagctcagaagtgaacgaactgaatcagatcccctcgcataaggcactcacattaactcacgataacgtggtgacagtgtccccttacgcactcacccacgtggccggcccgtataatcactgggtgtag

SEQ ID NO: 219343 - DNA, 6410 bp, Artificial Sequence
  derived and/or modified sequence
atgagtaggtcccggcatgctcgcccaagtcgtcttgtcagaaaggaagatgtgaacaagaagaaaaagaatagtcagctgcgtaagacaaccaaaggggcaaataaaaacgtggcatccgtgaagaccctgtccccaggcaaactaaaacaactgatccaggagcgcgatgtgaagaaaaagacggagcctaagccaccagtgccagtacgaagcctgctcactcgggcaggtgccgcaaggatgaacctggaccgcactgaagtcctttttcaaaacccagaatcgctgacctgcaacggcttcacaatggctctgagaagtacaagtctgtccaggcgtctgtcacagccaccacttgttgtggcaaagtccaagaaggtgcccctctctaaggggctagagaaacagcacgattgcgattataagatcctcccagcccttggggttaaacactctgaaaacgattcggtaccgatgcaggacactcaggtactgccggacattgagactctaatcggtgttcagaacccatccctcttgaagggcaagtcccaagagactacacagttttggagtcaacgagtcgaagactctaagataaacatccctacccattctggccctgcggcagaaatcctccccggacccttagagggtacacggtgtggagagggtcttttcagcgaggaaaccctgaacgacacctccggctcgcctaaaatgtttgcccaggacacagtttgtgccccttttccacagcgggctacacccaaagtgactagtcagggaaacccatctatccagctcgaggaactgggatccagggtggagagcttgaagttgagcgactcttacttagatcctatcaaatctgaacacgattgctacccgactagtagcctgaataaagtcatccctgatctaaacttacgcaactgtcttgcactcggcggttccacctctcccacctcagtgattaagtttctgcttgccggttcaaagcaggccacactcggcgcaaaacctgatcaccaggaagcctttgaggcgaccgccaatcaacaggaggtctctgacacaacaagttttctgggccaggccttcggggctatccctcatcaatgggagctccctggtgctgaccccgtgcacggggaggcgctcggagaaaccccagacctgcctgaaattcccggtgctatccctgttcaaggcgaagtattcggtactatcctggaccagcaggagacgctcggtatgtcgggcagcgtcgtacccgatctccctgtttttctgccagtgccccctaacccaatcgccaccttcaacgcaccatcaaagtggccggagccgcagagcactgtgagctacggactggccgttcaaggtgccattcagattctgcctttaggaagcggccatacccctcaaagctccagcaatagcgaaaaaaactcactgccacctgtgatggctatttcaaatgttgagaatgagaaacaagtgcatatctccttcctgcctgctaatactcaagggttccccctagctccagaaaggggactgttccatgcaagtttaggcatcgcccaactgtcccaggctggtccaagcaagtcagatcgcggatcttcacaggtcagcgtgaccagcacggtgcacgttgtcaacacaactgttgtcacgatgcccgtgcctatggtgagcacctctagcagttcttatacgaccctgctgcctacgcttgagaaaaaaaagcgcaagaggtgtggagtttgtgaaccctgccagcaaaagacaaactgtggagagtgcacatactgcaagaaccggaaaaactcacatcagatctgtaagaagaggaaatgtgaggagctcaaaaagaagccttccgtcgtggttcccctggaagtgatcaaggagaataaacggccacagagggagaaaaaacccaaggttctcaaggctgattttgataacaagccagtgaacggccctaagtcggagtctatggattacagccgctgcgggcacggggaagagcaaaagcttgaactgaatccacacaccgtcgaaaacgtgaccaagaatgaagactccatgacgggcattgaggtcgagaaatggactcaaaacaaaaaatctcagcttaccgatcatgtgaagggcgacttcagtgccaacgtgcccgaggcagagaagagcaagaatagtgaagtagacaagaagagaaccaagtctcccaagctgttcgtgcaaaccgtgcgaaacggaataaaacacgttcattgcctcccagccgagaccaacgtgagtttcaaaaaattcaacattgaagaattcggaaaaaccctggaaaacaatagctataagtttctgaaagacactgctaatcacaaaaatgcaatgagttcagttgccacagatatgagctgtgaccatctgaaaggccgtagtaacgtgctggtctttcagcaacccggttttaactgcagctccattccccattccagccactctatcataaaccatcatgcctctattcacaacgagggagatcagccgaagacacccgagaatatcccatccaaagagcctaaggatggtagccccgtgcagccatctctgctctccttgatgaaggatagaagattgacactggagcaagtggtggctatagaggcattgacccaattgtcagaagcaccatctgagaatagtagcccatctaaatccgaaaaggacgaggagagcgaacagaggacggcttccctcctcaactcctgcaaggcgattctgtacactgtgcgaaaggatctacaggaccccaacctgcaaggcgaaccacctaaactgaatcattgccctagcctggaaaagcagtcatcttgcaacaccgttgtattcaatggtcagaccacaacccttagcaattcacatatcaatagtgccacaaaccaagccagcaccaaaagccatgaatattctaaggtgaccaactcactgagcctcttcatcccgaaaagcaactccagtaagatcgatactaacaagagcattgcccagggaattatcacattggataattgctccaacgacctgcaccagttgcccccacgaaacaatgaggtcgagtactgtaaccaactgctggactctagcaagaaattggatagcgacgacctctcttgccaagacgccacccacactcagatcgaggaagatgtggcgacacaactgacacagctcgcgtcgatcattaaaattaactatataaaaccagaggataagaaagttgagtccacccctacatccttagtgacttgtaatgttcagcaaaaatataatcaggagaagggaacaattcagcagaagcctcctagctctgtgcataacaaccatggttcttctcttactaagcagaagaatccaacccagaagaaaactaaaagtacgccctcccgggatcgacggaagaagaagcccaccgtggtgtcttaccaagagaacgatagacagaagtgggagaagctgagctacatgtacgggaccatatgtgacatttggattgcctcaaagtttcagaactttggtcagttttgtccacacgacttccccacagtcttcgggaagatcagctcatccaccaaaatttggaagccactggcacagactcgctcaataatgcagcctaaaactgtgtttcctcctctgacccagatcaaattgcagagatatccagaaagtgccgaagagaaggtgaaggtcgaaccattggactctctgagtctgtttcatttgaagacagaatccaatggcaaggcattcaccgataaggcttacaacagccaggtgcagctcacggtcaatgcaaatcagaaggcccacccattgacacagccttcttcccctcctaaccagtgtgctaacgttatggcaggggacgatcagattcgtttccaacaggtggtaaaggaacagcttatgcaccagcgcttacccaccctgccaggcatctcacacgaaactccactccccgaatctgcattaacgttacgcaacgtgaacgtggtatgctccggcggtatcacagttgtgagcacaaagtccgaggaagaggtttgctcttccagctttggcaccagcgagttttctaccgtggacagcgcgcagaagaacttcaatgactacgccatgaatttctttaccaacccgacaaaaaacttggtatcgatcacaaaagatagtgagctgccaacctgcagctgcctagaccgcgtgatacagaaggataagggaccttactacactcacctcggtgctggacccagcgttgcagctgtcagggagattatggaaaacaggtacggccagaaggggaatgcgattcgcatcgagatcgtggtgtacacaggaaaggagggaaaaagctcgcatgggtgtccaatagcaaaatgggtgctgagacgctcctccgacgaagagaaggtgctttgtctggtgaggcaaaggaccggccaccactgtcccaccgccgtgatggttgtcctgataatggtttgggatggtatacctttgccgatggcggaccgcttatatacagagctgaccgaaaatctcaagagttacaacggccaccccacagacaggcgctgtaccctcaacgagaatagaacttgtacctgccaagggatagaccctgagacatgcggggcatccttttcttttggatgctcttggtctatgtacttcaatggctgtaagttcggtcggagccccagtccacgcaggtttaggattgatccatcatccccactccacgagaaaaacctcgaagacaacctacagagcttggcgaccagattggcccctatttacaagcaatatgcacccgttgcttaccagaatcaggtcgaatacgagaacgtcgcgagggagtgtaggttagggagtaaagagggcaggcccttctctggggtgacggcttgtcttgatttctgtgcccacccccaccgcgacattcataacatgaacaatggaagtaccgtggtgtgcacgctgacacgggaggataaccggtccctgggtgtgatacctcaggatgagcagctgcatgtgcttcccttatacaaactgtcagataccgacgagttcggttctaaggagggcatggaggccaagatcaaatccggagctattgaggtgctagctcccaggcgcaagaaacgaacatgtttcactcagcccgtgccccgtagcggcaagaagcgcgcagccatgatgactgaagtgcttgcacacaagattcgggctgtggaaaagaagccaatacctagaatcaagaggaagaataattcaacgaccacaaataattcaaaaccctcctcactgccaacgctgggcagcaacaccgaaacagtgcagcctgaggtgaaaagcgaaacagaaccacactttatactgaaatccagcgacaatacaaagacctactccctcatgccaagcgcccctcaccctgttaaggaagctagtccgggtttcagctggtctcccaagacagcctctgcaacgccagctccactgaaaaatgatgccaccgcgtcctgcggcttcagtgagaggagttcaacaccccactgtacaatgccgtctgggcgtctgtccggtgccaacgctgctgctgccgatgggcctggaataagccaactgggtgaggtggcccctcttcccactctgagcgccccagtaatggaaccccttattaattccgagccctcaactggagtaaccgaacccctcactccacaccagccaaaccaccaaccctctttcctgacaagtccacaggatctggctagttcaccaatggaggaagacgagcagcactctgaggccgacgagccacctagtgatgaaccactgtctgatgacccactaagcccagctgaagagaaactgccacacatcgacgagtattggtctgattcggagcacatcttcttagacgcaaatatcggcggtgttgccattgcaccggctcacggttctgtccttattgagtgtgcccgaagagagcttcacgccacgacccctgttgaacaccctaaccgtaatcaccctacccgcttgtctcttgtgttttatcagcacaagaatctcaataagcctcaacatggctttgaactgaacaaaattaaattcgaagctaaggaggccaaaaacaagaaaatgaaggcctctgagcagaaagatcaggccgctaacgaggggccagaacagagtagcgaggttaatgagctgaaccaaataccctcccataaggccctgactctgacccatgacaacgtggtaactgtctctccgtacgcactgacccatgttgcaggaccatacaatcactgggtcta

SEQ ID NO: 219344 - DNA, 9288 bp, Artificial Sequence
  derived and/or modified sequence
ggcgcgagttggaaagtttgcccgagggctggtgcaggcttggagctgggggccgtgcgctgccctgggaatgtgacccggccagcgaccaaaaccttgtgtgactgagctgaagagcagtgcatccagattctcctcagaagtgagactttccaaaggaccaatgactctgtttcctgcgccctttcattttttcctactctgtagctatgtctcgatcccgccatgcaaggccttccagattagtcaggaaggaagatgtaaacaaaaaaaagaaaaacagccaactacgaaagacaaccaagggagccaacaaaaatgtggcatcagtcaagactttaagccctggaaaattaaagcaattaattcaagaaagagatgttaagaaaaaaacagaacctaaaccacccgtgccagtcagaagccttctgacaagagctggagcagcacgcatgaatttggataggactgaggttctttttcagaacccagagtccttaacctgcaatgggtttacaatggcgctacgaagcacctctcttagcaggcgactctcccaacccccactggtcgtagccaaatccaaaaaggttccactttctaagggtttagaaaagcaacatgattgtgattataagatactccctgctttgggagtaaagcactcagaaaatgattcggttccaatgcaagacacccaagtccttcctgatatagagactctaattggtgtacaaaatccctctttacttaaaggtaagagccaagagacaactcagttttggtcccaaagagttgaggattccaagatcaatatccctacccacagtggccctgcagctgagatccttcctgggccactggaagggacacgctgtggtgaaggactattctctgaagagacattgaatgataccagtggttccccaaaaatgtttgctcaggacacagtgtgtgctccttttccccaaagagcaacccccaaagttacctctcaaggaaaccccagcattcagttagaagagttgggttcacgagtagaatctcttaagttatctgattcttacctggatcccattaaaagtgaacatgattgctaccccacctccagtcttaataaggttatacctgacttgaaccttagaaactgcttggctcttggtgggtctacgtctcctacctctgtaataaaattcctcttggcaggctcaaaacaagcgacccttggtgctaaaccagatcatcaagaggccttcgaagctactgcaaatcaacaggaagtttctgataccacctctttcctaggacaggcctttggtgctatcccacatcaatgggaacttcctggtgctgacccagttcatggtgaggccctgggtgagaccccagatctaccagagattcctggtgctattccagtccaaggagaggtctttggtactattttagaccaacaagaaactcttggtatgagtgggagtgttgtcccagacttgcctgtcttccttcctgttcctccaaatccaattgctacctttaatgctccttccaaatggcctgagccccaaagcactgtctcatatggacttgcagtccagggtgctatacagattttgcctttgggctcaggacacactcctcaatcatcatcaaactcagagaaaaattcattacctccagtaatggctataagcaatgtagaaaatgagaagcaggttcatataagcttcctgccagctaacactcaggggttcccattagcccctgagagaggactcttccatgcttcactgggtatagcccaactctctcaggctggtcctagcaaatcagacagagggagctcccaggtcagtgtaaccagcacagttcatgttgtcaacaccacagtggtgactatgccagtgccaatggtcagtacctcctcttcttcctataccactttgctaccgactttggaaaagaagaaaagaaagcgatgtggggtctgtgaaccctgccagcagaagaccaactgtggtgaatgcacttactgcaagaacagaaagaacagccatcagatctgtaagaaaagaaaatgtgaggagctgaaaaagaaaccatctgttgttgtgcctctggaggttataaaggaaaacaagaggccccagagggaaaagaagcccaaagttttaaaggcagattttgacaacaaaccagtaaatggccccaagtcagaatccatggactacagtagatgtggtcatggggaagaacaaaaattggaattgaacccacatactgttgaaaatgtaactaaaaatgaagacagcatgacaggcatcgaggtggagaagtggacacaaaacaagaaatcacagttaactgatcacgtgaaaggagattttagtgctaatgtcccagaagctgaaaaatcgaaaaactctgaagttgacaagaaacgaaccaaatctccaaaattgtttgtacaaaccgtaagaaatggcattaaacatgtacactgtttaccagctgaaacaaatgtttcatttaaaaaattcaatattgaagaattcggcaagacattggaaaacaattcttataaattcctaaaagacactgcaaaccataaaaacgctatgagctctgttgctactgatatgagttgtgatcatctcaaggggagaagtaacgttttagtattccagcagcctggctttaactgcagttccattccacattcttcacactccatcataaatcatcatgctagtatacacaatgaaggtgatcaaccaaaaactcctgagaatataccaagtaaagaaccaaaagatggatctcccgttcaaccaagtctcttatcgttaatgaaagataggagattaacattggagcaagtggtagccatagaggccctgactcaactctcagaagccccatcagagaattcctccccatcaaagtcagagaaggatgaggaatcagagcagagaacagccagtttgcttaatagctgcaaagctatcctctacactgtaagaaaagacctccaagacccaaacttacagggagagccaccaaaacttaatcactgtccatctttggaaaaacaaagttcatgcaacacggtggttttcaatgggcaaactactaccctttccaactcacatatcaactcagctactaaccaagcatccacaaagtcacatgaatattcaaaagtcacaaattcattatctctttttataccaaaatcaaattcatccaagattgacaccaataaaagtattgctcaagggataattactcttgacaattgttccaatgatttgcatcagttgccaccaagaaataatgaagtggagtattgcaaccagttactggacagcagcaaaaaattggactcagatgatctatcatgtcaggatgcaacccatacccaaattgaggaagatgttgcaacacagttgacacaacttgcttcgataattaagatcaattatataaaaccagaggacaaaaaagttgaaagtacaccaacaagccttgtcacatgtaatgtacagcaaaaatacaatcaggagaagggcacaatacaacagaaaccaccttcaagtgtacacaataatcatggttcatcattaacaaaacaaaagaacccaacccagaaaaagacaaaatccaccccatcaagagatcggcggaaaaagaagcccacagttgtaagttatcaagaaaatgatcggcagaagtgggaaaagttgtcctatatgtatggcacaatatgcgacatttggatagcatcgaaatttcaaaattttgggcaattttgtccacatgattttcctactgtatttgggaaaatttcttcctcgaccaaaatatggaaaccactggctcaaacgaggtccattatgcaacccaaaacagtatttccaccactcactcagataaaattacagagatatcctgaatcagcagaggaaaaggtgaaggttgaaccattggattcactcagcttatttcatcttaaaacggaatccaacgggaaggcattcactgataaagcttataattctcaggtacagttaacggtgaatgccaatcagaaagcccatcctttgacccagccctcctctccacctaaccagtgtgctaacgtgatggcaggcgatgaccaaatacggtttcagcaggttgttaaggagcaactcatgcatcagagactgccaacattgcctggtatctctcatgaaacacccttaccggagtcagcactaactctcaggaatgtaaatgtagtgtgttcaggtggaattacagtggtttctaccaaaagtgaagaggaagtctgttcatccagttttggaacatcagaattttccacagtggacagtgcacagaaaaattttaatgattatgccatgaacttctttactaaccctacaaaaaacctagtgtctataactaaagattctgaactgcccacctgcagctgtcttgatcgagttatacaaaaagacaaaggcccatattatacacaccttggggcaggaccaagtgttgctgctgtcagggaaatcatggagaataggtatggtcaaaaaggaaacgcaataaggatagaaatagtagtgtacaccggtaaagaagggaaaagctctcatgggtgtccaattgctaagtgggttttaagaagaagcagtgatgaagaaaaagttctttgtttggtccggcagcgtacaggccaccactgtccaactgctgtgatggtggtgctcatcatggtgtgggatggcatccctcttccaatggccgaccggctatacacagagctcacagagaatctaaagtcatacaatgggcaccctaccgacagaagatgcaccctcaatgaaaatcgtacctgtacatgtcaaggaattgatccagagacttgtggagcttcattctcttttggctgttcatggagtatgtactttaatggctgtaagtttggtagaagcccaagccccagaagatttagaattgatccaagctctcccttacatgaaaaaaaccttgaagataacttacagagtttggctacacgattagctccaatttataagcagtatgctccagtagcttaccaaaatcaggtggaatatgaaaatgttgcccgagaatgtcggcttggcagcaaggaaggtcgtcccttctctggggtcactgcttgcctggacttctgtgctcatccccacagggacattcacaacatgaataatggaagcactgtggtttgtaccttaactcgagaagataaccgctctttgggtgttattcctcaagatgagcagctccatgtgctacctctttataagctttcagacacagatgagtttggctccaaggaaggaatggaagccaagatcaaatctggggccatcgaggtcctggcaccccgccgcaaaaaaagaacgtgtttcactcagcctgttccccgttctggaaagaagagggctgcgatgatgacagaggttcttgcacataagataagggcagtggaaaagaaacctattccccgaatcaagcggaagaataactcaacaacaacaaacaacagtaagccttcgtcactgccaaccttagggagtaacactgagaccgtgcaacctgaagtaaaaagtgaaaccgaaccccattttatcttaaaaagttcagacaacactaaaacttattcgctgatgccatccgctcctcacccagtgaaagaggcatctccaggcttctcctggtccccgaagactgcttcagccacaccagctccactgaagaatgacgcaacagcctcatgcgggttttcagaaagaagcagcactccccactgtacgatgccttcgggaagactcagtggtgccaatgcagctgctgctgatggccctggcatttcacagcttggcgaagtggctcctctccccaccctgtctgctcctgtgatggagcccctcattaattctgagccttccactggtgtgactgagccgctaacgcctcatcagccaaaccaccagccctccttcctcacctctcctcaagaccttgcctcttctccaatggaagaagatgagcagcattctgaagcagatgagcctccatcagacgaacccctatctgatgaccccctgtcacctgctgaggagaaattgccccacattgatgagtattggtcagacagtgagcacatctttttggatgcaaatattggtggggtggccatcgcacctgctcacggctcggttttgattgagtgtgcccggcgagagctgcacgctaccactcctgttgagcaccccaaccgtaatcatccaacccgcctctcccttgtcttttaccagcacaaaaacctaaataagccccaacatggttttgaactaaacaagattaagtttgaggctaaagaagctaagaataagaaaatgaaggcctcagagcaaaaagaccaggcagctaatgaaggtccagaacagtcctctgaagtaaatgaattgaaccaaattccttctcataaagcattaacattaacccatgacaatgttgtcaccgtgtccccttatgctctcacacacgttgcggggccctataaccattgggtctgaaggcttttctccccctcttaatgcctttgctagtgcagtgtattttttcaaggtgctgttaaaagaaagtcatgttgtcgtttactatcttcatctcacccatttcaagtctgaggtaaaaaaataataatgataacaaaacggggtgggtattcttaactgtgactatattttgacaattggtagaaggtgcacattttaagcaaaaataaaagttttatagttttaaatacataaagaaatgtttcagttaggcattaaccttgatagaatcactcagtttggtgctttaaattaagtctgtttactatgaaacaagagtcatttttagaggattttaacaggttcatgttctatgatgtaaaatcaagacacacagtgttaactctacacagcttctggtgcttaaccacatccacacagttaaaaataagctgaattattatttcatggtgccattgttccaacatcttccaatcattgctagaaaattggcatattcctttgaaataaacttatgaaatgttttctctcttaaaatatttctcctgtgtaaaataaatcattgttgttagtaatggttggaggctgttcataaattgtaaatatatattttaaaagcactttctatttttaaaagtaacttgaaataatatagtataagaatcctattgtctattgtttgtgcatatttgcatacaagagaaatcatttatccttgctgtgtagagttccatcttgttaactgcagtatgtattctaatcatgtatatggtttgtgttcttttactgtgtcctctcacattcaagtattagcaacttgcagtatataaaatagttagataatgagaagttgttaattatctctaaaattggaattaggaagcatatcaccaatactgattaacattctctttggaactaggtaagagtggtctcttcttattgaacaacctcaatttagtttcatcccacctttctcagtataatccatgagaggtgtttccaaaaggagatgagggaacaggataggtttcagaagagtcaaatgcttctaatgtctcaaggtgataaaatacaaaaactaagtagacagatatttgtactgaagtctgatacagaattagaaaaaaaaaattcttgttgaaatattttgaaaacaaattccctactatcatcacatgcctccccaaccccaagtcaaaaacaagaggaatggtactacaaacatggctttgtccattaagagctaattcatttgtttatcttagcatactagatttgggaaaatgataactcatcttttctgataattgcctatgttctaggtaacaggaaaacaggcattaagtttattttagtcttcccattttcttcctattactttattgactcattttattgcaaaacaaaaaggattacccaaacaacatgtttcgaacaaggagaattttcaatgaaatacttgattctgttaaaatgcagaggtgctataacattcaaagtgtcagattccttgggagtatggaaaacctaatggtgcttctcccttggaaatgccataggaagcccacaaccgctaacacttacaattttggtgcaaaagcaaacagttccagcaggctctctaaagaaaaactcattgtaacttattaaaataatatctggtgcaaagtatctgttttgagcttttgactaatccaagtaaaggaatatgaagggattgtaaaaaacaaaatgtccattgatagaccatcgtgtacaagtagatttctgcttgttgaatatgtaaaatagggtaattcattgacttgttttagtattttgtgtgccttagatttccgttttaagacatgtatatttttgtgagcctaaggtttcttatatacatataagtatataaataagtgattgtttattgcttcagctgcttcaacaagatatttactagtattagactatcaggaatacacccttgcgagattatgttttagattttaggccttagctcccactagaaattatttcttcaccagatttaatggataaagttttatggctctttatgcatccactcatctactcattcttcgagtctacacttattgaatgcctgcaaaatctaagtatcacttttatttttctttggatcaccacctatgacatagtaaacttgaagaataaaaactaccctcagaaatatttttaaaagaagtagcaaattatcttcagtataatccatggtaatgtatgcagtaattcaaattgatctctctctcaataggtttcttaacaatctaaacttgaaacatcaatgttaatttttggaactattgggatttgtgacgcttgttgcagtttaccaaaacaagtatttgaaaatatatagtatcaactgaaatgtttccattccgttgttgtagttaacatcatgaatggacttcttaagctgattaccccactgtgggaaccaaattggattcctactttgttggactctctttcctgattttaacaatttaccatcccattctctgccctgtgattttttttaaaagcttattcaatgttctgcagcattgtgattgtatgctggctacactgcttttagaatgctctttctcatgaagcaaggaaataaatttgtttgaaatgacattttctctca

SEQ ID NO: 219345 - protein, 729 aa, Artificial Sequence
  derived and/or modified sequence
MGDYGFGVLVQSNTGNKSAFPVRFHPHLQPPHHHQNATPSPAAFINNNTAANGSSAGSAWLFPAPATHNIQDEILGSEKAKSQQQEQQDPLEKQQLSPSPGQEAGILPETEKAKSEENQGDNSSENGNGKEKIRIESPVLTGFDYQEATGLGTSTQPLTSSASSLTGFSNWSAAIAPSSSTIINEDASFFHQGGVPAASANNGALLFQNFPHHVSPGFGGSFSPQIGPLSQHHPHHPHFQHHHSQHQQQRRSPASPHPPPFTHRNAAFNQLPHLANNLNKPPSPWSSYQSPSPTPSSSWSPGGGGYGGWGGSQGRDHRRGLNGGITPLNSISPLKKNFASNHIQLQKYARPSSAFAPKSWMEDSLNRADNIFPFPDRPRTFDMHSLESSLIDIMRAENDTIKGRLNYSYPGSDSSLLINARTYGRRRGQSSLFPMEDGFLDDGRGDQPLHSGLGSPHCFSHQNGERVERYSRKVFVGGLPPDIDEDEITASFRRFGPLIVDWPHKAESKSYFPPKGYAFLLFQDESSVQALIDACIEEDGKLYLCVSSPTIKDKPVQIRPWNLSDSDFVMDGSQPLDPRKTIFVGGVPRPLRAVELAMIMDRLYGGVCYAGIDTDPELKYPKGAGRVAFSNQQSYIAAISARFVQLQHGEIDKRVEVKPYVLDDQLCDECQGARCGGKFAPFFCANVTCLQYYCEYCWAAIHSRAGREFHKPLVKEGGDRPRHISFRWN

SEQ ID NO: 219346 - DNA, 2190 bp, Artificial Sequence
  derived and/or modified sequence
atgggagactatggcttcggggtgctggtccaaagcaatacaggcaataagtccgctttcccggtgagattccacccacacctgcagccacctcatcaccaccagaatgctacccccagcccagcagcctttattaacaataacacagctgccaacggcagcagtgctggcagtgcctggctgttcccggctcctgcgactcacaatatccaggacgaaatcctgggttccgagaaggccaagagtcagcagcaagaacagcaggatcctctggaaaaacagcaactctccccttcccccggtcaggaggctggaatcctgccagagactgagaaagccaagagtgaggagaaccagggcgacaatagttcagagaatggaaatggcaaggaaaagatccgaattgaatctcccgtcctcaccggattcgattaccaggaggcaaccggcctaggcaccagcacacaacctctcacctccagtgcttcttcccttaccggtttttccaactggtcagcagctattgccccaagttcatctaccattatcaatgaggacgcgagctttttccatcagggcggggttccagcagccagcgccaacaacggcgccctgttgttccaaaactttcctcatcatgtgagtccggggttcggaggatctttctcaccacagatcgggcctctgagtcagcatcatccccatcatccccactttcagcaccaccattctcagcaccagcagcagcgcagatctcctgcttcgcctcacccaccaccttttacacacaggaatgccgcctttaatcagctacctcatcttgccaataacctgaacaagccaccctctccctggtccagttatcagagtccatcccccacccccagctcctcttggagtcccggaggtggcgggtacgggggctggggaggttctcaaggaagagaccatcggagaggcctgaatggcggtatcacaccccttaacagtatctcaccactgaaaaagaactttgccagtaatcatattcagctgcagaagtatgctagaccctctagcgcctttgctcctaagagttggatggaggatagcctaaaccgggccgataacattttcccattcccagacaggcctagaacgtttgatatgcactccctagagtcgtcactgatcgacatcatgcgggccgagaatgataccatcaaaggacggctgaattatagctatccagggagcgattcttctcttttaattaacgctaggacgtatggaaggcggagagggcagagttcactttttccgatggaggacgggttcctggacgatggaagaggcgaccagcctctgcatagtggcttggggtcaccacattgcttcagccatcagaacggagaaagagtggagcggtactccagaaaggtgttcgtgggcggattgcccccagatatcgacgaagatgaaatcaccgccagttttaggcgcttcggtccgcttattgtggactggcctcataaggctgagtctaaaagctactttccaccaaaaggatatgcctttcttttgtttcaggatgagagtagcgttcaggccctgatcgatgcatgcattgaggaggacgggaagctgtatctgtgcgtgagctctcccacgatcaaggacaaaccagtgcaaatccgaccatggaacttgagcgacagtgatttcgtgatggacggttctcagcctctggatccacggaagactatcttcgtcggcggtgtccctaggccacttcgggctgtggagctagcaatgatcatggaccgcctgtacgggggcgtttgctatgctgggattgatacggatccagagctgaaatatcctaagggcgccggccgagtcgctttcagcaaccagcagagctatattgcagcgatttctgccagatttgtgcagctgcagcatggggaaattgataagagagtggaggtgaagccctacgtgttggatgatcagctgtgcgacgagtgtcagggtgcccgatgtggcggcaaatttgcccctttcttttgtgctaacgttacttgcctgcagtactactgcgagtattgttgggctgccatccatagtagggccggccgtgagtttcataaacctcttgtcaaggagggaggggaccggccacgccatatatccttccgctggaattag

SEQ ID NO: 219347 - DNA, 2190 bp, Artificial Sequence
  derived and/or modified sequence
atgggagactatggcttcggcgtgctggtgcagagcaacacaggcaacaagagcgccttccctgtgcgcttccacccccacctgcagcccccccaccaccaccagaatgccacccccagccctgctgccttcatcaacaacaacacagctgccaacggcagcagcgctggcagcgcctggctgtttcctgccccagccacccacaacatccaggatgagatcctgggcagcgagaaggccaagagccagcagcaggagcagcaggaccccctggagaagcagcagctgagccccagccctggccaggaggccggcatcctgcctgagacagagaaggccaagtctgaggagaaccagggcgacaacagcagtgaaaatggaaatggcaaggagaagatcagaattgagagccctgtgctgactggatttgactaccaggaggccaccggcctgggcaccagcacccagcccctgaccagcagcgccagcagcctgaccggcttcagcaactggagcgctgccatcgcccccagcagcagcaccatcatcaatgaagatgccagcttcttccaccagggcggcgtgcctgctgccagcgccaacaacggggccctgctcttccagaacttcccccaccacgtgtccccaggctttggaggcagcttcagcccccagatcggccccctgagccagcaccacccccaccacccccacttccagcaccaccacagccagcaccagcagcagaggaggagccctgccagcccccaccccccacccttcacccacagaaatgctgccttcaaccagctgccccacctggccaacaacctgaacaagccacccagcccctggagcagctaccagagccccagccccacccccagcagctcctggagccctgggggcggcggctacggcggctggggcggcagccagggccgggaccaccggcggggcctgaatggaggcatcacccccctgaacagcatcagccccctgaagaagaactttgccagcaaccacatccagctgcagaagtatgcccggcccagcagcgcctttgcccccaagtcctggatggaggacagcctgaacagagctgacaacatcttccccttcccagaccggcccaggacctttgacatgcacagcctggagagcagcctgattgacatcatgagagcagaaaatgacaccatcaagggccgcctgaactacagctacccaggcagtgacagcagcctgctgatcaatgcccggacctatggaagaagaagaggccagagcagcctcttccccatggaggatggcttcctggatgatggccgcggggaccagcccctgcacagcggcctgggcagcccccactgcttcagccaccagaatggagagcgggtggagcgctacagcaggaaggtgtttgtgggcggcctgcccccagacattgatgaagatgagatcacagccagcttcagaagatttggccccctgattgtggactggccccacaaggccgagagcaagagctacttcccccccaagggctacgccttcctgctcttccaggatgagagctctgtgcaggccctgattgatgcctgcatcgaggaggatggcaagctgtacctgtgtgtgagcagccccaccatcaaggacaagcctgtgcagatccggccctggaacctgagtgacagcgactttgtgatggatggcagccagcccctggaccccaggaagaccatctttgtgggcggcgtgccccggcccctgcgggctgtggagctggccatgatcatggaccggctgtatggaggagtgtgctacgccggcatcgacacagatcctgagctgaagtaccccaagggggccggccgggtggccttcagcaaccagcagagctacatcgccgccatcagcgccaggtttgtgcagctgcagcacggggagattgacaagagggtggaggtgaagccctacgtgctggatgaccagctgtgtgatgagtgccagggcgcccgctgtggcggcaagtttgcccccttcttctgtgccaacgtgacctgcctgcagtactactgtgagtactgctgggccgccatccacagcagagctggccgggagttccacaagcccctggtgaaggagggcggggaccggcccaggcacatctccttccgctggaactag

SEQ ID NO: 219348 - DNA, 2190 bp, Artificial Sequence
  derived and/or modified sequence
atgggcgactacggcttcggcgtgctggtgcagagcaacaccggcaacaaaagtgctttccctgttcgttttcacccccacctacaaccaccacatcaccaccaaaacgcaacgccctctccagctgctttcatcaataataacaccgctgctaatggctcctctgccggctctgcttggctgttcccagctcctgccacgcataatatccaagatgaaatactggggtcagaaaaggcgaagtcccagcagcaggagcaacaggatcctctcgagaagcagcagctatctccttcccccggtcaggaagccggcatcctgcccgagactgaaaaggctaagtccgaggaaaaccagggagataactcctctgaaaacggcaacggaaaggagaaaataagaatcgagagccctgtgctgactgggtttgactaccaggaggccacaggtcttggcacttctactcagccactgacgagctccgcatcctccttgactggattcagcaattggtccgcagcgattgcacccagtagctccacaataattaatgaggacgccagttttttccatcagggcggagtgcccgcagcaagcgcgaacaatggggctctcctgtttcagaactttccacaccacgtcagtcctgggttcggaggatccttctcccctcaaattgggccgctgagccagcaccatccacaccatccgcacttccagcaccatcactcacagcatcagcagcaacggaggtcacctgcgtccccccatcctcccccattcacccatcgcaatgcagctttcaaccagctccctcatctggccaacaacctaaacaaacccccatccccatggtcatcatatcaatcaccatctcctacaccatcatcatcatggtccccagggggcggcgggtatggaggatggggggggtctcaaggccgtgaccatcgacgtggccttaacggtggaatcactcccctgaacagtattagccctctaaagaagaacttcgcctccaaccatattcagctgcagaagtacgccagacctagcagtgcatttgctccaaagtcatggatggaggattccctcaaccgggctgacaacatcttcccttttccggatcggccacgaaccttcgatatgcatagcctcgaatcatctttgattgacattatgcgagccgagaacgacactatcaaaggtcggctgaattatagctacccaggatcagattccagcctgctgattaatgcgcggacctatggaaggagacgcggccagtcgagcttgttccccatggaagatggttttcttgatgacggaagaggtgatcaacccctgcactcgggactcggctccccgcattgtttttcccatcagaacggcgaacgcgttgagcgctacagccggaaggtttttgtcgggggactcccacccgatatagatgaagatgagattacagcctcctttaggaggtttggtccacttatcgtcgactggccacataaggctgagagcaaatcctattttccacccaagggatacgccttcttgctgtttcaagacgagtcctccgtgcaggccctcatcgatgcatgcatcgaggaggatggcaagctgtatttgtgtgtgtcaagtccgaccattaaggacaagcctgttcagatacggccttggaacctctctgactccgattttgttatggacggctcccagcctctcgacccaagaaagacaatctttgtgggtggggtgccaagacccctgcgggcagtcgagctcgccatgattatggatcgcctgtacggcggcgtttgttatgcgggcatcgacaccgatccggagctgaaatatccaaagggtgccgggcgcgtcgcatttagtaatcaacagagctatatcgccgctatcagtgcccgcttcgtccagctgcaacacggcgaaatcgacaagcgggtcgaggtgaaaccttacgtacttgacgatcaactttgtgatgaatgtcagggggcaaggtgcgggggaaaatttgcgccctttttctgcgctaatgtaacctgtctgcagtactattgtgaatactgctgggcagcaattcacagcagggcgggcagagagtttcacaagccccttgtgaaggaaggcggagatcggcccagacacatctccttcaggtggaactag

SEQ ID NO: 219349 - DNA, 2190 bp, Artificial Sequence
  derived and/or modified sequence
atgggagattacggattcggtgttttggtgcaaagcaacactgggaataaatcagcatttccagttcggtttcacccacacctccaaccgccacaccaccaccagaacgcaacacctagccccgcagcctttatcaacaacaataccgccgctaatggtagttcagcgggaagtgcctggttattcccggctcccgcaacgcataatattcaggacgagatccttggctccgagaaggccaagtcacagcagcaggagcagcaggatcccctggaaaaacagcaactctccccaagcccaggccaagaagctggtatcctgcctgagaccgagaaagctaagtctgaggaaaatcagggcgataattcgtccgagaatggaaacgggaaagaaaaaatccggatcgagagtccagtcctgaccggctttgattatcaggaggcaacgggcctgggtacttccactcaacctctcacgtcctctgccagctctctgacgggattctccaactggtcggcagctatagcaccgagcagttccacgattattaacgaggatgctagcttctttcaccagggcggagtgccagccgctagtgcaaacaatggtgctctattgttccaaaatttccctcatcatgtttccccaggattcgggggatcttttagccctcagattggaccactttcccaacatcatccgcaccacccacattttcagcatcaccactcccagcatcagcagcagaggcggtcacctgcctccccacatcctcccccatttacccatcgcaacgccgcattcaatcagctgccacacttagctaataacctgaataagccgccttctccatggagctcttatcaaagccccagtcctacaccaagcagcagctggtctccgggaggcggaggctacggcggatggggcggatcgcaaggtcgggatcatcgcagagggcttaatggtggaatcactcctttgaatagtattagccccttaaaaaaaaatttcgcctctaatcatatccagctgcagaaatatgcccgtccaagttctgccttcgcccctaaaagctggatggaagactcacttaaccgggcagacaacattttccccttcccagatcgccctaggacattcgatatgcactctctagaatccagcctcattgacatcatgcgggcagaaaatgacaccatcaagggaaggctaaattattcgtaccccggtagcgactcgtccctgctgatcaatgctcggacttacgggaggcgcagaggacagagtagtctgtttcctatggaagacggatttcttgacgatggtcggggagatcagcctctgcatagtggtttgggttctccccactgtttttctcaccagaacggggaaagagtggagcggtactcccgcaaagtgttcgtgggaggcctcccaccggacattgatgaagacgaaattactgcttctttccgacggttcggtcccttgatcgtggactggccccacaaagcagaatccaaaagttacttccctcccaaaggatacgcctttctactctttcaagatgaaagctctgtacaggccctcatcgacgcttgtatagaggaagacgggaaactttatctgtgcgtgagcagcccaaccattaaggacaagccagtccaaattcgtccctggaacctctccgattcggatttcgtaatggatggctcacagcccctcgatccccgaaaaacgatttttgtcggtggggtgccaaggccactgcgcgctgtggagctcgccatgattatggatcgactttacggcggtgtgtgctatgcaggcatcgacacagaccctgagctaaagtatcccaaaggggctgggcgagtggcttttagtaatcagcagagctacatcgccgctatttctgcccgtttcgttcagctccaacatggcgagatcgacaagagggtggaagtgaagccatatgtgctagacgaccagctgtgtgacgagtgtcagggcgctaggtgtggcggaaagtttgccccttttttctgcgcaaatgtgacctgtttacagtactactgcgagtactgttgggctgcgattcattctcgggctgggagggaattccacaagcctctagtaaaagagggaggagaccggcctcgccacatctcattcagatggaattag

SEQ ID NO: 219350 - DNA, 9483 bp, Artificial Sequence
  derived and/or modified sequence
agtgctacccccacccctccctcttcgaaccggaagtgtctctgggtctttccagctggttgtcatttcactcggctcggtcctgaggagaaggactcagccgcggctgcgggacccgggcaccgggaggcggtggcggcggcggcggcggcagcagcggcgacagcagaggaggaagaggaggaagaaggaaagaaaaagaagaaccaggaggagtcctcaacaacgacagcggggactgcgggaccagggtaaagcggcgacggcggcgacggcccagcaaccgtgaggagaaacaaaagccttctaaattatagtttaaaaaaaaattctgggggaaaagagagagaaagccgaggggggaggcccttctcctttaaaataactacggtagtgggtttttcctttttttcctcttttttccctctctgcggagaatcgaactgagggaactgaacaaaccgcccctgggtcccatgagggaaaaaaaccccggagccgcagagaggggaagaggcagaaaccgcaggaccttccaggtcgccccctcggtccccgcacccccaggccgcccgctcaccctcgtcgagtctcgctaatccctcctgatcgcgacccccgcaagagggagaaacgggtgtttccaacccctttcatgggggagaggaagccgcggggagcccaggaacagcgaccgcagcaagatctgcacccggagcctcaggaacagccccagaggccaaaactgcaccctgcgaaagagcagaaaacaggaccaggaacagcagaaacctccctgcaatcatctttccattagtcaatgctgatttcctctcccgaaaccaggaattcacttcccaccccagataacctaatataatctatatatataaatatataatatataatgttcttaaattattcctgatttttttttaaccaagctgccaagaaaagaacgtattcccctcttagtcctattctaatttttatgtgagtgaatctaaactgctgaggaaaaccatatgtgattgttaaattatatatatctatatttttactccgcgcaaggcttattcttctacatccatagatgcttgagaagctctgtttttgtcattcatgtacattttcctttggaaaaagaaagcgcctattttactaaccaaagacttgatttttaccctcttcatttttattccctcctaaaaataagcccaattggatccaagtcaatgttttaagagatttttttaagagttgttttttctttcagagaccagaattccaaatcagaacaatttaaggtgataagctgcgatctttgagctagctataaataagacatttcaagcaagcaagcaaacaacttaaatttggggtagaggaaaaaaaaggcgtgagacatcaggttgtcattttttattgtgagattctgctcctaaagataataaatgggggattacgggtttggagtgctagtgcaaagcaatactgggaataaatctgcttttccagtcagattccatccacatctgcagcctccacaccatcaccaaaatgccacccccagccctgctgcttttataaataataacacagctgccaatggcagcagtgctgggtcagcttggctttttcctgctccagctacccataacattcaggatgagatcttggggtcagaaaaagcaaaaagtcagcaacaggaacagcaagaccccttagaaaagcagcagctttccccaagtccaggtcaggaagctggaatactgcctgaaacagagaaggcaaaatcagaagaaaatcaaggggacaattcttcggaaaatggcaatgggaaggagaaaataaggatcgaatctccagtgttgacagggtttgattatcaagaagccactgggctaggtacttcaacccaacccttgacatctagcgcatcgtctcttactggtttcagtaactggtcagcagcgatagcgccttcctcctctacaataatcaatgaagatgcaagtttctttcaccagggaggggtccctgctgcttcggctaataacggtgctctgttgtttcaaaatttcccccatcatgtcagccctggctttggaggcagcttctctcctcagatcgggcctctctcacagcaccacccacatcaccctcatttccagcatcatcacagccagcatcagcagcaaaggaggtctcctgccagtccccatcccccacccttcacacatagaaatgctgcttttaaccagctgcctcatttggcgaataatcttaacaaacccccctctccgtggagcagctaccagagtccgtcaccaacaccctcctcttcctggagcccgggcggtggtggatatggtggctggggaggttcccaaggccgagatcaccgcagagggctgaatggtggaataacgcccctgaactccatctcgcctttgaagaaaaattttgcaagcaatcatattcagctccagaagtatgctcgccccagctctgcctttgcacctaaatcctggatggaagatagcttgaacagggctgacaacatttttccttttccggatcgccccaggacattcgacatgcactcactggagagttcactcattgacataatgagagctgaaaatgataccattaaaggtcgtctaaactattcatatccaggatccgatagctctctgcttattaatgcaaggacatatgggcgaaggagaggtcagtcttcactgtttccaatggaagatggattcttggatgatggccgtggggatcagcctcttcatagtggcctgggttcacctcactgcttcagtcaccagaatggggaaagagtggaacgatattctcgaaaggtgtttgtaggcggattgcctccagacattgatgaagatgagatcacagctagttttcgtcgctttggccctctgattgtggattggcctcataaagctgagagcaaatcctattttcctcctaaaggctatgcattcctgctgtttcaagatgaaagctctgtgcaggctctcattgatgcatgcattgaagaagatggaaaactctacctttgtgtatcaagtcccactatcaaggataagccagtccagattcggccttggaatctcagtgacagtgactttgtgatggatggttcacagccacttgacccacgaaaaactatatttgttggtggtgttcctcgaccattacgagctgtggagcttgcgatgataatggatcggctatatggaggtgtgtgctacgctgggattgataccgaccctgagctaaaatacccaaaaggagctgggagagttgcgttctctaatcaacagagttacatagctgctatcagtgcccgctttgttcagctgcagcatggagagatagataaacgggtggaagttaagccatatgtcttggatgatcagctgtgtgatgaatgtcagggggcccgttgtggggggaaatttgctccatttttctgtgctaatgttacctgtctgcagtattactgtgaatattgctgggctgctatccattctcgtgctggcagggaattccacaagcccctggtgaaggaaggcggtgaccgccctcggcatatttcattccgctggaactaaaggataactgcagtgctcattttcaggcctcagaataagtgcactcttctgttcattctgaccccttcctcaacctcttcacgctggcatgtccttttgtagcagtctgtaacttaactatagtataatgaaaagaatgacctataatataggtgttttgtagattcttgtgtcactgcaaacaatatgaactcctttttcgtattgccatcgggttgcatggaagttttattctcttgttttgctggaaaccaagaggatccaaacttcctgcaacattttcttagaggagagagagaaatattaaaagagaaatgaaacaatagagtattttgggtttttaattaaattattgttaataatataacatataagaatacttttattaaaataaccatgcaacaataacactatcggtctatctgacagtttttcccccagggaagtgcttttgccttttcctttcttttttttttttttttcatcttttttgtctctctcttttttccatccctttttaatttttttaacagcaatggaggaagttaacaatttttaatggaaagagcatgttagagcaaacaaatgcataagcaagactgagcagcattataattaattttcagggttttgaggctgaacataatttcattatccctcaaaaagttaccaccacatcagaaaaaataaaaaaaaaatagtaaagtaggcagagctaggtttattttctcttaaacaatttttaaaattcagaatgtaaaaattgggtaaatttactactgaggggagtgcacttatttatttaacttacttatctggtcaaagccccaggaaacctaccaaagctagaattaatgacaactggtgggaaacctagcatttcctctcctgaagaataaatgtataaatgttatttttgatgtttatatataaactctatatcctaatttactaatactcatcagatgtcagcctttgctctccattttgacgttaaaaaacaacaacagatctagagatacctcaaggatatcatttttgattttgtgttacagtacacttgtagccaaaactggaagacaaaaccaatatataatttggctgctgattggcttacttttagatttaaagttactttgggtatcctgtaatttagttgtaacatagaaaatgaaaaaacagttaaaaaaagtgaagtagttgcaaagtgttttgcactgttgaactaagtaactgtgtaaatctgtgcaaaggtacgtatgtttatcttactcttcctataaactaaaataacattacagtttccgaatttagcatgggacatagtcagtgtttgaagtgccaacttcatcaagtaatgcatgctttattataaataaaattctagctttgaaaggcgttatgtgttgaacagtatgcttcaggggtaaatttaaaatagtctcttgaagccctagtcatggaagtaacttttattttaattgacattctcttattaaatgccctatccatcattaaaaggtttattatcagtgggcaaaacatgaaataatatgatcgaatggcaatcttgctagttgcgctacctaacagtaccatcttggatccttcaaaaccaaagacttgccccagcactgctgtggaaccacctggcttatgacccctatggatgatctttaggaaaagcagccctttacttttaatacaggctttaatgaactatacctgttaagttccaaaggtcaaaatggaggcatttgctgtctaatattcaaacatagaaagggagctgcttttaaagaattccctgcaaatactgaaagcagtcatgcgaatggagggtgctcttgtgtagctggtcagggacttttttttcttttctcctgaactacatgattctaattggaatgttcatttgcctctttttactcttttaaatgcttgtaggtggcttggggtgtgctatcgtgctgttcctactcagtaaacaggtgtgatgagttaacaagaaataacactgtttgagaactagctttgaataataatttttccctttgtacatgacctgctgaatttcggtacagtgtttttgtagctaacttattttgtcatgcacataatgtatatttgttatgcactacttttgtatatcttgtttttccaacagtgaacatttttaggcacacttttcactgacgggatatctctttatgcaatacctcaatttttcatattgcaaagagtagctttttgtacttttattactgagagatcttcatatacttcattttttaatataaataattttaataaattttattttcttatattctgctttttatacatttcagtgctctgcatacattttaaattatgaatgtcgtgcactggcaatgctattttagagtctgcagagaagagaaagcatgttgcttaaacatccttccccagcaccagctattggtgtacctataatttaagaaatagtctatgtaaagtcacaaattaatgaaaaaaattcgcatgaaaatgacagataacactgtagttcctaaaaaaaaaattaaatgcataagcataaggtagaaattaaaataacaaaattgtctacagcttcttactaagtttttaaaattattcataaaatgcagacatttttggtgaatgtttagccatttttaatattaataaattgatgttaagtgtttgattcagagatgtctgctcttttaaattatatataaggaaaaaaaatagcctgccttgggacaggtgtgtaatgttagtgtgcatgactaatgtaagaaattgttattctactaatatttacttgtgattgtgtgacaagtgtgtttacagattattggttacacttcaatttacagggcataaacaatgattatctattactctgaactttatgattacatgttcttcagattacatgggattgtagttgggagttaccatgtaactcaaacataattaacatgtaattagtttacagattgtagggcatcacttcaattcaccaagcatgtagttctagcgcactagcatggcgccagccatgtacttacaatgtagttacagagtaattacatggtgatttttgcaatgtaaaataaagtgtttctgattattttctatgtaaaggaaccctctcctttccccttctggtccctgcgctttggtataatatatatacttctccatacacagacctctgcagaatgcaaaataaaacttgcagtgaatgaatttagcattttatgagagtgctgttggaaagacttgataattcaccccttttgttttgaagagttgaatcttctgttaaaaggtgatttaaaacttgaatgtgatgaattgtggcaagttaacttcaagttatgtgcaatacttatttcaaacttttgaaagatctttgcagtgtaattctttgtttttaattgcagacatttaaaaatgtcattttctactgttaagagtaatcctctttcttgctggtgtttctaaagaaaagaatcagaaatcaatctttctactaatgtaaatttgagattatttttaaaaatggaataaaagaggttttggtcatttgctttattttattattttaaagctactgtgattgatagcattgtaagaatcgggacaatattgtattcaactgttttattttttatatttttaaaatttaaagtataattagtttttataattttcatcagatttttgttatattttttggaagtgaaacttttagcaagtgggtgtctagtttttactaatccctaattttttttccagtgtattgctcatattatcagaaggaaaagttatttaagtatgtcagttaattgtactacttggctgaatttccatatagtttttactgtgtatggggaggttgtagtatttattatagcattttaaataagggtaattcattttttattaaagtcattttcacgttaagttcctatttttgtatgttctactcttaagttatataacacagttccttttttaaaagagttcatttgttgaagtgctagtgaaaaattaatgttattaaatagtttgcaaatgactatttataccagtatgcatataatttttaaatatttgtaatgtgagatgttgaatgaataaaacttttaactcagatttcttttaatatacttatttctttttaacacaagtagatgatgctttcttgactgggaatgtaacattttaaaatattaggaatatactgttcagctaatgcagcacaaaccaataggaaaaaatcttcagtcatataagtactgtggccagtgtgcattcttatgtaagcctataagcgtcggtgggtggttgtgtctttggcctgtactgttagttcacctgctgcctgccctgcagagttctttttatttgtagccttcaatatgtatacagggagtaagcccaggatctaagcattcagttatcagttgaaggccaaatgcccaacaaaagtgaaaaacccaatgtttagttaataatgaaagtccgtatctgggaggttcagttttgagtctttgtcaatgaatagtcttgatttgtggccacactaccaaagggcttgaaaacaagtctcttttgacttccaattcccagttcctccatagaccttaatgtcataggatacggtgtgtgggattataatctctatggcatgtcaattgaaaatattatctttgatttgatccattaatcatgtggactaccaagtgctgtaatgtgttagtatttatattttaaactgcattctcaaacttttaacataaggatttattataacaaaatataacactgagaatatcctgttttgtcagatttaatatctgttctttcttgagtatagtattctcaagactagaagaggttcttgtcctgagagaaatggactatgagatcttttgcgtctaagttgtctttcccaacaggcagctcttctaactatagagattactgagggtaagggcaggctggacagcttcccctttctctcatctggcaattcccaaaccttacgttgagcattcaatgaagggccttgaggaaaccccagggatgggacactggagatgtgggtggcatttggttatcaagtctataatattcctaggcattctgggatggtttcactattttaagaaaagaaaaaaaagatagcccaagcatatttagtttattttaggaaatgtttatttcaggtaagtgagatatcaatgatatgtgatataacaactctatcttgaaattacataggtgcattgctttgggtgttttaaatcacagaatggtgtgtctggaaagggtgtaagaggcttcctgggctatatttcttcattcactgattgcctaaacctacccaacgaggaaaattctttttatttttatcttttgtttttactgtctaaccagatgaataaacagtggaaattctctaccacactcttaacaatcaagtcatttcataaccccttttggtaatgggtgtttgtgtccacagctagatcagaaagtaagtactttttctagggatttttttttttttttaagtttgggaaatagtttgatcaaaagtcatggggaaagtaatctctgattttaaaaattgaagaatactgaaggtgtcagtgagttagaaatttttaaggagtaattattttctgaaatgtgtaataaccgaataataaacaagacaaaactctaatatttcagactgtgatcttcagaggactaggatagtcctttccacaagaaaaagacaaaaaaaaataaagttttaccattaaataca

SEQ ID NO: 219351 - DNA, 2190 bp, Artificial Sequence
  derived and/or modified sequence
atgggcgactacggcttcggcgtgctggtgcagagcaacaccggcaacaagagcgccttccccgtgagattccacccccacctgcagcccccccaccaccaccagaacgccacccccagccccgccgccttcatcaacaacaacaccgccgccaacggcagcagcgccggcagcgcctggctgttccccgcccccgccacccacaacatccaggacgagatcctgggcagcgagaaggccaagagccagcagcaggagcagcaggaccccctggagaagcagcagctgagccccagccccggccaggaggccggcatcctgcccgagaccgagaaggccaagagcgaggagaaccagggcgacaacagcagcgagaacggcaacggcaaggagaagatcagaatcgagagccccgtgctgaccggcttcgactaccaggaggccaccggcctgggcaccagcacccagcccctgaccagcagcgccagcagcctgaccggcttcagcaactggagcgccgccatcgcccccagcagcagcaccatcatcaacgaggacgccagcttcttccaccagggcggcgtgcccgccgccagcgccaacaacggcgccctgctgttccagaacttcccccaccacgtgagccccggcttcggcggcagcttcagcccccagatcggccccctgagccagcaccacccccaccacccccacttccagcaccaccacagccagcaccagcagcagagaagaagccccgccagcccccaccccccccccttcacccacagaaacgccgccttcaaccagctgccccacctggccaacaacctgaacaagccccccagcccctggagcagctaccagagccccagccccacccccagcagcagctggagccccggcggcggcggctacggcggctggggcggcagccagggcagagaccacagaagaggcctgaacggcggcatcacccccctgaacagcatcagccccctgaagaagaacttcgccagcaaccacatccagctgcagaagtacgccagacccagcagcgccttcgcccccaagagctggatggaggacagcctgaacagagccgacaacatcttccccttccccgacagacccagaaccttcgacatgcacagcctggagagcagcctgatcgacatcatgagagccgagaacgacaccatcaagggcagactgaactacagctaccccggcagcgacagcagcctgctgatcaacgccagaacctacggcagaagaagaggccagagcagcctgttccccatggaggacggcttcctggacgacggcagaggcgaccagcccctgcacagcggcctgggcagcccccactgcttcagccaccagaacggcgagagagtggagagatacagcagaaaggtgttcgtgggcggcctgccccccgacatcgacgaggacgagatcaccgccagcttcagaagattcggccccctgatcgtggactggccccacaaggccgagagcaagagctacttcccccccaagggctacgccttcctgctgttccaggacgagagcagcgtgcaggccctgatcgacgcctgcatcgaggaggacggcaagctgtacctgtgcgtgagcagccccaccatcaaggacaagcccgtgcagatcagaccctggaacctgagcgacagcgacttcgtgatggacggcagccagcccctggaccccagaaagaccatcttcgtgggcggcgtgcccagacccctgagagccgtggagctggccatgatcatggacagactgtacggcggcgtgtgctacgccggcatcgacaccgaccccgagctgaagtaccccaagggcgccggcagagtggccttcagcaaccagcagagctacatcgccgccatcagcgccagattcgtgcagctgcagcacggcgagatcgacaagagagtggaggtgaagccctacgtgctggacgaccagctgtgcgacgagtgccagggcgccagatgcggcggcaagttcgcccccttcttctgcgccaacgtgacctgcctgcagtactactgcgagtactgctgggccgccatccacagcagagccggcagagagttccacaagcccctggtgaaggagggcggcgacagacccagacacatcagcttcagatggaactag

SEQ ID NO: 219352 - protein, 1019 aa, Artificial Sequence
  derived and/or modified sequence
MSALCDPPGAPGPPGPAPATHGPAPLSAQELSQEIKAFLTGVDPILGHQLSAREHARCGLLLLRSLPPARAAVLDHLRGVFDESVRAHLAALDETPVAGPPHLRPPPPSHVPAGGPGLEDVVQEVQQVLSEFIRANPKAWAPVISAWSIDLMGQLSSTYSGQHQRVPHATGALNELLQLWMGCRATRTLMDIYVQCLSALIGSCPDACVDALLDTSVQHSPHFDWVVAHIGSSFPGTIISRVLSCGLKDFCVHGGAGGGAGSSGGSSSQTPSTDPFPGSPAIPAEKRVPKIASVVGILGHLASRHGDSIRRELLRMFHDSLAGGSGGRSGDPSLQATVPFLLQLAVMSPALLGTVSGELVDCLKPPAVLSQLQQHLQGFPREELDNMLNLAVHLVSQASGAGAYRLLQFLVDTAMPASVITTQGLAVPDTVREACDRLIQLLLLHLQKLVHHRGGSPGEGVLGPPPPPRLVPFLDALKNHVGELCGETLRLERKRFLWQHQLLGLLSVYTRPSCGPEALGHLLSRARSPEELSLATQLYAGLVVSLSGLLPLAFRSCLARVHAGTLQPPFTARFLRNLALLVGWEQQGGEGPAALGAHFGESASAHLSDLAPLLLHPEEEVAEAAASLLAICPFPSEALSPSQLLGLVRAGVHRFFASLRLHGPPGVASACQLLTRLSQTSPAGLKAVLQLLVEGALHRGNTELFGGQVDGDNETLSVVSASLASASLLDTNRRHTAAVPGPGGIWSVFHAGVIGRGLKPPKFVQSRNQQEVIYNTQSLLSLLVHCCSAPGGTECGECWGAPILSPEAAKAVAVTLVESVCPDAAGAELAWPPEEHARATVERDLRIGRRFREQPLLFELLKLVAAAPPALCYCSVLLRGLLAALLGHWEASRHPDTTHSPWHLEASCTLVAVMAEGSLLPPALGNMHEVFSQLAPFEVRLLLLSVWGFLREHGPLPQKFIFQSERGRFIRDFSREGGGEGGPHLAVLHSVLHRNIDRLGLFSGRFQAPSPSTLLRQGT

SEQ ID NO: 219353 - DNA, 3060 bp, Artificial Sequence
  derived and/or modified sequence
atgagcgccctgtgcgacccccccggcgcccccggcccccccggccccgcccccgccacccacggccccgcccccctgagcgcccaggagctgagccaggagatcaaggccttcctgaccggcgtggaccccatcctgggccaccagctgagcgccagagagcacgccagatgcggcctgctgctgctgagaagcctgccccccgccagagccgccgtgctggaccacctgagaggcgtgttcgacgagagcgtgagagcccacctggccgccctggacgagacccccgtggccggccccccccacctgagaccccccccccccagccacgtgcccgccggcggccccggcctggaggacgtggtgcaggaggtgcagcaggtgctgagcgagttcatcagagccaaccccaaggcctgggcccccgtgatcagcgcctggagcatcgacctgatgggccagctgagcagcacctacagcggccagcaccagagagtgccccacgccaccggcgccctgaacgagctgctgcagctgtggatgggctgcagagccaccagaaccctgatggacatctacgtgcagtgcctgagcgccctgatcggcagctgccccgacgcctgcgtggacgccctgctggacaccagcgtgcagcacagcccccacttcgactgggtggtggcccacatcggcagcagcttccccggcaccatcatcagcagagtgctgagctgcggcctgaaggacttctgcgtgcacggcggcgccggcggcggcgccggcagcagcggcggcagcagcagccagacccccagcaccgaccccttccccggcagccccgccatccccgccgagaagagagtgcccaagatcgccagcgtggtgggcatcctgggccacctggccagcagacacggcgacagcatcagaagagagctgctgagaatgttccacgacagcctggccggcggcagcggcggcagaagcggcgaccccagcctgcaggccaccgtgcccttcctgctgcagctggccgtgatgagccccgccctgctgggcaccgtgagcggcgagctggtggactgcctgaagccccccgccgtgctgagccagctgcagcagcacctgcagggcttccccagagaggagctggacaacatgctgaacctggccgtgcacctggtgagccaggccagcggcgccggcgcctacagactgctgcagttcctggtggacaccgccatgcccgccagcgtgatcaccacccagggcctggccgtgcccgacaccgtgagagaggcctgcgacagactgatccagctgctgctgctgcacctgcagaagctggtgcaccacagaggcggcagccccggcgagggcgtgctgggccccccccccccccccagactggtgcccttcctggacgccctgaagaaccacgtgggcgagctgtgcggcgagaccctgagactggagagaaagagattcctgtggcagcaccagctgctgggcctgctgagcgtgtacaccagacccagctgcggccccgaggccctgggccacctgctgagcagagccagaagccccgaggagctgagcctggccacccagctgtacgccggcctggtggtgagcctgagcggcctgctgcccctggccttcagaagctgcctggccagagtgcacgccggcaccctgcagccccccttcaccgccagattcctgagaaacctggccctgctggtgggctgggagcagcagggcggcgagggccccgccgccctgggcgcccacttcggcgagagcgccagcgcccacctgagcgacctggcccccctgctgctgcaccccgaggaggaggtggccgaggccgccgccagcctgctggccatctgccccttccccagcgaggccctgagccccagccagctgctgggcctggtgagagccggcgtgcacagattcttcgccagcctgagactgcacggcccccccggcgtggccagcgcctgccagctgctgaccagactgagccagaccagccccgccggcctgaaggccgtgctgcagctgctggtggagggcgccctgcacagaggcaacaccgagctgttcggcggccaggtggacggcgacaacgagaccctgagcgtggtgagcgccagcctggccagcgccagcctgctggacaccaacagaagacacaccgccgccgtgcccggccccggcggcatctggagcgtgttccacgccggcgtgatcggcagaggcctgaagccccccaagttcgtgcagagcagaaaccagcaggaggtgatctacaacacccagagcctgctgagcctgctggtgcactgctgcagcgcccccggcggcaccgagtgcggcgagtgctggggcgcccccatcctgagccccgaggccgccaaggccgtggccgtgaccctggtggagagcgtgtgccccgacgccgccggcgccgagctggcctggccccccgaggagcacgccagagccaccgtggagagagacctgagaatcggcagaagattcagagagcagcccctgctgttcgagctgctgaagctggtggccgccgccccccccgccctgtgctactgcagcgtgctgctgagaggcctgctggccgccctgctgggccactgggaggccagcagacaccccgacaccacccacagcccctggcacctggaggccagctgcaccctggtggccgtgatggccgagggcagcctgctgccccccgccctgggcaacatgcacgaggtgttcagccagctggcccccttcgaggtgagactgctgctgctgagcgtgtggggcttcctgagagagcacggccccctgccccagaagttcatcttccagagcgagagaggcagattcatcagagacttcagcagagagggcggcggcgagggcggcccccacctggccgtgctgcacagcgtgctgcacagaaacatcgacagactgggcctgttcagcggcagattccaggcccccagccccagcaccctgctgagacagggcacctag

SEQ ID NO: 219354 - DNA, 3060 bp, Artificial Sequence
  derived and/or modified sequence
atgtcagctttgtgtgatccgccaggggcccctgggcccccgggtccagcaccagcaacccatgggcccgcaccactcagtgcgcaggagctttctcaggagatcaaggcattccttaccggagtggatcctattctgggacaccaactgagcgcacgcgagcacgcaagatgtggcctgctgttgctgagaagcctgcctcctgctagagctgctgtcctggatcacttacggggcgtttttgatgaatcagtgagggcacacctagccgcccttgatgagacccccgtggctggccctccccatctcaggcctcctcctccgagccacgtaccagcgggcggacctggcttggaagatgtggtccaggaggtgcaacaagtactctcagaattcatccgagcgaatcccaaggcttgggcccccgtcatttcagcatggtccatagacttgatgggacagctgtcgagtacctattcggggcagcatcagagagtcccgcacgctaccggtgctcttaatgagttattgcagctttggatgggatgtagagccacgaggacgttgatggatatctatgtgcagtgtctgtctgctctgattggttcatgtccagatgcgtgcgtcgacgcgttgctcgacacttcagtccaacactccccccatttcgattgggttgtggctcacataggaagcagttttcccggaaccattatcagccgagtcctgagctgcggccttaaggatttttgcgtacatggaggggctggtggtggtgccggatcttccggagggagcagtagccaaaccccatccacggatcccttcccagggtcccctgctattccagccgaaaagagagtacccaaaatcgcttctgtagtaggcatcctcggtcacctcgccagccggcacggcgactccatacgaagagagcttcttcggatgtttcatgactctctggcgggggggagcggcgggagaagtggcgatccaagcctacaggccaccgttccatttttgctacagctagcagtcatgtctccagcactgctgggtaccgtgtccggagaattggtggattgcctgaagcccccagcagtactgtctcaattgcagcagcatctgcagggattcccacgagaggagctagacaatatgctgaatctggccgtgcacttggtgagccaggccagcggagctggcgcctaccgtctgcttcagttcctagtggataccgctatgcccgctagtgttattaccactcagggcctcgctgttcctgatactgtgagagaagcatgcgaccgactcatccagcttctcttgctgcaccttcagaagctcgttcaccatcggggaggatctcccggtgaaggggtactgggtcccccgcctccccccaggcttgtaccttttctggatgcactcaaaaatcacgtgggcgagctgtgcggagagactctgcggctcgaacggaaacgatttctgtggcagcatcagctcctcggactgctaagtgtgtacacccggcctagctgtggcccggaggcactgggccatctcctgagccgggcaaggtcacccgaggaactctcgctagcaacccagctgtatgctggccttgtggtaagtctcagcggactcctaccgctggccttcaggtcttgtttagccagagtgcatgctggcacattacaacctccattcacggcaaggtttcttcgaaatctggcccttttggtgggctgggaacagcaagggggagaaggcccagccgctttaggggcacatttcggagagagtgcctcggcccacttgtcagatttggctcctctgctcctccaccccgaagaagaagtggccgaggctgcagcatccctgctagcaatctgtcctttccccagcgaggcactttcccccagtcagctgttaggactcgtccgagctggagtccatcgcttctttgcaagcctccgcttgcatgggcctcctggcgtggccagcgcatgccaactcctgacgcgcctgagccagactagtcctgccggactgaaggcagtgctgcagctcctggttgaaggcgccttgcaccgcgggaacaccgaactgtttggcggtcaggtggatggagataacgagacgctgtccgtagtcagcgcctccctggcaagtgcgagtctgctggacactaaccgacgtcataccgctgcagtgcctggcccgggtggaatatggtctgtgtttcacgctggggtaataggtcgcggtctgaaaccccctaaattcgtacagagccgcaatcagcaggaagtgatatacaatacccagtccttgctgagcctgctggtgcactgctgtagcgccccaggcgggactgagtgcggagaatgctggggggctcccatattgtcaccagaggctgccaaggccgtagcagtgactttagtcgaaagcgtttgcccagatgcagccggagcggagctcgcgtggcctcctgaagaacatgcaagagccacagtcgagcgggatttgcgcattggacggaggttcagggagcagcctctgctgtttgagttgttgaaactcgtggccgcagctcctcctgcgctctgctactgctcagtgctgctgcgcggtctgttagctgcactgttgggacactgggaggcttctaggcatccagacactacacactcgccctggcatctcgaagctagctgcactcttgtcgccgtcatggcggaaggttcactcctgccacccgctctggggaatatgcatgaagtatttagtcaactcgccccgttcgaggtaaggctcctgctcctgagtgtctgggggtttctgagagagcatggccctttgccgcagaagtttatctttcagtctgagagaggacggtttatccgcgatttttcacgggagggggggggagaaggcggaccccatctggcggtactgcactctgtgctgcacaggaatatcgataggcttgggctcttctctggtcgatttcaagccccatccccatctactctcctgcggcagggaacttag

SEQ ID NO: 219355 - DNA, 3285 bp, Artificial Sequence
  derived and/or modified sequence
atgcgccgcctgcgctccgccgctcgcgcctcgggctcggctcgggctccgggatgtccgcgctgtgcgaccctcccggggccccagggccacctgggcctgccccggccacccacggtcccgcgcctctcagtgctcaggagctgtcccaggaaatcaaggcttttctgactggcgtagaccccattctgggccaccaactctcagcccgggaacatgctcgctgtggtcttctcctgctccgttctttgccacctgctcgggctgctgtgcttgaccacttgagaggtgtctttgatgagagtgtccgggcccacctggctgccctggatgaaacccctgtggctggtccacctcacctccgtccacctccaccctctcatgtccctgctggtggacctggtctagaggatgtggttcaggaagtgcagcaggtgctgtctgagtttatccgggccaacccaaaggcctgggcacctgtgattagtgcatggtccattgacctcatggggcaactgagcagcacgtactcaggccagcaccagcgtgttccccacgctactggcgctcttaatgaactgctacagctgtggatgggttgtagggccacgcgtacattaatggacatctatgtgcagtgcctctcggctctcattggtagctgcccagatgcgtgtgtggatgccttgctggatacctctgttcagcattctccacactttgactgggttgtggcacatattggctcctcttttcctggcaccatcatttcccgggttctctcctgtggccttaaggacttttgtgtccatggtggggctggaggtggagctggcagtagtggtggaagctcttctcagaccccctctacagaccccttccctggatctcctgccattcctgcggagaaacgggtgcccaagattgcctcagttgtaggcatcctaggtcacctggcctcccgccacggagatagcatccgacgggagctcctgcgaatgttccatgatagcctggcagggggatctggaggccgcagtggggacccctcccttcaggccacggttccgttcctactgcagctggcagtcatgtcaccagctttgctgggcactgtctctggagagcttgtggattgcctcaagcccccagctgtgctgagccagctgcagcaacaccttcaaggattcccccgagaggagctggacaacatgttgaacctggctgtgcacctggtgagccaggcctctggggcaggtgcctaccgcttgctgcagttcctggtggacacagctatgcctgcttcggtcattaccacccagggcctggctgtgccagacaccgtgcgtgaggcttgtgaccggctaatccagctgctgctgctgcacctgcaaaaactggttcatcaccggggagggtctcctggggaaggggtgctaggcccgcccccacctccccgcttggtgccctttttagatgcgctcaaaaaccatgttggagagctgtgtggagagacgttacgattggaacggaagcgcttcctctggcagcaccagctcttgggcctgctgtctgtctatacccggcctagctgtggacctgaggccttgggccatctgctgagccgagcccgaagccctgaagagttgagtttggccacccagttatatgcagggctagtggtcagcctctctggcctcctgcccctggctttccgaagctgtctggctcgggtgcatgcagggacattacagcctcccttcacggcccggttcctgcgcaacttggcactgctagtagggtgggaacagcagggtggcgagggccctgcagccctaggggcgcactttggggaatctgcctcagcccatctgtctgacctggctcctctcctgctacatcctgaggaggaagtagctgaagctgctgcctctctcctggccatttgtccctttccttctgaagccttatccccctcccagctcctgggactggtaagggctggggtgcaccgcttctttgcctctctgaggctgcatggacccccaggtgtggcctcagcctgtcagcttctcacccgcctgtctcagacatccccagctgggctcaaggctgtcctgcagctgctggttgaaggagccttacatcgaggcaacacagaactgtttggtgggcaagtagatggggacaatgagactctctcagttgtttcagcttctttggcttctgcctccctgttggacactaaccggaggcacactgcagctgtgccaggtcctggagggatttggtcagttttccatgctggagtcatcggccgtggcttaaagccacccaagtttgtccagtcacgaaatcagcaggaagtgatctataacacccagagcctcctcagcctcctggttcactgctgcagtgccccagggggcactgaatgtggggaatgctggggggcacccatcttgagtccagaggcagccaaagcagtggcagtgaccttggtggagagtgtgtgtcccgatgcagctggtgcagagctggcctggccccccgaggaacacgcccgggccaccgtggagcgggatctccgcattggccggcgcttccgcgaacagcccctgctctttgagctgttaaagctggtagcagctgcacccccagccctgtgctactgttccgtgctgcttcgggggctgctggccgccctcttgggccattgggaagcctctcgccaccctgacacgacccactccccctggcacctggaggcatcctgcaccttagtggctgtcatggctgagggaagcctcctgcctccggccctgggtaatatgcatgaagtatttagccaactggcacctttcgaggtgcgtctgctgctgctcagtgtctggggttttctccgggagcatgggcccttgcctcagaagttcatcttccaatcagagcggggtcgcttcattcgggacttctccagggagggtggaggtgagggtggaccccatctggctgtgctgcacagtgtcctccaccgcaacatcgaccgcctaggtcttttctctggccgtttccaggcaccttcaccgtccactctccttcgacaggggacgtagccttttcttgctctggaagcccagggaggttgagcagtgagagagggaagggactaacgtgctccggaagggtggaggtttctcttctaagtccttggtctaaagagcgctgtcacttttttctctcccacttttttttttctaaataaaatttgccaacttgagaaaacca

SEQ ID NO: 219356 - DNA, 3060 bp, Artificial Sequence
  derived and/or modified sequence
atgtctgccctgtgtgaccccccaggggcccctggccccccaggccctgccccagccacccacggccctgcccccctgagcgcccaggagctgagccaggagatcaaggccttcctgactggagtggaccccatcctgggccaccagctgagcgcccgggagcacgcccgctgtggcctgctgctgctgcggagcctgcccccagcccgggctgctgtgctggaccacctgcggggcgtgtttgatgagagcgtgcgggcccacctggccgccctggatgagacccctgtggccggccccccccacctgcggcccccaccacccagccacgtgcctgctgggggccctggcctggaggatgtggtgcaggaggtgcagcaggtgctgtctgagttcatccgggccaaccccaaggcctgggcccctgtgatcagcgcctggagcattgacctgatgggccagctgagcagcacctacagcggccagcaccagagggtgccccacgccaccggggccctgaatgagctgctgcagctgtggatgggctgccgggccaccaggaccctgatggacatctacgtgcagtgcctgagcgccctgattggcagctgcccagatgcctgtgtggatgccctgctggacacctctgtgcagcacagcccccactttgactgggtggtggcccacatcggcagcagcttccctggcaccatcatcagccgggtgctgagctgtggcctgaaggacttctgtgtgcatggaggagctgggggcggggccggcagcagcggcggcagcagcagccagacccccagcacagaccccttccctggcagccctgccatcccagctgagaagagggtgcccaagatcgcctctgtggtgggcatcctgggccacctggccagcagacatggagacagcatccggcgggagctgctgaggatgtttcatgacagcctggccggcggcagcggcggccgcagcggggaccccagcctgcaggccaccgtgcccttcctgctgcagctggccgtgatgagccctgccctgctgggcaccgtgtctggagagctggtggactgcctgaagcccccagctgtgctgagccagctgcagcagcacctgcagggcttcccccgggaggagctggacaacatgctgaacctggccgtgcacctggtgtcccaggccagcggggccggggcctaccgcctgctgcagttcctggtggacacagccatgcctgccagcgtcatcaccacccagggcctggccgtgcctgacacagtgcgggaggcctgtgacaggctcatccagctgctgctgctgcacctgcagaagctggtgcaccaccggggcggcagccctggagagggcgtgctgggccccccacctccaccccggctggtgcccttcctggatgccctgaagaaccacgtgggggagctgtgtggggagaccctgcggctggagaggaagcgcttcctgtggcagcaccagctgctgggcctgctgtctgtgtacacccggcccagctgtggccctgaggccctgggccacctgctgagccgggcccggagccctgaggagctgagcctggccacccagctgtatgccggcctggtggtgtccctgagcggcctgctgcccctggccttccgcagctgcctggcccgggtgcatgctggcaccctgcagccccccttcaccgcccgcttcctgaggaacctggccctgctggtgggctgggagcagcagggcggggagggccctgctgccctgggcgcccactttggagagagcgccagcgcccacctgagtgacctggcccccctgctgctgcaccctgaggaggaggtggccgaggccgccgccagcctgctggccatctgccccttccccagcgaggccctgagccccagccagctgctgggcctggtgcgggccggcgtgcaccgcttctttgccagcctgcggctgcacggccccccaggagtggccagcgcctgccagctgctgacccggctgagccagaccagccctgctggcctgaaggctgtgctgcagctgctggtggagggcgccctgcaccggggcaacacagagctgtttggaggccaggtggatggagacaatgagaccctgtctgtggtgtctgccagcctggccagcgccagcctgctggacaccaacagaagacacacagctgctgtgcccggccctgggggcatctggagcgtcttccacgccggggtcatcggccggggcctgaagccacccaagtttgtgcagagcaggaaccagcaggaggtgatctacaacacccagagcctgctgagcctgctggtgcactgctgcagcgcccctgggggcacagaatgtggggagtgctggggcgcccccatcctgagccctgaggccgccaaggctgtggccgtgaccctggtggagagcgtgtgcccagatgctgctggagctgagctggcctggcccccagaggagcacgcccgggccaccgtggagcgggacctgagaattggaagacgcttccgggagcagcccctgctgtttgagctgctgaagctggtggccgccgcccccccagccctgtgctactgcagcgtgctgctgcggggcctgctggccgccctgctgggccactgggaggccagccgccacccagacaccacccacagcccctggcacctggaggccagctgcaccctggtggccgtgatggccgagggcagcctgctgcccccagccctgggcaacatgcatgaggtgttcagccagctggccccctttgaggtgcggctgctgctgctgtctgtgtggggcttcctgcgggagcacggccccctgccccagaagttcatcttccagagcgagcggggccgcttcatccgggacttcagccgggagggcggcggggagggcggcccccacctggccgtgctgcacagcgtgctgcacaggaacatcgaccggctgggcctcttcagcggccgcttccaggcccccagccccagcaccctgctgcggcagggcacctag

SEQ ID NO: 219357 - DNA, 3060 bp, Artificial Sequence
  derived and/or modified sequence
atgagcgccctgtgcgacccccccggcgcccccggcccccccggcccagcaccagctacccatggcccagccccgctttcggctcaggagctgagccaggagatcaaagcattcttgactggcgtcgaccctatcctcgggcatcagttatccgctagggaacacgctaggtgcgggctgctgctgctccggagccttccccccgcccgggcggccgttctggaccatctccggggcgtgttcgatgagtctgtgcgcgctcatctcgccgctctggacgagacaccagtcgccggccctcctcatctgaggccgccacccccttctcatgtccccgctggcggtcctggcctggaagacgttgtccaagaagtccagcaagttctctctgagtttatccgcgccaatccaaaagcctgggccccggtaatctctgcctggagcattgatctcatggggcagctcagctcaacctactcaggccagcaccagagagtgcctcacgccactggcgctctcaatgagctcctgcaactatggatgggttgccgagccacgaggaccctgatggacatttacgtacagtgtctatcggcactgataggttcatgcccagacgcatgtgttgacgctctgctggacacctctgtgcagcattccccccattttgactgggtcgtggcccacatcggatcaagcttcccgggaacaatcattagcagggtgctgtcctgcggccttaaagacttctgtgtgcacggcggagcagggggcggggctggcagttcgggagggtcttcctcacagacaccctctaccgacccttttccgggaagcccggccattcccgctgagaaaagggtgcctaaaatagcttccgtggttggaatcctgggtcacctggcctcgcgccatggggattccattcggcgcgagctgcttagaatgttccacgattccctggccggaggaagcggcgggagatcgggcgatccctcgttacaggccacagtgccctttttgctgcagctggcggtgatgtctcctgctctcctcgggacagtgagtggtgagctggtagattgtctcaagccccctgctgtcttgtctcagctgcaacagcatttacagggtttccctagagaggaactcgacaacatgcttaaccttgccgtgcatctcgtgagtcaggcctccggggcaggagcatataggttactgcagttcctagtggatacggcaatgcctgccagcgtaatcaccacacagggcctggctgtcccagacacagtacgtgaggcttgcgatcggctcatccagcttctgctgctccatctgcagaagctggtgcatcatcggggtggtagtcccggggaaggtgtcctcgggcccccccccccgccccgcctggttccatttctggacgcactgaaaaaccacgtcggagaactgtgcggtgagactctcaggctggaacgcaagcgcttcctgtggcagcaccagctgctcgggctcttatcggtgtacacacgcccatcctgcggccccgaggcgctggggcaccttctatcccgcgctcggtcccctgaagagttgtctctggctacccagctgtacgccggccttgtggttagcctgtccggcctgttgcctttagccttcagaagctgcttagcccgcgtacacgcaggcaccttgcagcctccttttactgccaggtttttacgcaaccttgccctgctggtcggctgggaacagcaaggtggagagggcccagctgctctgggagcacactttggggagagcgcaagtgcccatctctcagacctcgcacccctcttgctgcaccctgaggaagaagtagccgaagcagctgcatctttacttgcaatctgtccgttcccttctgaagcgttatcacctagccagctgctgggtcttgtgagggctggtgtccaccgcttttttgcgtccctacgactgcacggccctccaggcgtggccagcgcttgccagctgctcacccggctctctcagactagtcccgccggattgaaagccgtcctgcagctgctagtggaaggggcgttgcacagaggaaacaccgagctgtttggaggccaggtagatggggacaatgagactctctccgtcgtgtccgcctctcttgcctcagcatcactgcttgacacaaatagaaggcacacagccgcggtccccggacctgggggcatttggtccgtatttcacgctggggtgatcggacgcggtctgaagcctcctaagttcgttcagagtcgtaaccaacaggaagtcatctacaacacccaatccctgctgtccctccttgtgcattgctgctccgcgcctggcggcactgagtgcggcgagtgctggggtgctcctatccttagcccagaggccgctaaagcggtggcagtgaccttagtggagtctgtgtgcccggacgcggcaggcgcagagctggcctggccgcccgaagagcacgcacgcgccacagtagaaagagacctccgtatcggcaggaggtttcgagagcaaccactgctgttcgagctgttgaagttggtggcagcagcacccccggcactgtgttactgctcagttttactccgaggtctgttagccgctctccttggccactgggaagcttctcggcatccagacactacacatagcccctggcacctagaggcaagttgcacgctggttgccgtaatggccgaaggctctcttttgccgcccgcgctcggcaacatgcacgaggtgttctctcagcttgctccatttgaggtaagactgctcctgctctctgtatggggtttcctcagggagcacgggccgcttccccagaagtttatattccagagtgagcgtggcaggttcatacgggatttttcgcgagaaggaggtggcgagggaggtccgcacctcgctgtactccactctgttttgcaccgcaacattgatcgtttaggtctgttctccggcagatttcaggccccctctcctagcacccttctgcgccagggtacttag

SEQ ID NO: 219358 - DNA, 3060 bp, Artificial Sequence
  derived and/or modified sequence
atgtccgcgctatgtgatcccccaggcgcaccgggaccccctggacccgcaccggctacccacgggcctgcgccactctctgctcaggaactgtcgcaagaaatcaaagcattcctgacaggggtggatcccatcctcgggcatcagctgagcgccagggagcacgcaaggtgcggtttactgctccttagatcgttgccgcctgctagggctgcagttcttgatcatctccgaggcgtgttcgatgagagtgtccgcgcacatcttgcagcactcgatgagacaccggttgcaggccctccccacctcagacccccaccgccttcccacgtcccggctggtggaccagggctggaggacgtggtgcaggaagtacaacaggtgctctccgagttcataagagcgaatccgaaggcttgggcccctgtgatatcagcgtggagcatcgatcttatggggcagctgtccagcacttactccggccagcaccagcgggtgccccacgccactggcgcacttaacgagctgctccagctgtggatggggtgtagagctactcgcaccctcatggacatctacgtgcagtgtctctcggcattgataggtagttgtccggacgcttgcgtcgacgccctgctggatacctcagtgcagcacagcccgcacttcgactgggtggtcgctcacattggatctagctttccgggtacaatcatttcaagagtattgagctgcggactcaaagacttttgtgtccatggcggtgccggaggtggggctggatctagcggcggaagtagcagccagactcctagcacagaccctttccccggaagccccgctatcccagctgaaaagagagtacctaaaatagctagcgtggtcgggatcctgggtcaccttgcgtccaggcacggcgacagcattagaagagagttactgagaatgttccacgatagcctcgcaggcggatccggcggacgctctggggacccctccctccaagccacagtgcccttcttactacagctcgcggtgatgtctccagcacttctgggcacagtgagtggggaacttgtggactgcctgaaaccgccagccgtgctgagccagctacaacaacatcttcagggtttccccagggaagagctggacaatatgcttaacctggctgtgcacctggtgtcccaggcatcaggcgcaggcgcatacaggttattgcaattcttggttgatacggcgatgccagcctctgtaatcacaacccagggccttgccgtccccgataccgttcgcgaagcctgtgaccggttaatccaactgttgctgctacacctgcaaaagctggtgcaccaccgcggtgggtctcctggtgaaggggtcctggggccaccgcctccaccgagactggtgccttttctagatgccttgaagaaccatgtgggggagctttgcggagagactctgcggttggagagaaaaaggttcctgtggcagcatcaattgctgggactgctttcagtttataccaggccgtcgtgcggtcctgaggccctcggccacctcttaagcagggcccgaagtcctgaagaactcagcctggccacacagctgtacgccggtctcgtggtgtcccttagtggattgctgccactggcatttcgctcgtgtctcgctcgggtgcacgcagggaccttgcagccacccttcactgcaagatttctgaggaatctggcgctgctggtgggctgggaacaacaggggggagagggccctgctgccctgggggctcattttggcgaatctgcaagtgctcacctgagtgatcttgctccactccttctgcatcctgaggaagaagtggccgaggccgctgcatccttgcttgccatttgcccttttccatcagaggcactgagcccctcgcagctgctgggattagtacgcgcaggtgtacacagattcttcgcctcgctgcgcctgcacgggcctcccggagtggccagcgcttgccagttgcttactagactgtcacaaacaagtcccgctggtttgaaagccgtcctgcagctgctggtggagggggctctgcacaggggtaacacggaactatttggcggtcaagtcgatggtgataacgaaactctgtctgtggtcagcgcctctctggcttctgcttctcttctggacaccaatcgacggcacaccgccgctgtaccgggtcccggagggatttggtccgtattccacgcaggagtgatagggaggggtctaaaacctccaaagttcgtgcagagcaggaatcagcaagaggtgatatataatacacagagtctcctgtcccttctagtccactgctgctcagctccaggagggactgagtgcggcgaatgttggggagctcccattctttccccagaggctgctaaagcagtagcagtgacactggtcgagagcgtttgccccgatgccgctggagctgagctggcatggccgccagaggagcatgctcgagcaactgttgaacgggatttgcgtatcgggaggcgcttcagagaacagccacttctcttcgagctactcaaacttgttgccgcagcgcctccggctctgtgctattgttcagtgctgctgcggggacttctcgcagcactgctgggccactgggaagcctctagacatccagatactacacattccccctggcatctggaagcctcatgtactctcgtggcggtgatggctgagggaagcctcttaccgccagcattaggtaatatgcacgaagtgttttcacagctcgcaccgtttgaggtgcgtctgctccttcttagtgtgtgggggtttctccgggagcacggacctctgccccagaaatttattttccagagcgaacggggtcggtttatccgcgatttctctcgagagggcggaggggagggaggcccacatcttgcagtgcttcactccgttttacatcgaaatatcgaccggcttggactgttttccgggcgtttccaggcacccagccctagtacacttctccgccagggcacttag

SEQ ID NO: 219359 - protein, 679 aa, Artificial Sequence
  derived and/or modified sequence
LGQFEQPTGYMENSVSYSAIEDVQLLSWENAPKYCLQLTIPGGTVLLQAANSYLRDQWFHSLQWKKKIYKYKKVLSNPSRWEVVLKEIRTLVDMALTSPLQDDSINQAPLEIVSKLLSENTNLTTQEHENIIVAIAPLLENNHPPPDLCEFFCKHCRERPRSMVVIEVFTPVVQRILKHNMDFGKCPRLRLFTQEYILALNELNAGMEVVKKFIQSMHGPTGHCPHPRVLPNLVAVCLAAIYSCYEEFINSRDNSPSLKEIRNGCQQPCDRKPTLPLRLLHPSPDLVSQEATLSEARLKSVVVASSEIHVEVERTSTAKPALTASAGNDSEPNLIDCLMVSPACSTMSIELGPQADRTLGCYVEILKLLSDYDDWRPSLASLLQPIPFPKEALAHEKFTKELKYVIQRFAEDPRQEVHSCLLSVRAGKDGWFQLYSPGGVACDDDGELFASMVHILMGSCYKTKKFLLSLAENKLGPCMLLALRGNQTMVEILCLMLEYNIIDNNDTQLQIISTLESTDVGKRMYEQLCDRQRELKELQRKGGPTRLTLPSKSTDADLARLLSSGSFGNLENLSLAFTNVTSACAEHLIKLPSLKQLNLWSTQFGDAGLRLLSEHLTMLQVLNLCETPVTDAGLLALSSMKSLCSLNMNSTKLSADTYEDLKAKLPNLKEVDVRYTEAW

SEQ ID NO: 219360 - protein, 679 aa, Artificial Sequence
  derived and/or modified sequence
MGQAAEPTGYMENSVSYSAIEDVQLLSWENAPKYCLQLTIPGGTVLLQAANSYLRDQWFHSLQWKKKIYKYKKVLSNPSRWEVVLKEIRTLVDMALTSPLQDDSINQAPLEIVSKLLSENTNLTTQEHENIIVAIAPLLENNHPPPDLCEFFCKHCRERPRSMVVIEVFTPVVQRILKHNMDFGKCPRLRLFTQEYILALNELNAGMEVVKKFIQSMHGPTGHCPHPRVLPNLVAVCLAAIYSCYEEFINSRDNSPSLKEIRNGCQQPCDRKPTLPLRLLHPSPDLVSQEATLSEARLKSVVVASSEIHVEVERTSTAKPALTASAGNDSEPNLIDCLMVSPACSTMSIELGPQADRTLGCYVEILKLLSDYDDWRPSLASLLQPIPFPKEALAHEKFTKELKYVIQRFAEDPRQEVHSCLLSVRAGKDGWFQLYSPGGVACDDDGELFASMVHILMGSCYKTKKFLLSLAENKLGPCMLLALRGNQTMVEILCLMLEYNIIDNNDTQLQIISTLESTDVGKRMYEQLCDRQRELKELQRKGGPTRLTLPSKSTDADLARLLSSGSFGNLENLSLAFTNVTSACAEHLIKLPSLKQLNLWSTQFGDAGLRLLSEHLTMLQVLNLCETPVTDAGLLALSSMKSLCSLNMNSTKLSADTYEDLKAKLPNLKEVDVRYTEAW

SEQ ID NO: 219361 - protein, 586 aa, Artificial Sequence
  derived and/or modified sequence
MALTSPLQDDSINQAPLEIVSKLLSENTNLTTQEHENIIVAIAPLLENNHPPPDLCEFFCKHCRERPRSMVVIEVFTPVVQRILKHNMDFGKCPRLRLFTQEYILALNELNAGMEVVKKFIQSMHGPTGHCPHPRVLPNLVAVCLAAIYSCYEEFINSRDNSPSLKEIRNGCQQPCDRKPTLPLRLLHPSPDLVSQEATLSEARLKSVVVASSEIHVEVERTSTAKPALTASAGNDSEPNLIDCLMVSPACSTMSIELGPQADRTLGCYVEILKLLSDYDDWRPSLASLLQPIPFPKEALAHEKFTKELKYVIQRFAEDPRQEVHSCLLSVRAGKDGWFQLYSPGGVACDDDGELFASMVHILMGSCYKTKKFLLSLAENKLGPCMLLALRGNQTMVEILCLMLEYNIIDNNDTQLQIISTLESTDVGKRMYEQLCDRQRELKELQRKGGPTRLTLPSKSTDADLARLLSSGSFGNLENLSLAFTNVTSACAEHLIKLPSLKQLNLWSTQFGDAGLRLLSEHLTMLQVLNLCETPVTDAGLLALSSMKSLCSLNMNSTKLSADTYEDLKAKLPNLKEVDVRYTEAW

SEQ ID NO: 219362 - DNA, 2040 bp, Artificial Sequence
  derived and/or modified sequence
ctcggacaattcgagcaaccgactggatatatggaaaatagcgtgtcatattcggctatcgaggacgtgcagctgctgtcctgggagaacgcccctaaatattgtctgcaactgactataccgggaggtaccgtcctgcttcaggcagcaaatagctacctgcgcgaccaatggttccacagtctgcaatggaaaaagaaaatttataagtacaagaaggtcctgagtaacccaagtcgctgggaagtagtcctgaaggagattagaaccctggtggacatggccctgacgtccccactccaggatgatagcattaaccaagctcccctggaaatagttagtaaactgctgagtgaaaataccaatctaactacacaagaacatgagaatatcatcgttgccatcgctcccttactggagaacaatcacccgcccccggacctttgtgaatttttctgcaaacactgtagggaacgccctcgctcgatggttgtgatcgaggttttcacgcctgtggtccagagaatcctaaaacacaatatggacttcggcaagtgccccagattacgactcttcacacaggaatatatactcgctctgaacgaattgaatgcagggatggaagtcgttaagaagttcatacagagcatgcacggtccaaccgggcattgtcctcacccgcgcgttttacctaatcttgtggccgtgtgcttagctgctatatacagttgctacgaagagttcatcaatagcagagacaactctccttccttgaaggagatcagaaatgggtgccagcagccgtgcgatcggaaacccaccctgccacttcgactgctgcacccgtcccctgacctggtgagtcaagaagccaccctgtcagaagcccgtctgaagtccgtggtcgtagcatcctcagagattcacgtcgaagttgagaggacttccacagccaaaccagctttaaccgctagtgctggaaatgattccgaacccaacctgatcgactgcctcatggtcagtcccgcttgttctaccatgtccatcgagctcggtcctcaggccgatcgcaccctcggttgctatgtggagatactgaagctgctttctgattatgatgactggcggccgtctcttgcctcactccttcaacctattcccttccctaaagaagccttggctcatgagaaattcacaaaggaactcaagtacgtgatccaacgcttcgcggaggatccacgacaagaagtgcactcctgtctgttgagtgtacgtgcggggaaagatggatggttccagttatacagccctggcggggtcgcatgcgacgatgacggtgagctatttgcttctatggtccatattctaatgggttcgtgttacaaaacgaagaagtttctactaagcctcgccgaaaacaagttgggcccatgcatgcttctggctttgagaggaaaccagacaatggtagagattttgtgtcttatgcttgagtataacatcatcgataataacgacacacagctgcagatcattagcactctcgagtctacagatgtgggcaagcggatgtatgaacaactgtgcgatagacagagagagctgaaggagctccagcgaaagggcggccctacgcggttgactctgcctagcaaaagcacagatgctgacctcgccaggctcctgagttcagggagttttggtaacctagagaacctgtcgctcgcgtttacgaatgtcacttcggcttgcgcagagcacctgatcaaactcccctcactgaagcagttaaacctgtggtcaacgcagttcggagacgcgggactgaggttgctgagtgagcaccttaccatgctgcaagttctcaatctgtgcgagactcctgtcaccgatgccggcctcctcgccctgagcagcatgaaatcactgtgctccctgaacatgaacagcaccaaattgtctgccgatacatacgaagacctcaaggcaaaacttcccaacttgaaggaggtggatgtccgctataccgaggcttggtag

SEQ ID NO: 219363 - DNA, 2040 bp, Artificial Sequence
  derived and/or modified sequence
atgggtcaggccgctgaaccgactgggtacatggagaatagtgtgtcgtattccgctatcgaagacgttcagcttctcagctgggaaaatgcccccaaatattgccttcagctgactatccctggtggcacggtgctgctgcaagcggccaactcttatttgagggaccagtggttccacagcttgcagtggaaaaagaaaatatataagtataagaaggttctgagcaaccccagcaggtgggaggttgtcctgaaagaaatacgcactctcgtcgatatggccctgacaagtcctctgcaggacgactccatcaaccaagcacccctggagatcgtgtccaagcttctgtcagagaacactaatttgaccacccaagaacacgagaacatcatcgtcgcaatagctcctttgctggaaaataaccaccctccacctgatctctgtgagttcttttgcaagcactgccgcgaacgcccgcgctctatggtcgtgatcgaggtgttcacccccgtcgtccagagaatactgaagcataacatggattttggaaagtgcccaagattacggttgtttacccaggagtacattttagcgctcaatgaactgaacgcaggtatggaagtcgttaagaaattcattcagtcaatgcacgggccaaccggccactgcccccaccccagggttctccccaatctggtggcggtgtgcctggcagccatctactcgtgctatgaggagtttattaattccagagacaacagcccctcgctcaaggagatacgaaatgggtgccagcagccatgcgacagaaagcccactctaccccttagactgctacaccccagtccagaccttgtgtcacaggaggccactcttagtgaggctcggctgaaatctgtggttgtcgcatcgtccgagatacatgtggaggtggagcgcacgagcacagcaaagccagccctgaccgcatcagccgggaacgatagcgagccaaatcttatcgactgcttgatggtgagcccggcttgttccaccatgtcaatcgagctagggccccaggccgaccgcaccctgggttgctacgttgaaattttgaaattgctgtccgactatgacgattggcgcccgtccttggcctctctcttgcagcccatccctttcccaaaggaggccctggcgcacgagaagttcaccaaagagctcaagtacgttatccagcggtttgccgaagacccacgtcaagaagtgcattcttgccttctctccgtgcgcgcaggcaaagatgggtggttccaactctatagcccaggcggggtcgcttgtgacgatgacggggaacttttcgccagcatggtccacattctgatgggctcatgttataaaaccaagaagttcctgctctcactggccgaaaacaagctcggtccttgtatgctgttagccctccgaggaaatcagacaatggtggagattctttgcttgatgctagaatacaacatcatcgacaataatgatactcaactccagataattagcactctcgagtcaactgacgtcggcaagaggatgtacgagcagctgtgcgaccggcagcgggaactcaaggagctccagagaaagggaggaccgacccgcctcacgctgccttcgaaatcaactgatgccgatctcgctcgactcctgtcaagcgggtccttcgggaacctcgaaaacctgtctctggcctttacgaacgtgacttcagcatgtgccgagcatcttattaagctcccctctttgaaacagctcaacctttggagcacccaattcggggatgctgggctaaggctcttgagcgagcatcttactatgctgcaggtgctgaacctgtgcgagacacccgtaaccgacgccggtcttctggcgctgagttctatgaagtctttgtgctccctgaatatgaatagcactaaactgtccgctgacacttacgaagatctcaaggcaaaactgccaaatctcaaagaggtcgatgttagatacaccgaagcctggtag

SEQ ID NO: 219364 - DNA, 2040 bp, Artificial Sequence
  derived and/or modified sequence
ctgggccagtttgagcagcccaccggctacatggagaacagcgtgtcctacagcgccattgaagatgtgcagctgctgtcctgggagaatgcccccaagtactgcctgcagctgaccatccctgggggcaccgtgctgctgcaggccgccaacagctacctgcgggaccagtggttccacagcctgcagtggaagaagaagatctacaagtacaagaaggtgctgagcaaccccagccgctgggaggtggtgctgaaggagatccgcaccctggtggacatggccctgaccagccccctgcaggatgacagcatcaaccaggcccccctggagatcgtgtccaagctgctgtctgagaacaccaacctgaccacccaggagcacgagaacatcatcgtggccatcgcccccctgctggagaacaaccaccccccaccagacctgtgtgagttcttctgcaagcactgccgggagcggcccaggtccatggtggtgattgaggtgttcacccctgtggtgcagaggatcctgaagcacaacatggactttggaaaatgtccccggctgcggctcttcacccaggagtacatcctggccctgaatgagctgaatgccggcatggaggtggtgaagaagttcatccagagcatgcacggccccaccggccactgcccccacccccgggtgctgcccaacctggtggccgtgtgcctggccgccatctacagctgctatgaggagttcatcaacagccgggacaacagccccagcctgaaggagatcagaaatggctgccagcagccctgtgacaggaagcccaccctgcccctgcggctgctgcaccccagcccagacctggtgtcccaggaggccaccctgtctgaggcccggctgaagtctgtggtggtggccagcagcgagatccacgtggaggtggagaggaccagcacagccaagccagccctgacagccagcgctggaaatgacagcgagcccaacctgattgactgcctgatggtgtccccagcctgcagcaccatgagcattgagctgggcccccaggccgacaggaccctgggctgctacgtggagatcctgaagctgctgagtgactatgatgactggaggcccagcctggccagcctgctgcagcccatccccttccccaaggaggccctggcccacgagaagttcaccaaggagctgaagtatgtgatccagagatttgctgaggacccccggcaggaggtgcacagctgcctgctgtctgtgcgggccggcaaggatggctggttccagctgtacagccctggaggagtggcctgtgatgatgatggagagctgtttgcctccatggtgcacatcctgatgggcagctgctacaagaccaagaagttcctgctgagcctggccgagaacaagctgggcccctgcatgctgctggccctgcggggcaaccagaccatggtggagatcctgtgcctgatgctggagtacaacatcatcgacaacaatgacacccagctgcagatcatcagcaccctggagagcacagatgtgggcaagaggatgtatgagcagctgtgtgaccggcagcgggagctgaaggagctgcagaggaaaggaggccccacccggctgaccctgcccagcaagagcacagatgctgacctggcccggctgctgagcagcggcagctttggaaacctggagaacctgagcctggccttcaccaacgtgaccagcgcctgtgccgagcacctgatcaagctgcccagcctgaagcagctgaacctgtggagcacccagtttggagatgctggcctgcggctgctgtctgagcacctgaccatgctgcaggtgctgaacctgtgtgagacccctgtgacagatgctggcctgctggccctgagctccatgaagagcctgtgcagcctgaacatgaacagcaccaagctgtctgctgacacctatgaggacctgaaggccaagctgcccaacctgaaggaggtggatgtgcgctacacagaggcctggtag

SEQ ID NO: 219365 - DNA, 2040 bp, Artificial Sequence
  derived and/or modified sequence
atgggccaggccgctgagcccaccggctacatggagaacagcgtgtcctacagcgccattgaagatgtgcagctgctgtcctgggagaatgcccccaagtactgcctgcagctgaccatccctgggggcaccgtgctgctgcaggccgccaacagctacctgcgggaccagtggttccacagcctgcagtggaagaagaagatctacaagtacaagaaggtgctgagcaaccccagccgctgggaggtggtgctgaaggagatccgcaccctggtggacatggccctgaccagccccctgcaggatgacagcatcaaccaggcccccctggagatcgtgtccaagctgctgtctgagaacaccaacctgaccacccaggagcacgagaacatcatcgtggccatcgcccccctgctggagaacaaccaccccccaccagacctgtgtgagttcttctgcaagcactgccgggagcggcccaggtccatggtggtgattgaggtgttcacccctgtggtgcagaggatcctgaagcacaacatggactttggaaaatgtccccggctgcggctcttcacccaggagtacatcctggccctgaatgagctgaatgccggcatggaggtggtgaagaagttcatccagagcatgcacggccccaccggccactgcccccacccccgggtgctgcccaacctggtggccgtgtgcctggccgccatctacagctgctatgaggagttcatcaacagccgggacaacagccccagcctgaaggagatcagaaatggctgccagcagccctgtgacaggaagcccaccctgcccctgcggctgctgcaccccagcccagacctggtgtcccaggaggccaccctgtctgaggcccggctgaagtctgtggtggtggccagcagcgagatccacgtggaggtggagaggaccagcacagccaagccagccctgacagccagcgctggaaatgacagcgagcccaacctgattgactgcctgatggtgtccccagcctgcagcaccatgagcattgagctgggcccccaggccgacaggaccctgggctgctacgtggagatcctgaagctgctgagtgactatgatgactggaggcccagcctggccagcctgctgcagcccatccccttccccaaggaggccctggcccacgagaagttcaccaaggagctgaagtatgtgatccagagatttgctgaggacccccggcaggaggtgcacagctgcctgctgtctgtgcgggccggcaaggatggctggttccagctgtacagccctggaggagtggcctgtgatgatgatggagagctgtttgcctccatggtgcacatcctgatgggcagctgctacaagaccaagaagttcctgctgagcctggccgagaacaagctgggcccctgcatgctgctggccctgcggggcaaccagaccatggtggagatcctgtgcctgatgctggagtacaacatcatcgacaacaatgacacccagctgcagatcatcagcaccctggagagcacagatgtgggcaagaggatgtatgagcagctgtgtgaccggcagcgggagctgaaggagctgcagaggaaaggaggccccacccggctgaccctgcccagcaagagcacagatgctgacctggcccggctgctgagcagcggcagctttggaaacctggagaacctgagcctggccttcaccaacgtgaccagcgcctgtgccgagcacctgatcaagctgcccagcctgaagcagctgaacctgtggagcacccagtttggagatgctggcctgcggctgctgtctgagcacctgaccatgctgcaggtgctgaacctgtgtgagacccctgtgacagatgctggcctgctggccctgagctccatgaagagcctgtgcagcctgaacatgaacagcaccaagctgtctgctgacacctatgaggacctgaaggccaagctgcccaacctgaaggaggtggatgtgcgctacacagaggcctggtag

SEQ ID NO: 219366 - DNA, 2040 bp, Artificial Sequence
  derived and/or modified sequence
ctgggccagttcgagcagcccaccggctacatggagaacagcgtgagttattccgccatcgaggatgtacaactcctgtcttgggaaaacgcaccaaaatattgtctgcagcttactattcccggaggtacagtgctgctacaggccgctaatagctacctgcgggaccaatggtttcattcactgcagtggaagaaaaagatatataagtacaagaaagtgctgtctaacccaagcaggtgggaagtggtcctgaaggaaatccgtacactcgtggatatggctttaacatcgcctctccaagatgacagcatcaaccaagccccgttggaaatcgtgagcaagctgctgtctgaaaacacaaacttgacaacgcaagaacatgaaaacattattgtggctatcgcgcccttactcgagaataaccatcccccacctgatctttgcgagtttttctgcaaacactgtcgtgagagaccacgttccatggtcgttatcgaagtcttcactccggtagtgcagcggattctgaagcacaacatggattttggtaagtgtcccagactccggctgttcacccaggagtacatattggccctgaatgaactgaatgccggcatggaagtggttaaaaagttcatccagtcgatgcatggacccactggtcactgtcctcaccctcgggtactccccaaccttgtggctgtctgtctcgcagcaatatactcctgttatgaggagttcatcaacagtcgggataactctccatccctcaaggaaattcgaaacggatgtcaacaaccatgtgaccgcaaacctacgctcccactcaggctcctgcaccccagccctgacctcgtgagtcaggaggcaacgctcagtgaagccagacttaaaagcgtcgtagtggcatctagcgagatccatgtcgaggtggagagaaccagtaccgccaagccggccctgactgcctccgccggcaatgactcggaacctaacctgatagactgcttgatggtttcccccgcgtgttctacaatgtcaatcgagttagggccgcaggcagacagaacattgggttgttacgtggagatcctcaaactgttatctgattatgacgattggaggccgtctttggctagtctgcttcagccaatcccatttcccaaggaggccctcgcacatgaaaagtttactaaggaactgaaatacgtaattcagcggttcgctgaggacccccggcaagaggtgcatagctgtctgctaagtgtgagagcaggcaaagacgggtggttccaattatattccccaggcggcgtggcatgcgatgacgacggggagctgtttgcctctatggtgcatatcctgatgggaagctgctataagactaaaaagttcctgctgtctttggctgagaataagctggggccctgtatgttactggcactgcggggtaatcaaaccatggtggaaatcctgtgtctgatgttggaatataacataatcgataacaacgatacacaactgcagatcatatcaacgctggaaagcactgacgtgggcaagagaatgtatgagcagctgtgtgatcgacaacgcgaattaaaggagctgcaaagaaaaggcggacctacacgcctgacacttcccagcaagtcaaccgatgcagacttagcgcgcttgttgtcttcgggatcatttggtaaccttgaaaatctttctcttgctttcactaatgtgactagcgcgtgcgctgagcatctgatcaaactgccaagcctgaaacagttaaatctgtggtctacacagtttggggatgcgggcctaagattacttagtgaacatctaaccatgcttcaggtactcaatctttgcgaaacccctgttactgatgctggactcctggccctttccagcatgaaaagcctgtgctccttgaacatgaacagtaccaaactctcagccgacacgtacgaggatcttaaggctaagttgccaaaccttaaggaggtagatgtccgctacacggaagcatggtag

SEQ ID NO: 219367 - DNA, 2040 bp, Artificial Sequence
  derived and/or modified sequence
atgggccaggccgccgagcccaccggctacatggagaacagcgtgtcatatagtgcaattgaagacgtccagttactctcttgggagaatgctcctaaatattgccttcagcttactatcccaggagggaccgtgctgttacaggccgccaactcttacctgagggatcagtggttccactcattacagtggaaaaaaaaaatctacaaatataaaaaggttctctctaacccttcccgctgggaagtggtgttaaaggaaatcaggaccctggtagacatggctcttaccagcccacttcaggatgattctattaaccaggctcccctagaaatagtttccaagcttctctccgaaaacaccaatctcactacccaggaacacgagaatattatcgttgctatcgcccccctgctggagaataaccatccgcctcccgacttgtgcgagtttttctgtaaacattgccgtgaaaggccccgttcgatggtagtgatagaggtgttcaccccggtggtgcagcggatcctcaaacataacatggacttcggcaaatgtccaagactgcgacttttcacccaggagtatattctcgccctcaatgagttgaacgccggcatggaggtagtcaagaagttcatccagtccatgcacggccccactgggcattgtccgcacccacgtgttttgccgaacctagtcgccgtctgcttggcggctatctactcatgctacgaggagtttatcaatagtagggacaattctcccagcctgaaggagatccgtaatggatgccagcagccttgcgacaggaaacccactctccccttacgccttctccatcctagccccgacctggttagccaagaggctactctctctgaggctcgccttaagagtgttgtggtggcaagcagtgagatccacgtggaggtggagagaacatcaaccgccaagccagctctgaccgcctcagctggaaacgatagtgagcccaacctgatcgactgtctgatggtatccccagcatgctctacaatgagcatcgaactgggaccccaggccgaccgcacgctaggatgttacgtggagatcctgaaattgctgagcgactacgatgactggaggccgtctctcgcctcgctccttcaaccaatcccgtttccaaaggaggctctggcccatgagaagttcactaaagagctcaagtatgtcattcagcggtttgccgaggatcctagacaggaggtgcactcatgcctcctctccgtgcgcgcaggcaaggatggttggttccagctctactcccctggtggagtcgcttgtgacgacgacggcgagctgttcgcttctatggttcacatcctaatgggtagctgctacaaaaccaagaaattcttactgtctcttgctgaaaataagcttggtccctgcatgctgttggctttacgaggaaaccaaacaatggtcgagatcttatgtttgatgctggaatataacattatcgataacaatgacacgcagttacagataatttcaactctggagtctacggatgtcggcaagagaatgtatgagcaattgtgtgacaggcagagagagttgaaggagctgcagaggaaagggggtcccactcggcttaccctgccctctaaatctaccgatgccgaccttgctagactccttagtagcgggtccttcgggaacctcgagaacttgtcattggcctttacaaacgtgacatccgcgtgtgccgaacacttaattaaactcccctctctcaaacaactcaacctgtggtcaacacagtttggagatgctgggctgcggttgttgtctgagcacttaacaatgctgcaggtgctgaatctgtgtgaaacccctgtaacggatgccggcttactagcactcagttcgatgaaaagtttgtgctcgctgaatatgaactctaccaagcttagcgcagacacctacgaggacttaaaagccaagttacctaacctgaaggaagtggacgtccgctataccgaagcttggtag

SEQ ID NO: 219368 - DNA, 2040 bp, Artificial Sequence
  derived and/or modified sequence
ctgggccaatttgagcagcctactggatacatggagaactctgtctcttactccgccatcgaagatgtgcaactgctctcatgggaaaatgcacctaagtactgtttgcagctgacgatccccggtggaaccgtgcttctacaggccgctaattcttacctccgggatcagtggttccactctctgcagtggaaaaaaaaaatatataagtacaagaaggtcctttcgaatccaagccgttgggaggtcgtgttgaaggaaatacgtacccttgtggatatggctcttactagtccccttcaagacgactcaatcaaccaagcccctttagagattgtaagcaagctcctcagcgagaatacgaacttgacgacacaggagcacgagaatattattgttgccatcgctccacttcttgagaacaaccatccacctccagacttgtgcgagtttttttgtaaacattgccgggagagaccaagaagcatggtggttatagaagtgtttactccagttgttcagaggattctcaaacacaacatggattttggaaagtgtccacgcctccgacttttcacccaagagtatattctcgccctaaatgagcttaatgccggaatggaagtggtgaaaaagtttattcaaagtatgcacggaccaaccggtcactgccctcatccccgagtacttcccaatctggttgcagtgtgtctagctgccatctactcatgttacgaagagtttatcaatagtcgggacaattccccatccttgaaagagattaggaacggctgccaacaaccctgcgaccggaagccaaccctgccgttgcggctgcttcacccgagccccgaccttgtgagccaagaagcgacgctgtctgaggctaggctcaagtctgtcgtggtggcgagttccgagatccacgtggaagtagagcgtacgtcaacagccaagcctgcgctcactgcatcagccggtaacgacagcgagccgaatctgattgattgtctgatggtcagccctgcctgttcaacaatgagcattgagctgggccctcaagccgaccggacactcggttgttacgtggaaattctgaagcttctgtcagattacgacgattggcggccatctcttgcctccctgctacaacccataccttttcccaaggaggcactagcacatgaaaagttcacaaaggaattaaagtacgttatccagcggttcgcagaggacccgcgtcaggaggtgcattcgtgcctcctgtccgtccgcgctggcaaagatgggtggttccagctgtacagcccgggaggggtcgcatgcgatgatgatggagaactctttgcttccatggtgcatattctgatgggcagctgttacaaaactaaaaaattcttgctgtcgctcgctgagaacaaactggggccttgtatgctgcttgcactcagaggcaaccagacaatggttgagattctgtgtctgatgctcgagtacaacattatcgacaacaacgacacccaacttcagataatcagcactttagagtctactgacgtggggaaacggatgtatgaacagctttgcgacagacaacgggaactgaaggagcttcagcgtaaaggtggacccacccgcctgactctaccgtctaagagtactgatgcagatctggcaagactgctgtcctctggctccttcgggaacttggagaacctcagtttggcattcaccaacgttacatccgcgtgcgcagagcaccttattaagctgccttctctcaagcagctgaatctgtggagtacacagttcggtgatgctgggcttagactcctgagcgagcatttgaccatgttgcaggtgctaaacctgtgcgaaacaccagtgacagacgccggactgctagccctgagctctatgaaatctctgtgttctttgaatatgaattctaccaaattgtcagctgatacctacgaagatctcaaagctaagttgccaaatctaaaggaagtggacgtgcgttatactgaggcttggtag

SEQ ID NO: 219369 - DNA, 2040 bp, Artificial Sequence
  derived and/or modified sequence
atgggacaagcagccgaacccactggctacatggaaaactctgtgtcatactcagccatcgaggatgtacagttactgtcctgggagaacgctcctaagtactgtctgcaactgactatccctggcggtacagtcttgctccaagcggcaaactcatacctcagggatcagtggtttcatagcctccagtggaagaaaaaaatatacaagtataagaaggtccttagcaatccctcccgatgggaggtggtactgaaagagatacgcacactggtggatatggctctcacctcccctctccaggacgacagtataaaccaggccccacttgaaatcgtttccaagctactgtccgagaacaccaatctgactacacaggaacacgaaaatatcatagttgctatcgcgcctctgttggagaataatcaccctccaccagacctatgcgagtttttttgtaaacactgcagagagaggccccgatccatggtggtcattgaggtctttaccccagtcgtccagcgcatcctcaaacacaacatggacttcgggaaatgccctaggctgcgcttatttacccaggagtacatcctggccctgaacgaactgaacgccggaatggaggtggttaaaaaatttattcagtccatgcacggaccaactggccattgcccacaccctagggtgctgcccaatttagtcgcagtgtgcctcgctgccatctactcctgttatgaggagttcattaacagcagggataactctccaagtctaaaggagattcgaaatggctgccagcaaccgtgtgacagaaagccaacactgcctctgaggcttctgcatccctctccggacctcgtgagccaggaggcaaccctcagtgaggctagactgaaaagcgtagtcgtggcctcttccgagatacatgtcgaggtggagcgtacgagcacagccaagcccgctttaacagccagcgccggaaacgattccgaacccaatctcattgattgtctcatggtctcaccggcatgcagcaccatgagcatcgagctcggaccacaggctgatcgcaccttggggtgttacgttgagatcctaaaattgctctccgactatgatgattggcgaccctcccttgcttccctactgcagccaatccccttccctaaggaggctctggcgcatgagaagtttaccaaagaactcaaatatgtcatccagcggttcgcagaggatcccagacaagaggtccactcctgtcttctatccgttcgtgcagggaaagacggctggtttcaactgtacagccccggtggagtagcctgtgacgacgacggggaactctttgcttccatggtgcatatcctgatggggagttgctataaaaccaaaaaatttttgttaagcctcgcggagaataagttggggccatgtatgctacttgcattaagaggtaatcaaacaatggttgagatcttgtgtctcatgctcgaatacaatattatcgacaacaatgacactcaattgcagatcatatctaccctggaatcaaccgacgttggtaaacggatgtatgagcagttgtgcgacagacagagggagctgaaggaactgcagagaaagggcggacctactaggctaactctaccaagcaagtccaccgatgccgacctggctcgcttgttgagcagcgggtcttttgggaatcttgaaaacctgtctttagccttcacaaatgtcactagtgcctgcgccgagcatctgattaaacttccctccctcaagcaattgaacctgtggagtacacagtttggggatgcaggattgcgcttgttatctgagcacctgacgatgctgcaggttttgaatttatgcgaaactccagtaaccgatgccggtctgttggcattgtcgagtatgaagagtctctgctccttaaatatgaactcaacaaagctgtctgctgacacatacgaggatcttaaggccaagctccccaacctgaaagaggtggatgtgcgatacacagaagcatggtag

SEQ ID NO: 219370 - DNA, 4003 bp, Artificial Sequence
  derived and/or modified sequence
ttaggacagtttgagcagccaactgggtacatggaaaactcagtctcctacagcgcaattgaagacgttcagctgctgtcctgggagaatgccccgaagtactgtttacagctcacgattcctgggggaactgtcttactgcaggctgccaatagctacctgcgagaccagtggttccattctctgcaatggaagaaaaagatttacaaatataagaaagtgctgagtaacccaagccgctgggaagttgtcttgaaagagatccggaccctggtggacatggccctgacatcccccctgcaggatgactccatcaaccaggccccactggaaatcgtctcgaaactgctctcagagaacacaaacttgaccacccaggagcatgaaaacatcattgtggcaatcgctcctttgctggaaaacaaccacccaccaccagatctctgtgaattcttttgcaagcactgcagagagcggccccggtccatggtggtcatcgaggtgttcacccccgtggtgcagcgaatcctcaagcataacatggactttgggaagtgcccgcgactgaggctgtttactcaggagtacatccttgccttgaacgagctcaacgcggggatggaagtggtgaagaagttcattcagagcatgcacggccccacagggcactgcccccacccccgggtcctgcccaacctggtggccgtgtgcctggctgccatctactcctgctatgaagagttcatcaacagccgcgacaattccccaagcctgaaggaaatccggaacggctgccagcagccgtgcgaccggaagcccactttacctctgcgccttctgcaccccagcccggacctggtgtctcaggaagccacgctgtctgaggcccggctcaagtcggtggtcgtggcctccagtgagatccacgtggaggtggaacgcaccagcactgccaagccggcgctgacggccagcgcaggcaacgacagcgagcccaacctcatcgactgcctcatggtcagccccgcctgcagcaccatgagcatcgagctgggcccccaggccgaccgcacgctcggctgctacgtggaaatcctcaagctgctgtcagactatgatgactggagaccgtctctggccagtttgcttcaacccattccattccccaaagaagctctcgcacatgagaagttcaccaaggaactgaagtacgtgattcagaggttcgccgaagaccccaggcaagaggtccactcatgcctgctgagcgtgcgggccggcaaagatggctggttccagctctacagccccggaggggtggcctgcgacgatgacggggagctgttcgccagcatggtgcacatcctcatgggctcctgttacaagaccaaaaaattcctgctctccctggcagaaaacaagctgggtccctgcatgctcctggcactgagggggaaccagaccatggtggagatcctgtgcttgatgctggaatacaacatcatcgacaacaacgacacccaactgcagatcatctcaaccctggagagcacagacgtggggaagcgcatgtacgagcagctgtgtgaccggcagcgggagctgaaggagctgcaaaggaaaggcgggcccaccaggctaacactgccctccaagtccacagacgctgacttggctcgtttgctgagctccggctccttcggaaacctggagaacctcagtttggccttcaccaatgtaaccagtgcctgcgccgagcacctcatcaaactgccttcgctcaagcagctgaacctgtggtccactcagtttggagacgctggccttcggctcctgtcggaacacctcaccatgctccaggtgctgaacctgtgcgagaccccggtcacagacgctggcctgctggccctgagctccatgaagagtctctgcagtttaaacatgaacagcaccaagctctcagctgacacctacgaagatctgaaggccaagcttcccaatttgaaggaagtggacgtccgctacaccgaagcctggtgaagctcccagctcaaggcaggaagacgtttgcaaccgcgacaaaataactcttgactaacagccgcagagcagccggtcctggggtcccaccctggtgccctggctgtgagatagatggggagtctttctgggggcggaggggggagggggtggggagggggcccacaagcacgcccagcccccgccgaattcttttagcttcgtaattggaacctttgacctgatctaaagtggactttgtagcaacaagaggagcatcagcgggtcggggaggggtttgggggtgggctggggggtgggggaccctttgtggattttctttgcctttgtgtttgatgccgtcgtgtgggaaaagtcaactccgatgccaccattgcgggccggacgaaggatgctttcttcctagaggctccgagctgagctgcgaactcgccccccgcccttgggacaagaagacccagtcacatcactgcacccgtcctgtgtcctcaccattgctatgcaaagtgattcttgttgtacataagatttaaataatgcacctatttaagacatgttgacaaattgcgggtctgggacccgcctcttatttatgaagtctttgaccgtcccccccgcccgaccccaccgccctcccgcccccacctggcgtgtagtactgtataaaccagtcagctgtcgggttagtggtagtattattgttatttttttaaaggaaacaaacagacaacaaaaagaagaaaaaaaaaaagaacctccttggaaaaattaattgctttttcgtaatggattctctatgctaatgctctctcgtctgtctgtctgtctgcccactcccccacccaccactgtgcgtttctgatttccaaatgtctccaactccctcacgaggtggggctcaggctggaggaggagggattaagatccccttgctccactaaggcccaagctctttctctcggcaccttttagacttgaatgggaggctgctaacccgccctctccagtccaccccggtaaaagagctgttccccacccccagggagctcctgtccctgtcagcctttgctgtcccctgtccccaacggagactctgtcacccctgggctccccctgccatcgtgtgcttcacgtggccccatgcatgcccgcctctctgcatggtctcttgggaaaagagagatgtgtcgcctccgccagtccgactgccctccccaccccacccccgccaccccccacatgtgaccactgcaacgaagacactccttctgtccccacctgctccgaagacaaaccaacctccgtttcttttataaacagtcggctttttcttaataagccctcactgtacagaacagcccgttgatggtttatttggggtccccctctccccccagcccttttttctgttggtttagcacaaatacttccctcctccggcacctccaaacctaccccacagtcagtgtacttgttttatatatatttaatcttattcaatggaaaccatgcttttgtcgttttatactttgctaggtagactttattacccccccactatgccctcatttttttaaaaaaggaaaaaaaaaagaaactgggttccagtcttaattcattttccgtgccaggttttatttcgtgtgtgtgtgagtgtgttctgttttgtgttttgttttttgttgttgtttttagttgtttggttttcttttctttcccccctccggtcccatacttcacagcactctggtgcgggaagaagcagaagcaaaaaaaataaaaataaaaaaataaataaaaataaaaaaaataaaaaaggaaaaaaaaaaaagaagaaacaagacatgccacctttcccctcgcactgttgcttttcctgatggttaatactactgtcacgtagctgtgtacaaagagatgtgaaatactttcaggcaaaaataaactgtaagtgactcatcaa

SEQ ID NO: 219371 - DNA, 4131 bp, Artificial Sequence
  derived and/or modified sequence
ggcttcttggatgggctgggcgtgcatggcataaccgtttgagaacaacaaaccaagccggccgggctgccgctctgtttcctgcgaggagggaagttacagatctccgccctggcgtccggggaaggatgggacaggctgctgagccaactgggtacatggaaaactcagtctcctacagcgcaattgaagacgttcagctgctgtcctgggagaatgccccgaagtactgtttacagctcacgattcctgggggaactgtcttactgcaggctgccaatagctacctgcgagaccagtggttccattctctgcaatggaagaaaaagatttacaaatataagaaagtgctgagtaacccaagccgctgggaagttgtcttgaaagagatccggaccctggtggacatggccctgacatcccccctgcaggatgactccatcaaccaggccccactggaaatcgtctcgaaactgctctcagagaacacaaacttgaccacccaggagcatgaaaacatcattgtggcaatcgctcctttgctggaaaacaaccacccaccaccagatctctgtgaattcttttgcaagcactgcagagagcggccccggtccatggtggtcatcgaggtgttcacccccgtggtgcagcgaatcctcaagcataacatggactttgggaagtgcccgcgactgaggctgtttactcaggagtacatccttgccttgaacgagctcaacgcggggatggaagtggtgaagaagttcattcagagcatgcacggccccacagggcactgcccccacccccgggtcctgcccaacctggtggccgtgtgcctggctgccatctactcctgctatgaagagttcatcaacagccgcgacaattccccaagcctgaaggaaatccggaacggctgccagcagccgtgcgaccggaagcccactttacctctgcgccttctgcaccccagcccggacctggtgtctcaggaagccacgctgtctgaggcccggctcaagtcggtggtcgtggcctccagtgagatccacgtggaggtggaacgcaccagcactgccaagccggcgctgacggccagcgcaggcaacgacagcgagcccaacctcatcgactgcctcatggtcagccccgcctgcagcaccatgagcatcgagctgggcccccaggccgaccgcacgctcggctgctacgtggaaatcctcaagctgctgtcagactatgatgactggagaccgtctctggccagtttgcttcaacccattccattccccaaagaagctctcgcacatgagaagttcaccaaggaactgaagtacgtgattcagaggttcgccgaagaccccaggcaagaggtccactcatgcctgctgagcgtgcgggccggcaaagatggctggttccagctctacagccccggaggggtggcctgcgacgatgacggggagctgttcgccagcatggtgcacatcctcatgggctcctgttacaagaccaaaaaattcctgctctccctggcagaaaacaagctgggtccctgcatgctcctggcactgagggggaaccagaccatggtggagatcctgtgcttgatgctggaatacaacatcatcgacaacaacgacacccaactgcagatcatctcaaccctggagagcacagacgtggggaagcgcatgtacgagcagctgtgtgaccggcagcgggagctgaaggagctgcaaaggaaaggcgggcccaccaggctaacactgccctccaagtccacagacgctgacttggctcgtttgctgagctccggctccttcggaaacctggagaacctcagtttggccttcaccaatgtaaccagtgcctgcgccgagcacctcatcaaactgccttcgctcaagcagctgaacctgtggtccactcagtttggagacgctggccttcggctcctgtcggaacacctcaccatgctccaggtgctgaacctgtgcgagaccccggtcacagacgctggcctgctggccctgagctccatgaagagtctctgcagtttaaacatgaacagcaccaagctctcagctgacacctacgaagatctgaaggccaagcttcccaatttgaaggaagtggacgtccgctacaccgaagcctggtgaagctcccagctcaaggcaggaagacgtttgcaaccgcgacaaaataactcttgactaacagccgcagagcagccggtcctggggtcccaccctggtgccctggctgtgagatagatggggagtctttctgggggcggaggggggagggggtggggagggggcccacaagcacgcccagcccccgccgaattcttttagcttcgtaattggaacctttgacctgatctaaagtggactttgtagcaacaagaggagcatcagcgggtcggggaggggtttgggggtgggctggggggtgggggaccctttgtggattttctttgcctttgtgtttgatgccgtcgtgtgggaaaagtcaactccgatgccaccattgcgggccggacgaaggatgctttcttcctagaggctccgagctgagctgcgaactcgccccccgcccttgggacaagaagacccagtcacatcactgcacccgtcctgtgtcctcaccattgctatgcaaagtgattcttgttgtacataagatttaaataatgcacctatttaagacatgttgacaaattgcgggtctgggacccgcctcttatttatgaagtctttgaccgtcccccccgcccgaccccaccgccctcccgcccccacctggcgtgtagtactgtataaaccagtcagctgtcgggttagtggtagtattattgttatttttttaaaggaaacaaacagacaacaaaaagaagaaaaaaaaaaagaacctccttggaaaaattaattgctttttcgtaatggattctctatgctaatgctctctcgtctgtctgtctgtctgcccactcccccacccaccactgtgcgtttctgatttccaaatgtctccaactccctcacgaggtggggctcaggctggaggaggagggattaagatccccttgctccactaaggcccaagctctttctctcggcaccttttagacttgaatgggaggctgctaacccgccctctccagtccaccccggtaaaagagctgttccccacccccagggagctcctgtccctgtcagcctttgctgtcccctgtccccaacggagactctgtcacccctgggctccccctgccatcgtgtgcttcacgtggccccatgcatgcccgcctctctgcatggtctcttgggaaaagagagatgtgtcgcctccgccagtccgactgccctccccaccccacccccgccaccccccacatgtgaccactgcaacgaagacactccttctgtccccacctgctccgaagacaaaccaacctccgtttcttttataaacagtcggctttttcttaataagccctcactgtacagaacagcccgttgatggtttatttggggtccccctctccccccagcccttttttctgttggtttagcacaaatacttccctcctccggcacctccaaacctaccccacagtcagtgtacttgttttatatatatttaatcttattcaatggaaaccatgcttttgtcgttttatactttgctaggtagactttattacccccccactatgccctcatttttttaaaaaaggaaaaaaaaaagaaactgggttccagtcttaattcattttccgtgccaggttttatttcgtgtgtgtgtgagtgtgttctgttttgtgttttgttttttgttgttgtttttagttgtttggttttcttttctttcccccctccggtcccatacttcacagcactctggtgcgggaagaagcagaagcaaaaaaaataaaaataaaaaaataaataaaaataaaaaaaataaaaaaggaaaaaaaaaaaagaagaaacaagacatgccacctttcccctcgcactgttgcttttcctgatggttaatactactgtcacgtagctgtgtacaaagagatgtgaaatactttcaggcaaaaataaactgtaagtgactcatcaa

SEQ ID NO: 219372 - DNA, 2040 bp, Artificial Sequence
  derived and/or modified sequence
ctgggccagttcgagcagcccaccggctacatggagaacagcgtgagctacagcgccatcgaggacgtgcagctgctgagctgggagaacgcccccaagtactgcctgcagctgaccatccccggcggcaccgtgctgctgcaggccgccaacagctacctgagagaccagtggttccacagcctgcagtggaagaagaagatctacaagtacaagaaggtgctgagcaaccccagcagatgggaggtggtgctgaaggagatcagaaccctggtggacatggccctgaccagccccctgcaggacgacagcatcaaccaggcccccctggagatcgtgagcaagctgctgagcgagaacaccaacctgaccacccaggagcacgagaacatcatcgtggccatcgcccccctgctggagaacaaccaccccccccccgacctgtgcgagttcttctgcaagcactgcagagagagacccagaagcatggtggtgatcgaggtgttcacccccgtggtgcagagaatcctgaagcacaacatggacttcggcaagtgccccagactgagactgttcacccaggagtacatcctggccctgaacgagctgaacgccggcatggaggtggtgaagaagttcatccagagcatgcacggccccaccggccactgcccccaccccagagtgctgcccaacctggtggccgtgtgcctggccgccatctacagctgctacgaggagttcatcaacagcagagacaacagccccagcctgaaggagatcagaaacggctgccagcagccctgcgacagaaagcccaccctgcccctgagactgctgcaccccagccccgacctggtgagccaggaggccaccctgagcgaggccagactgaagagcgtggtggtggccagcagcgagatccacgtggaggtggagagaaccagcaccgccaagcccgccctgaccgccagcgccggcaacgacagcgagcccaacctgatcgactgcctgatggtgagccccgcctgcagcaccatgagcatcgagctgggcccccaggccgacagaaccctgggctgctacgtggagatcctgaagctgctgagcgactacgacgactggagacccagcctggccagcctgctgcagcccatccccttccccaaggaggccctggcccacgagaagttcaccaaggagctgaagtacgtgatccagagattcgccgaggaccccagacaggaggtgcacagctgcctgctgagcgtgagagccggcaaggacggctggttccagctgtacagccccggcggcgtggcctgcgacgacgacggcgagctgttcgccagcatggtgcacatcctgatgggcagctgctacaagaccaagaagttcctgctgagcctggccgagaacaagctgggcccctgcatgctgctggccctgagaggcaaccagaccatggtggagatcctgtgcctgatgctggagtacaacatcatcgacaacaacgacacccagctgcagatcatcagcaccctggagagcaccgacgtgggcaagagaatgtacgagcagctgtgcgacagacagagagagctgaaggagctgcagagaaagggcggccccaccagactgaccctgcccagcaagagcaccgacgccgacctggccagactgctgagcagcggcagcttcggcaacctggagaacctgagcctggccttcaccaacgtgaccagcgcctgcgccgagcacctgatcaagctgcccagcctgaagcagctgaacctgtggagcacccagttcggcgacgccggcctgagactgctgagcgagcacctgaccatgctgcaggtgctgaacctgtgcgagacccccgtgaccgacgccggcctgctggccctgagcagcatgaagagcctgtgcagcctgaacatgaacagcaccaagctgagcgccgacacctacgaggacctgaaggccaagctgcccaacctgaaggaggtggacgtgagatacaccgaggcctggtag

SEQ ID NO: 219373 - DNA, 2040 bp, Artificial Sequence
  derived and/or modified sequence
atgggccaggccgccgagcccaccggctacatggagaacagcgtgagctacagcgccatcgaggacgtgcagctgctgagctgggagaacgcccccaagtactgcctgcagctgaccatccccggcggcaccgtgctgctgcaggccgccaacagctacctgagagaccagtggttccacagcctgcagtggaagaagaagatctacaagtacaagaaggtgctgagcaaccccagcagatgggaggtggtgctgaaggagatcagaaccctggtggacatggccctgaccagccccctgcaggacgacagcatcaaccaggcccccctggagatcgtgagcaagctgctgagcgagaacaccaacctgaccacccaggagcacgagaacatcatcgtggccatcgcccccctgctggagaacaaccaccccccccccgacctgtgcgagttcttctgcaagcactgcagagagagacccagaagcatggtggtgatcgaggtgttcacccccgtggtgcagagaatcctgaagcacaacatggacttcggcaagtgccccagactgagactgttcacccaggagtacatcctggccctgaacgagctgaacgccggcatggaggtggtgaagaagttcatccagagcatgcacggccccaccggccactgcccccaccccagagtgctgcccaacctggtggccgtgtgcctggccgccatctacagctgctacgaggagttcatcaacagcagagacaacagccccagcctgaaggagatcagaaacggctgccagcagccctgcgacagaaagcccaccctgcccctgagactgctgcaccccagccccgacctggtgagccaggaggccaccctgagcgaggccagactgaagagcgtggtggtggccagcagcgagatccacgtggaggtggagagaaccagcaccgccaagcccgccctgaccgccagcgccggcaacgacagcgagcccaacctgatcgactgcctgatggtgagccccgcctgcagcaccatgagcatcgagctgggcccccaggccgacagaaccctgggctgctacgtggagatcctgaagctgctgagcgactacgacgactggagacccagcctggccagcctgctgcagcccatccccttccccaaggaggccctggcccacgagaagttcaccaaggagctgaagtacgtgatccagagattcgccgaggaccccagacaggaggtgcacagctgcctgctgagcgtgagagccggcaaggacggctggttccagctgtacagccccggcggcgtggcctgcgacgacgacggcgagctgttcgccagcatggtgcacatcctgatgggcagctgctacaagaccaagaagttcctgctgagcctggccgagaacaagctgggcccctgcatgctgctggccctgagaggcaaccagaccatggtggagatcctgtgcctgatgctggagtacaacatcatcgacaacaacgacacccagctgcagatcatcagcaccctggagagcaccgacgtgggcaagagaatgtacgagcagctgtgcgacagacagagagagctgaaggagctgcagagaaagggcggccccaccagactgaccctgcccagcaagagcaccgacgccgacctggccagactgctgagcagcggcagcttcggcaacctggagaacctgagcctggccttcaccaacgtgaccagcgcctgcgccgagcacctgatcaagctgcccagcctgaagcagctgaacctgtggagcacccagttcggcgacgccggcctgagactgctgagcgagcacctgaccatgctgcaggtgctgaacctgtgcgagacccccgtgaccgacgccggcctgctggccctgagcagcatgaagagcctgtgcagcctgaacatgaacagcaccaagctgagcgccgacacctacgaggacctgaaggccaagctgcccaacctgaaggaggtggacgtgagatacaccgaggcctggtag

SEQ ID NO: 219374 - protein, 560 aa, Artificial Sequence
  derived and/or modified sequence
MGSTDSKLNFRKAVIQLTTKTQPVEATDDAYDPVGYGIPYNHLLFSDYREPLVEEAAQVLIVTLDHDSASSASPTVDGTTTGTAMDDADPPGPENLFVNYLSRIHREEDFQFILKGIARLLSNPLLQTYLPNSTKKIQFHQELLVLFWKLCDFNKKFLFFVLKSSDVLDILVPILFFLNDARADQSRVGLMHIGVFILLLLSGERNFGVRLNKPYSIRVPMDIPVFTGTHADLLIVVFHKIITSGHQRLQPLFDCLLTIVVNVSPYLKSLSMVTANKLLHLLEAFSTTWFLFSAAQNHHLVFFLLEVFNNIIQYQFDGNSNLVYAIIRKRSIFHQLANLPTDPPTIHKALQRRRRTPEPLSRTGSQEGTSMEGSRPAAPAEPGTLKTSLVATPGIDKLTEKSQVSEDGTLRSLEPEPQQSLEDGSPAKGEPSQAWREQRRPSTSSASGQWSPTPEWVLSWKSKLPLQTIMRLLQVLVPQVEKICIDKGLTDESEILRFLQHGTLVGLLPVPHPILIRKYQANSGTAMWFRTYMWGVIYLRNVDPPVWYDTDVKLFEIQRV

SEQ ID NO: 219375 - protein, 788 aa, Artificial Sequence
  derived and/or modified sequence
MGSTDSKLNFRKAVIQLTTKTQPVEATDDAFWDQFWADTATSVQDVFALVPAAEIRAVREESPSNLATLCYKAVEKLVQGAESGCHSEKEKQIVLNCSRLLTRVLPYIFEDPDWRGFFWSTVPGAGRGGQGEEDDEHARPLAESLLLAIADLLFCPDFTVQSHRRSTVDSAEDVHSLDSCEYIWEAGVGFAHSPQPNYIHDMNRMELLKLLLTCFSEAMYLPPAPESGSTNPWVQFFCSTENRHALPLFTSLLNTVCAYDPVGYGIPYNHLLFSDYREPLVEEAAQVLIVTLDHDSASSASPTVDGTTTGTAMDDADPPGPENLFVNYLSRIHREEDFQFILKGIARLLSNPLLQTYLPNSTKKIQFHQELLVLFWKLCDFNKKFLFFVLKSSDVLDILVPILFFLNDARADQSRVGLMHIGVFILLLLSGERNFGVRLNKPYSIRVPMDIPVFTGTHADLLIVVFHKIITSGHQRLQPLFDCLLTIVVNVSPYLKSLSMVTANKLLHLLEAFSTTWFLFSAAQNHHLVFFLLEVFNNIIQYQFDGNSNLVYAIIRKRSIFHQLANLPTDPPTIHKALQRRRRTPEPLSRTGSQEGTSMEGSRPAAPAEPGTLKTSLVATPGIDKLTEKSQVSEDGTLRSLEPEPQQSLEDGSPAKGEPSQAWREQRRPSTSSASGQWSPTPEWVLSWKSKLPLQTIMRLLQVLVPQVEKICIDKGLTDESEILRFLQHGTLVGLLPVPHPILIRKYQANSGTAMWFRTYMWGVIYLRNVDPPVWYDTDVKLFEIQRV

SEQ ID NO: 219376 - DNA, 1683 bp, Artificial Sequence
  derived and/or modified sequence
atgggctctaccgactcaaaactaaactttagaaaggcagtgatccagctgacaactaaaacccaaccagtggaagctaccgacgacgcctacgacccagtggggtacggcattccctataatcacctgttgttcagcgattatcgggagccactggttgaggaggctgcacaagttctcatcgtgaccctggatcacgattcagcctcatccgcatcccctacagttgatggcacgactactggaacagccatggatgacgctgacccaccaggcccagagaacctcttcgtgaattacctgagcagaatccatcgcgaagaggactttcaatttatactgaagggaatagcacgtctccttagcaacccactcctacagacctatctgcccaacagtacaaaaaaaatccaattccaccaggagctcctggtcctgttttggaaactatgcgacttcaacaaaaaattcttattttttgtcctaaagagcagcgacgtactcgatatcctggtgcctattttgttctttctgaacgacgccagggcagaccagtctagagtggggttaatgcacatcggcgtgttcatccttctgctgctcagcggcgaaaggaactttggggtccggttgaataaaccctacagcattagggtgcccatggatatcccagtgttcactggtacccatgctgacctgctcatagtcgtctttcataagatcatcactagcggccatcagcggcttcaaccattattcgattgcttactgacgatcgtggtaaatgttagcccttacctgaagagcctcagtatggtgacagcaaacaaactgctacatctgctagaagccttcagcactacttggttcctgttctcggccgcccaaaaccaccatctcgtgttcttccttctggaggtatttaacaatatcatacagtatcagttcgacgggaattccaacctggtgtatgccatcatccgtaagagatcaatcttccaccagcttgccaacttgccgacggatccgccgacaattcataaagcactgcagaggagacggcgaacacccgaaccgctgtccaggacaggatcccaggaaggaacaagcatggagggcagtcgtccagccgcacctgccgaaccaggaacactcaaaacatcgctcgtcgcaactcctggcatcgataagctgacggaaaagagtcaggtgagcgaagacggcacattacggagtctggaacccgaaccacaacagtcccttgaggacggttcccccgcaaaaggcgagccatcccaagcgtggcgtgagcagaggagaccttcaacctccagcgcgagcggccagtggtctcctacgcccgaatgggtcttaagctggaaaagcaagttacccctccaaacaattatgaggctgctccaggttctggtgccccaagtagagaagatctgtattgacaagggcttaaccgacgagtcagaaatcttgaggttcctgcagcatggaaccctggtgggactgctgcctgtgccacaccctatccttatcaggaaatatcaggctaactccggcaccgcgatgtggttccgtacctacatgtggggggtgatctatttgaggaacgtggacccgcctgtgtggtacgacacagacgtaaagctctttgaaatccaacgcgtctag

SEQ ID NO: 219377 - DNA, 2367 bp, Artificial Sequence
  derived and/or modified sequence
atgggatctacagactctaagctcaactttagaaaagctgttatccaacttacaaccaagacccagccggttgaggccaccgacgatgctttctgggatcaattttgggctgacacggccaccagcgtgcaggatgtcttcgccctggtgccagcggccgagatcagggctgtgagggaagagtctccttccaacctagcgaccctgtgctacaaggcagtcgagaaacttgtgcagggagctgagagcggatgccattccgagaaggagaaacagattgtgctgaactgttctcggctgctgaccagagtactcccgtacatttttgaggaccccgactggcgtggttttttttggagcaccgttcctggagctgggagaggaggacagggtgaggaggatgatgaacatgcacggcccctcgccgagagcctgcttctggctatagctgacttactcttctgtccagattttactgttcagagtcaccgtaggtctacggtggacagcgcagaagacgtgcactctcttgattcctgcgaatacatctgggaagccggcgtgggttttgcccattccccacagccaaattacattcatgacatgaatcgaatggagctgctgaagctcctgctgacatgtttctccgaagccatgtatctgcctcccgcgccagagagcggctcgacgaacccctgggttcagttcttctgcagcaccgagaatcgccacgccctgccactgttcacatctctactcaatactgtgtgtgcctatgatcctgtcgggtatggtattccctacaaccacctgcttttcagcgactacagagaaccactggtcgaggaggccgctcaagttctgatagtgaccctcgaccatgacagtgcctctagcgcctcgccaaccgtggatgggaccactaccgggacagccatggatgacgctgacccacctggacctgaaaacttatttgtcaattacctctcacgcattcaccgagaggaggacttccagtttattcttaaaggtatcgcacgactgctcagtaatcccctactacagacctacttgcccaattctacaaaaaagattcaatttcaccaagagcttctggtgctattttggaaactgtgtgacttcaataagaagtttctgttttttgtccttaagtcttcagacgtgttggacatcctagtgccaatcctgttctttctaaacgacgccagagcagaccagagcagagtcgggttgatgcacatcggagtgttcatcctcttgctactctctggagaaagaaattttggagtcaggcttaataaaccttattcaattagggtgcctatggacatcccagtttttaccggaacccacgccgaccttctcattgtggtctttcacaaaatcatcacctctgggcaccagcgattgcagcctttatttgattgccttttgacgatcgtcgtcaatgtgtccccttaccttaagagcctgagcatggtcaccgctaacaagcttctccatctgctcgaagctttctctacaacttggtttcttttttccgccgcacagaatcaccatttggtgtttttcctgctggaagtgttcaacaacatcatccagtatcagttcgacggcaacagcaacttggtctatgccattattcggaagagaagtatttttcaccagctggctaatttgccgaccgacccaccaactatacacaaggccctgcagagacgccgaaggacgccagagcccctgagccggactgggagtcaagagggcacgagcatggagggatccaggcctgccgcacccgctgagccgggtactctgaagacctccctggtggcaacaccaggaatcgacaaactgacagagaagtcccaggtcagcgaggatggaacccttagatctcttgaaccagagccccagcagtccctggaggatgggagccccgccaaaggcgaaccgagccaggcctggcgtgagcagcgtagacccagcacttctagcgcttcggggcagtggagcccaacacccgagtgggtgctttcctggaaaagtaaactgcctctgcagacaatcatgcgcctgctacaggtactggtaccccaagtggagaagatctgtattgacaagggactgacagacgagtccgagattcttcgctttcttcagcacggtacactggtgggtctgcttcccgtgccccatccgatcctaattcgcaagtaccaagccaatagcggcacagcaatgtggttccgcacctacatgtggggcgtgatttatctgaggaacgtcgacccgcccgtttggtacgataccgatgttaagctatttgagattcagcgcgtgtag

SEQ ID NO: 219378 - DNA, 1683 bp, Artificial Sequence
  derived and/or modified sequence
atgggcagcacagacagcaagctgaacttcaggaaggctgtgatccagctgaccaccaagacccagcctgtggaggccacagatgatgcctatgaccctgtgggctacggcatcccctacaaccacctgctcttcagtgactaccgggagcccctggtggaggaggccgcccaggtgctgattgtgaccctggaccatgacagcgccagcagcgccagccccaccgtggatggcaccaccactggaacagccatggatgatgctgaccccccaggccctgagaacctgtttgtgaactacctgagccgcatccaccgggaggaggacttccagttcatcctgaagggcatcgcccggctgctgagcaaccccctgctgcagacctacctgcccaacagcaccaagaagatccagttccaccaggagctgctggtgctcttctggaagctgtgtgacttcaacaagaagttcctgttctttgtgctgaagagcagtgatgtgctggacatcctggtgcccatcctcttcttcctgaatgatgcccgggctgaccagagccgggtgggcctgatgcacatcggggtcttcatcctgctgctgctgagcggggagaggaactttggagtgcggctgaacaagccctacagcatccgggtgcccatggacatccctgtgttcaccggcacccatgctgacctgctgattgtggtgttccacaagatcatcaccagcggccaccagaggctgcagcccctgtttgactgcctgctgaccatcgtggtgaatgtgagcccctacctgaagagcctgtccatggtgacagccaacaagctgctgcacctgctggaggccttcagcaccacctggttcctgttctctgctgcccagaaccaccacctggtgttcttcctgctggaggtgttcaacaacatcatccagtaccagtttgatggcaacagcaacctggtgtatgccatcatcaggaagaggagcatcttccaccagctggccaacctgcccacagatcctcccaccatccacaaggccctgcagaggagaagaaggaccccagagcccctgagcaggacaggcagccaggagggcacctccatggagggcagcaggcctgctgccccagctgagcccggcaccctgaagaccagcctggtggccaccccaggcatcgacaagctgacagagaagagccaggtgtctgaagatggcaccctgcggagcctggagcctgagccccagcagagcctggaggatggcagccctgccaagggggagcccagccaggcctggagggagcagaggcggcccagcaccagcagcgccagcggccagtggagccccaccccagagtgggtgctgtcctggaagagcaagctgcccctgcagaccatcatgaggctgctgcaggtgctggtgccccaggtggagaagatctgcatcgacaagggcctgacagatgaaagtgagatcctgcgcttcctgcagcacggcaccctggtgggcctgctgcctgtgccccaccccatcctgatcaggaagtaccaggccaacagcggcacagccatgtggttccgcacctacatgtggggcgtcatctacctgagaaatgtggacccccctgtgtggtatgacacagatgtgaagctgtttgagatccagagggtgtag

SEQ ID NO: 219379 - DNA, 2367 bp, Artificial Sequence
  derived and/or modified sequence
atgggcagcacagacagcaagctgaacttcaggaaggctgtgatccagctgaccaccaagacccagcctgtggaggccacagatgatgccttctgggaccagttctgggccgacacagccacctctgtgcaggatgtgtttgccctggtgcctgctgctgagatccgggctgtgcgggaggagagccccagcaacctggccaccctgtgctacaaggctgtggagaagctggtgcagggcgctgagagcggctgccacagcgagaaggagaagcagatcgtgctgaactgcagccggctgctgaccagggtgctgccctacatctttgaggaccctgactggaggggcttcttctggagcacagtgcctggagctggccggggcggccagggcgaggaggatgatgaacatgcccggcccctggccgagagcctgctgctggccatcgctgacctgctcttctgcccagacttcaccgtgcagagccaccggcgcagcacagtggacagcgcagaagatgtgcacagcctggacagctgtgagtacatctgggaggccggcgtgggctttgcccacagcccccagcccaactacatccatgacatgaacaggatggagctgctgaagctgctgctgacctgcttcagcgaggccatgtacctgcccccagcccctgagagcggcagcaccaacccctgggtgcagttcttctgcagcacagaaaatagacatgccctgcccctcttcaccagcctgctgaacacagtgtgtgcctatgaccctgtgggctacggcatcccctacaaccacctgctcttcagtgactaccgggagcccctggtggaggaggccgcccaggtgctgattgtgaccctggaccatgacagcgccagcagcgccagccccaccgtggatggcaccaccactggaacagccatggatgatgctgaccccccaggccctgagaacctgtttgtgaactacctgagccgcatccaccgggaggaggacttccagttcatcctgaagggcatcgcccggctgctgagcaaccccctgctgcagacctacctgcccaacagcaccaagaagatccagttccaccaggagctgctggtgctcttctggaagctgtgtgacttcaacaagaagttcctgttctttgtgctgaagagcagtgatgtgctggacatcctggtgcccatcctcttcttcctgaatgatgcccgggctgaccagagccgggtgggcctgatgcacatcggggtcttcatcctgctgctgctgagcggggagaggaactttggagtgcggctgaacaagccctacagcatccgggtgcccatggacatccctgtgttcaccggcacccatgctgacctgctgattgtggtgttccacaagatcatcaccagcggccaccagaggctgcagcccctgtttgactgcctgctgaccatcgtggtgaatgtgagcccctacctgaagagcctgtccatggtgacagccaacaagctgctgcacctgctggaggccttcagcaccacctggttcctgttctctgctgcccagaaccaccacctggtgttcttcctgctggaggtgttcaacaacatcatccagtaccagtttgatggcaacagcaacctggtgtatgccatcatcaggaagaggagcatcttccaccagctggccaacctgcccacagatcctcccaccatccacaaggccctgcagaggagaagaaggaccccagagcccctgagcaggacaggcagccaggagggcacctccatggagggcagcaggcctgctgccccagctgagcccggcaccctgaagaccagcctggtggccaccccaggcatcgacaagctgacagagaagagccaggtgtctgaagatggcaccctgcggagcctggagcctgagccccagcagagcctggaggatggcagccctgccaagggggagcccagccaggcctggagggagcagaggcggcccagcaccagcagcgccagcggccagtggagccccaccccagagtgggtgctgtcctggaagagcaagctgcccctgcagaccatcatgaggctgctgcaggtgctggtgccccaggtggagaagatctgcatcgacaagggcctgacagatgaaagtgagatcctgcgcttcctgcagcacggcaccctggtgggcctgctgcctgtgccccaccccatcctgatcaggaagtaccaggccaacagcggcacagccatgtggttccgcacctacatgtggggcgtcatctacctgagaaatgtggacccccctgtgtggtatgacacagatgtgaagctgtttgagatccagagggtgtag

SEQ ID NO: 219380 - DNA, 1683 bp, Artificial Sequence
  derived and/or modified sequence
atgggcagcaccgacagcaagctgaacttccggaaggccgtgatccaactgacaactaagactcagccagtcgaagccacagacgatgcctacgatcccgtgggctatgggatcccatacaaccatctgttgtttagtgactacagagaaccactggtagaagaagcggctcaggtgctgattgtcactttggatcatgatagcgcctctagtgctagcccaactgtagatgggaccactaccggcactgccatggacgacgctgaccctcctgggccagaaaaccttttcgtaaactatctcagtcgtattcatagagaggaagattttcagtttattttgaaggggatagcaagactcctctcgaacccactcttgcagacatacttgcccaacagtactaagaagatccagtttcaccaggaactgctggtgttgttctggaagctgtgcgacttcaataagaagttcctgtttttcgtactgaagtcaagcgacgtgctggatatactggttccaatcctcttcttcttgaatgatgctagagctgaccaaagcagggtgggcttgatgcacataggcgtgtttatcctgttacttttgtctggcgagcgcaactttggcgtgcggctgaataagccgtacagtattcgtgtgcctatggacattccagtgttcacgggtacccacgcagaccttctcatcgtggtctttcataagatcatcaccagcgggcatcaacgcctccaaccgctctttgattgtctcctgaccatcgtggtcaatgtatccccataccttaagtccctgagcatggtgacggcgaacaagctgttgcacctgctggaggccttctccacgacttggtttctgttttctgccgctcagaaccatcatctcgtcttttttctgctggaagtgttcaacaatatcatccaataccagtttgacgggaactcaaacctcgtatacgctattattcgaaagagatccatcttccaccaactagcaaacttgccaacagatcctcccactattcataaggccctgcaacgacggcgccgtacgccagaacctctctccagaacgggcagtcaggagggtaccagtatggaaggttctagaccagctgctccagctgagcctggcaccttgaaaacgagcctcgtggccacgcctggaatcgataaactgaccgagaagtcccaggtttccgaggatggaacactgcgttctctggagcctgagccacagcagagccttgaggacggtagccccgctaaaggcgaaccgtcccaggcttggagagaacagagaagaccgtccacgtcttccgctagcggtcagtggtcccccacacctgaatgggttcttagttggaaatccaagttaccgttacagacaataatgcgcctcttgcaggttttggtgcctcaagtcgaaaagatctgcatcgacaaaggcttgaccgatgaatccgagatcctgcgattcctacagcacggcacacttgttggactgctgccagtgccccatcccattttaattaggaagtaccaagccaactccggaactgcaatgtggtttaggacttacatgtggggtgtgatctatctaagaaacgtggacccccctgtctggtacgacaccgatgtgaagctctttgaaatccagcgagtttag

SEQ ID NO: 219381 - DNA, 2367 bp, Artificial Sequence
  derived and/or modified sequence
atgggcagcaccgacagcaagctgaacttccggaaggccgtgatccagctgaccacaaaaactcagcctgtggaagcaaccgatgacgccttctgggaccagttttgggccgacaccgctactagcgtgcaagatgtgtttgcccttgtgcccgccgccgaaatccgcgccgtccgggaggaaagccccagtaacctggccacattgtgctataaagctgttgagaagctggtgcagggcgccgagagcggctgtcattcggagaaggaaaagcagatcgtcctgaactgctctcgactgctcacccgcgtcctcccatatatattcgaagatccagattggcgcggatttttttggagcactgtgcctggcgccgggagggggggacaaggagaggaagacgacgaacacgcacgtccactggcagaatccttgctgcttgctatagcagatcttctcttttgtccagacttcactgtacagagtcacagaaggtctacagtggacagcgccgaagatgtccacagcctggactcgtgcgaatacatttgggaggcaggcgtaggatttgctcacagcccccagcccaattacattcacgatatgaaccgcatggaactcctaaaactccttctcacatgcttctccgaggctatgtacctgccccctgcgccagaatctggaagcactaacccttgggtacagtttttctgttcgactgagaaccgccacgctctaccgctgttcacgtccctactaaacacggtctgcgcctacgatcccgtggggtatgggataccctacaatcacctcctgttctcagactatagggaacctttagtcgaggaagccgctcaagttttgatcgtgaccctagatcatgactccgcatcatccgcaagtcctacagttgacggaacaaccactggaactgcaatggatgatgcagacccaccaggcccggagaacctctttgtgaattatctatctagaatccaccgggaggaggattttcagttcatcttgaagggcatagcccggctgctctcaaacccactgctgcagacatacctgccgaatagtactaagaaaattcagtttcaccaggaactgctggtgctgttctggaagttgtgcgacttcaacaagaaatttttgttttttgtgctgaagtcctctgacgttctggacattttggtgcccatcttgttttttcttaatgacgctcgagctgatcaatctcgggtgggccttatgcacataggcgtgtttatactgttgctgctgtccggtgagcgcaacttcggggtgcgtctgaacaaaccctactcaattagggtgccaatggatatcccggtgttcacggggactcacgctgaccttttgattgtcgtgtttcacaagatcatcaccagtggccaccaacgccttcaacccctgttcgactgcttattgactatcgttgttaacgtgtctccatacctgaaaagcctcagtatggtcaccgcgaataagctactgcacctcctggaagccttcagcaccacatggtttttgtttagcgctgcacaaaaccaccatctcgtctttttcctgctggaggtctttaataacatcatccagtaccagttcgacggaaattcaaacttggtgtacgctattatcaggaagagatcaatcttccaccaacttgccaacctgcccacagaccctccgacgatccacaaagcactacagcgtagacgccgcaccccagagccgctcagccgcactggttcccaagaggggacctccatggaagggagccgacccgccgctcctgctgagccagggacactgaagacctcactcgtggccacccctggtattgataaactgacggaaaaatctcaggtgtctgaagacgggacccttcgtagcctcgagcccgaaccccagcagtcactggaagacggcagcccagctaaaggggaaccatcacaagcgtggagagaacagcgtcgcccttccacctccagcgcctcaggacagtggtctcccacccctgagtgggtcctctcctggaagagcaagctgcctctgcagaccataatgcggctgctgcaggtactggttcctcaggtagagaagatatgtatcgacaaggggcttactgatgaatctgaaatcctgcgcttcttgcagcatggtacactagtcggactccttccggttccgcatccgattctgatccgaaagtaccaggcaaatagcggaacagctatgtggttcagaacatacatgtggggagtgatctacctgcgcaacgtggatcctccagtctggtatgacacggatgtgaagctgtttgagattcaacgagtctag

SEQ ID NO: 219382 - DNA, 1683 bp, Artificial Sequence
  derived and/or modified sequence
atgggctccactgattccaaattaaatttccgcaaagcagtgattcaactgacaaccaagacccagcctgtggaggcaaccgatgacgcatacgatccagttgggtatggaattccatacaaccatttgctcttctccgattatcgcgagcccctggtcgaagaggccgctcaggttctgatcgtaactttggaccacgactccgcaagctcagcaagtcctaccgttgacgggactaccactgggaccgcaatggatgacgcagacccaccaggtccagagaatctgttcgtgaattacctttctcgcattcatagggaagaagacttccagttcatactgaaggggattgccaggctactgagtaaccccttgctgcagacgtacctgccgaattcaaccaagaagatccagttccatcaggagctcctcgtgctgttctggaagctctgtgactttaacaagaaatttctattctttgtgctaaaatccagcgacgtgctggatatactcgtcccgattctgttctttttgaatgacgcacgtgctgaccaaagcagggtgggtttgatgcatattggggtttttatcttattgctgttaagcggagagcggaactttggagtgcgacttaataagccatatagcatccgcgtcccaatggacattcctgtgttcaccgggactcatgcagacctgctgatcgtggtgtttcataaaatcataacaagtggccaccagagactccaacccctgttcgactgcctgctaacgatagtggtcaacgtctccccttacctgaaatccctgagtatggtgacagcgaacaaattacttcacctcctggaagcattctctacaacatggttcctgttcagtgcagcacagaaccaccacctggtgttcttcttgctggaagtgttcaacaacatcatccagtaccagtttgatggaaattccaacctggtatatgcgatcattaggaaaagatctatctttcatcagctcgccaatctgccaaccgatccccctacaattcataaggctctgcagaggcgtcgcagaacccccgagcctctgtcaagaacgggatcacaagagggaaccagtatggagggctcccggccagcagcgccagcagagccgggaacattgaaaacttcactcgtggcaacacctgggatagataagctcactgagaaatcgcaggtctccgaggacggcaccctgcgctcactcgagcctgagcctcagcagagccttgaagacggaagccccgctaagggggaaccttcccaggcatggcgggagcaacgccgtccttcgacgtcctccgcctccggccagtggagccccactcccgagtgggtactgagttggaagagcaagttaccactccaaacgatcatgcggttgttacaagtcttggttcctcaagtggaaaaaatctgcatcgataaaggcttgactgatgaaagcgaaattctcaggtttctccaacatggaaccctggtgggccttctccccgtgcctcaccccatcctcatacgtaaataccaggcgaatagcgggacagcaatgtggttccggacttatatgtggggggtgatatatctaaggaatgtggaccctcctgtgtggtatgacactgacgtgaaactgttcgagattcagagagtctag

SEQ ID NO: 219383 - DNA, 2367 bp, Artificial Sequence
  derived and/or modified sequence
atgggttcgaccgacagcaagctaaactttagaaaagcggtcatacagctaactactaagacccagcccgtcgaagcaaccgatgacgctttttgggatcagttctgggcagataccgcgacgagcgtacaggatgtgttcgccctggtacctgccgctgaaattcgggctgtacgggaggagagtccctcaaacttggctaccttgtgttataaagccgttgagaagcttgtgcagggtgccgaaagtggctgccactctgagaaggagaagcagatagtgctgaattgtagcaggcttctaactcgggtgcttccttacatctttgaagatcccgattggaggggatttttctggagtacagtcccaggggctggcagagggggacagggggaagaagacgatgagcatgcaagacctctcgctgagtctttactactcgccatcgctgatctcctcttttgtcccgatttcactgtgcagtcacaccgccgaagtacagtcgattcagcggaagacgtgcattcccttgactcatgtgaatacatttgggaggcgggagttggatttgcccacagtccacagcctaattatatacacgatatgaaccgaatggaactattaaagctactgctgacctgcttttctgaagccatgtacttgcctccggctccagagagcggcagcacaaatccttgggtgcaattcttctgtagtacagaaaataggcacgctcttcctctgttcacgagcttattgaacaccgtttgcgcctacgatccggtgggttacgggatcccttacaaccatttactttttagcgattacagggagcccctcgtagaggaggcagcccaggtcctgatcgtaactctggaccacgattccgcttccagcgcttcacctacggtagatggtaccaccaccggtacagcaatggacgacgccgatccacccggtccagaaaatctgtttgtgaattacctgtcccgcatacaccgtgaggaagacttccaatttatcctgaagggtattgccaggctgcttagtaatccactcttacagacttaccttccaaattccaccaagaagattcaatttcatcaggagctgcttgtcttgttttggaaactctgtgatttcaacaaaaagtttttattctttgtactgaagagctccgacgtactggatattttagtgccaatcttgttcttcctcaatgatgctcgcgcagaccagtccagagtggggcttatgcacattggagtctttatcttactacttcttagcggtgaacgtaattttggagtgcggttaaacaaaccttacagtatccgagtgcccatggacattccagtgttcacaggaactcacgccgacctactgattgtggtcttccacaagataatcacctccgggcatcagcggctccagcccctctttgactgtctgctgaccattgtagtgaacgtctccccttacctgaagtcgctgtctatggtgaccgcgaacaaactgctccacctcctcgaggccttttctaccacttggtttctgtttagtgccgcacaaaatcaccatttggtgttttttctcctggaagtctttaacaatatcatacagtatcaatttgacggaaacagtaacctggtttatgccattataaggaaaaggtccattttccatcagctggccaatctacctactgaccccccaacaattcataaggccctgcagcggcgtaggcgtacaccagagcctttgtcaaggacagggtctcaagaaggcaccagcatggagggaagcaggcctgctgccccagcagaacccggtaccttaaagaccagtctggtcgcaactcctggaatcgataagctgacagagaagagccaagttagtgaggacgggacgctccgcagccttgaaccagaacctcagcagtccctcgaagacggcagcccagccaaaggagagccaagccaggcttggagggaacagaggaggccctcaacgagttccgcatcagggcaatggagtcccacgcctgaatgggttctgagttggaagagcaagcttccgctccaaacgattatgcgactgctgcaggtcctggtgccacaggtggaaaagatttgcatagataaaggattgacagatgagtctgaaatcttgaggtttcttcagcacggaaccctggttggcctcttaccagtgccccaccctattttaatccggaagtatcaggctaatagcggcaccgccatgtggttccggacctatatgtggggggtaatctaccttcgtaacgtggatccaccggtctggtatgacactgacgtcaagctttttgaaatccagagggtgtag

SEQ ID NO: 219384 - DNA, 2586 bp, Artificial Sequence
  derived and/or modified sequence
gcggagctggagccggagctgaagccggagccgggttggagtctgggcgggggccgggccggagcgggctccagagacatggggtcgaccgactccaagctgaacttccggaaggcggtgatccagctcaccaccaagacgcagcccgtggaagccaccgatgatgcctatgaccctgtgggctacgggatcccctacaaccacctgctcttctctgactaccgggaacccctggtggaggaggctgcccaggtgctcattgtcactttggaccacgacagtgccagcagtgccagccccactgtggacggcaccaccactggcaccgccatggatgatgccgatcctccaggccctgagaacctgtttgtgaactacctgtcccgcatccatcgtgaggaggacttccagttcatcctcaagggtatagcccggctgctgtccaaccccctgctccagacctacctgcctaactccaccaagaagatccagttccaccaggagctgctagttctcttctggaagctctgcgacttcaacaagaaattcctcttcttcgtgctgaagagcagcgacgtcctagacatccttgtccccatcctcttcttcctcaacgatgcccgggccgatcagtctcgggtgggcctgatgcacattggtgtcttcatcttgctgcttctgagcggggagcggaacttcggggtgcggctgaacaaaccctactcaatccgcgtgcccatggacatcccagtcttcacagggacccacgccgacctgctcattgtggtgttccacaagatcatcaccagcgggcaccagcggttgcagcccctcttcgactgcctgctcaccatcgtggtcaacgtgtccccctacctcaagagcctgtccatggtgactgccaacaagttgctgcacctgctggaggccttctccaccacctggttcctcttctctgccgcccagaaccaccacctggtcttcttcctcctggaggtcttcaacaacatcatccagtaccagtttgatggcaactccaacctggtctacgccatcatccgcaagcgcagcatcttccaccagctggccaacctgcccacggacccgcccaccattcacaaggccctgcagcggcgccggcggacacctgagcccttgtctcgcaccggctcccaggagggcacctccatggagggctcccgccccgctgcccctgcagagccaggcaccctcaagaccagtctggtggctactccaggcattgacaagctgaccgagaagtcccaggtgtcagaggatggcaccttgcggtccctggaacctgagccccagcagagcttggaggatggcagcccggctaagggggagcccagccaggcatggagggagcagcggcgaccgtccacctcatcagccagtgggcagtggagcccaacgccagagtgggtcctctcctggaagtcgaagctgccgctgcagaccatcatgaggctgctgcaggtgctggttccgcaggtggagaagatctgcattgacaagggcctgacggatgagtctgagatcctgcggttcctgcagcatggcaccctggtggggctgctgcccgtgccccaccccatcctcatccgcaagtaccaggccaactcgggcactgccatgtggttccgcacctacatgtggggcgtcatctatctgaggaatgtggacccccctgtctggtacgacaccgacgtgaagctgtttgagatacagcgggtgtgaggatgaagccgacgaggggctcagtctaggggaaggcagggccttggtccctgaggcttcccccatccaccattctgagctttaaattaccacgatcagggcctggaacaggcagagtggccctgagtgtcatgccctagagacccctgtggccaggacaatgtgaactggctcagatccccctcaacccctaggctggactcacaggagccccatctctggggctatgcccccaccagagaccactgcccccaacactcggactccctctttaagacctggctcagtgctggcccctcagtgcccacccactcctgtgctacccagccccagaggcagaagccaatgggtcactgtgccctaaggggtttgaccagggaaccacgggctgtcccttgaggtgcctggacagggtaagggggtgcttccagcctcctaacccaaagccagctgttccaggctccaggggaaaaaggtgtggccaggctgctcctcgaggaggctgggagctggccgactgcaaaagccagactggggcacctcccgtatccttggggcatggtgtggggtggtgagggtctcctgctatattctcctggatccatggaaatagcctggctccctcttacccagtaatgaggggcagggaagggaactgggaggcagccgtttagtcctccctgccctgcccactgcctggatggggcgatgccacccctcatccttcacccagctctggcctctgggtcccaccacccagccccccgtgtcagaacaatctttgctctgtacaatcggcctctttacaataaaacctcctgctcc

SEQ ID NO: 219385 - DNA, 3271 bp, Artificial Sequence
  derived and/or modified sequence
gcggagctggagccggagctgaagccggagccgggttggagtctgggcgggggccgggccggagcgggctccagagacatggggtcgaccgactccaagctgaacttccggaaggcggtgatccagctcaccaccaagacgcagcccgtggaagccaccgatgatgccttttgggaccagttctgggcagacacagccacctcggtgcaggatgtgtttgcactggtgccggcagcagagatccgggccgtgcgggaagagtcaccctccaacttggccaccctgtgctacaaggccgttgagaagctggtgcagggagctgagagtggctgccactcggagaaggagaagcagatcgtcctgaactgcagccggctgctcacccgcgtgctgccctacatctttgaggaccccgactggaggggcttcttctggtccacagtgcccggggcagggcgaggagggcagggagaagaggatgatgagcatgccaggcccctggccgagtccctgctcctggccattgctgacctgctcttctgcccggacttcacggttcagagccaccggaggagcactgtggactcggcagaggacgtccactccctggacagctgtgaatacatctgggaggctggtgtgggcttcgctcactccccccagcctaactacatccacgatatgaaccggatggagctgctgaaactgctgctgacatgcttctccgaggccatgtacctgcccccagctccggaaagtggcagcaccaacccatgggttcagttcttttgttccacggagaacagacatgccctgcccctcttcacctccctcctcaacaccgtgtgtgcctatgaccctgtgggctacgggatcccctacaaccacctgctcttctctgactaccgggaacccctggtggaggaggctgcccaggtgctcattgtcactttggaccacgacagtgccagcagtgccagccccactgtggacggcaccaccactggcaccgccatggatgatgccgatcctccaggccctgagaacctgtttgtgaactacctgtcccgcatccatcgtgaggaggacttccagttcatcctcaagggtatagcccggctgctgtccaaccccctgctccagacctacctgcctaactccaccaagaagatccagttccaccaggagctgctagttctcttctggaagctctgcgacttcaacaagaaattcctcttcttcgtgctgaagagcagcgacgtcctagacatccttgtccccatcctcttcttcctcaacgatgcccgggccgatcagtctcgggtgggcctgatgcacattggtgtcttcatcttgctgcttctgagcggggagcggaacttcggggtgcggctgaacaaaccctactcaatccgcgtgcccatggacatcccagtcttcacagggacccacgccgacctgctcattgtggtgttccacaagatcatcaccagcgggcaccagcggttgcagcccctcttcgactgcctgctcaccatcgtggtcaacgtgtccccctacctcaagagcctgtccatggtgactgccaacaagttgctgcacctgctggaggccttctccaccacctggttcctcttctctgccgcccagaaccaccacctggtcttcttcctcctggaggtcttcaacaacatcatccagtaccagtttgatggcaactccaacctggtctacgccatcatccgcaagcgcagcatcttccaccagctggccaacctgcccacggacccgcccaccattcacaaggccctgcagcggcgccggcggacacctgagcccttgtctcgcaccggctcccaggagggcacctccatggagggctcccgccccgctgcccctgcagagccaggcaccctcaagaccagtctggtggctactccaggcattgacaagctgaccgagaagtcccaggtgtcagaggatggcaccttgcggtccctggaacctgagccccagcagagcttggaggatggcagcccggctaagggggagcccagccaggcatggagggagcagcggcgaccgtccacctcatcagccagtgggcagtggagcccaacgccagagtgggtcctctcctggaagtcgaagctgccgctgcagaccatcatgaggctgctgcaggtgctggttccgcaggtggagaagatctgcattgacaagggcctgacggatgagtctgagatcctgcggttcctgcagcatggcaccctggtggggctgctgcccgtgccccaccccatcctcatccgcaagtaccaggccaactcgggcactgccatgtggttccgcacctacatgtggggcgtcatctatctgaggaatgtggacccccctgtctggtacgacaccgacgtgaagctgtttgagatacagcgggtgtgaggatgaagccgacgaggggctcagtctaggggaaggcagggccttggtccctgaggcttcccccatccaccattctgagctttaaattaccacgatcagggcctggaacaggcagagtggccctgagtgtcatgccctagagacccctgtggccaggacaatgtgaactggctcagatccccctcaacccctaggctggactcacaggagccccatctctggggctatgcccccaccagagaccactgcccccaacactcggactccctctttaagacctggctcagtgctggcccctcagtgcccacccactcctgtgctacccagccccagaggcagaagccaatgggtcactgtgccctaaggggtttgaccagggaaccacgggctgtcccttgaggtgcctggacagggtaagggggtgcttccagcctcctaacccaaagccagctgttccaggctccaggggaaaaaggtgtggccaggctgctcctcgaggaggctgggagctggccgactgcaaaagccagactggggcacctcccgtatccttggggcatggtgtggggtggtgagggtctcctgctatattctcctggatccatggaaatagcctggctccctcttacccagtaatgaggggcagggaagggaactgggaggcagccgtttagtcctccctgccctgcccactgcctggatggggcgatgccacccctcatccttcacccagctctggcctctgggtcccaccacccagccccccgtgtcagaacaatctttgctctgtacaatcggcctctttacaataaaacctcctgctcca

SEQ ID NO: 219386 - DNA, 1683 bp, Artificial Sequence
  derived and/or modified sequence
atgggcagcaccgacagcaagctgaacttcagaaaggccgtgatccagctgaccaccaagacccagcccgtggaggccaccgacgacgcctacgaccccgtgggctacggcatcccctacaaccacctgctgttcagcgactacagagagcccctggtggaggaggccgcccaggtgctgatcgtgaccctggaccacgacagcgccagcagcgccagccccaccgtggacggcaccaccaccggcaccgccatggacgacgccgacccccccggccccgagaacctgttcgtgaactacctgagcagaatccacagagaggaggacttccagttcatcctgaagggcatcgccagactgctgagcaaccccctgctgcagacctacctgcccaacagcaccaagaagatccagttccaccaggagctgctggtgctgttctggaagctgtgcgacttcaacaagaagttcctgttcttcgtgctgaagagcagcgacgtgctggacatcctggtgcccatcctgttcttcctgaacgacgccagagccgaccagagcagagtgggcctgatgcacatcggcgtgttcatcctgctgctgctgagcggcgagagaaacttcggcgtgagactgaacaagccctacagcatcagagtgcccatggacatccccgtgttcaccggcacccacgccgacctgctgatcgtggtgttccacaagatcatcaccagcggccaccagagactgcagcccctgttcgactgcctgctgaccatcgtggtgaacgtgagcccctacctgaagagcctgagcatggtgaccgccaacaagctgctgcacctgctggaggccttcagcaccacctggttcctgttcagcgccgcccagaaccaccacctggtgttcttcctgctggaggtgttcaacaacatcatccagtaccagttcgacggcaacagcaacctggtgtacgccatcatcagaaagagaagcatcttccaccagctggccaacctgcccaccgacccccccaccatccacaaggccctgcagagaagaagaagaacccccgagcccctgagcagaaccggcagccaggagggcaccagcatggagggcagcagacccgccgcccccgccgagcccggcaccctgaagaccagcctggtggccacccccggcatcgacaagctgaccgagaagagccaggtgagcgaggacggcaccctgagaagcctggagcccgagccccagcagagcctggaggacggcagccccgccaagggcgagcccagccaggcctggagagagcagagaagacccagcaccagcagcgccagcggccagtggagccccacccccgagtgggtgctgagctggaagagcaagctgcccctgcagaccatcatgagactgctgcaggtgctggtgccccaggtggagaagatctgcatcgacaagggcctgaccgacgagagcgagatcctgagattcctgcagcacggcaccctggtgggcctgctgcccgtgccccaccccatcctgatcagaaagtaccaggccaacagcggcaccgccatgtggttcagaacctacatgtggggcgtgatctacctgagaaacgtggacccccccgtgtggtacgacaccgacgtgaagctgttcgagatccagagagtgtag

SEQ ID NO: 219387 - DNA, 2367 bp, Artificial Sequence
  derived and/or modified sequence
atgggcagcaccgacagcaagctgaacttcagaaaggccgtgatccagctgaccaccaagacccagcccgtggaggccaccgacgacgccttctgggaccagttctgggccgacaccgccaccagcgtgcaggacgtgttcgccctggtgcccgccgccgagatcagagccgtgagagaggagagccccagcaacctggccaccctgtgctacaaggccgtggagaagctggtgcagggcgccgagagcggctgccacagcgagaaggagaagcagatcgtgctgaactgcagcagactgctgaccagagtgctgccctacatcttcgaggaccccgactggagaggcttcttctggagcaccgtgcccggcgccggcagaggcggccagggcgaggaggacgacgagcacgccagacccctggccgagagcctgctgctggccatcgccgacctgctgttctgccccgacttcaccgtgcagagccacagaagaagcaccgtggacagcgccgaggacgtgcacagcctggacagctgcgagtacatctgggaggccggcgtgggcttcgcccacagcccccagcccaactacatccacgacatgaacagaatggagctgctgaagctgctgctgacctgcttcagcgaggccatgtacctgccccccgcccccgagagcggcagcaccaacccctgggtgcagttcttctgcagcaccgagaacagacacgccctgcccctgttcaccagcctgctgaacaccgtgtgcgcctacgaccccgtgggctacggcatcccctacaaccacctgctgttcagcgactacagagagcccctggtggaggaggccgcccaggtgctgatcgtgaccctggaccacgacagcgccagcagcgccagccccaccgtggacggcaccaccaccggcaccgccatggacgacgccgacccccccggccccgagaacctgttcgtgaactacctgagcagaatccacagagaggaggacttccagttcatcctgaagggcatcgccagactgctgagcaaccccctgctgcagacctacctgcccaacagcaccaagaagatccagttccaccaggagctgctggtgctgttctggaagctgtgcgacttcaacaagaagttcctgttcttcgtgctgaagagcagcgacgtgctggacatcctggtgcccatcctgttcttcctgaacgacgccagagccgaccagagcagagtgggcctgatgcacatcggcgtgttcatcctgctgctgctgagcggcgagagaaacttcggcgtgagactgaacaagccctacagcatcagagtgcccatggacatccccgtgttcaccggcacccacgccgacctgctgatcgtggtgttccacaagatcatcaccagcggccaccagagactgcagcccctgttcgactgcctgctgaccatcgtggtgaacgtgagcccctacctgaagagcctgagcatggtgaccgccaacaagctgctgcacctgctggaggccttcagcaccacctggttcctgttcagcgccgcccagaaccaccacctggtgttcttcctgctggaggtgttcaacaacatcatccagtaccagttcgacggcaacagcaacctggtgtacgccatcatcagaaagagaagcatcttccaccagctggccaacctgcccaccgacccccccaccatccacaaggccctgcagagaagaagaagaacccccgagcccctgagcagaaccggcagccaggagggcaccagcatggagggcagcagacccgccgcccccgccgagcccggcaccctgaagaccagcctggtggccacccccggcatcgacaagctgaccgagaagagccaggtgagcgaggacggcaccctgagaagcctggagcccgagccccagcagagcctggaggacggcagccccgccaagggcgagcccagccaggcctggagagagcagagaagacccagcaccagcagcgccagcggccagtggagccccacccccgagtgggtgctgagctggaagagcaagctgcccctgcagaccatcatgagactgctgcaggtgctggtgccccaggtggagaagatctgcatcgacaagggcctgaccgacgagagcgagatcctgagattcctgcagcacggcaccctggtgggcctgctgcccgtgccccaccccatcctgatcagaaagtaccaggccaacagcggcaccgccatgtggttcagaacctacatgtggggcgtgatctacctgagaaacgtggacccccccgtgtggtacgacaccgacgtgaagctgttcgagatccagagagtgtag

SEQ ID NO: 219388 - protein, 299 aa, Artificial Sequence
  derived and/or modified sequence
MSAKPEVSLVREASRQIVAGGSAGLVEICLMHPLDVVKTRFQIQRCATDPNSYKSLVDSFRMIFQMEGLFGFYKGILPPILAETPKRAVKFFTFEQYKKLLGYVSLSPALTFAIAGLGSGLTEAIVVNPFEVVKVGLQANRNTFAEQPSTVGYARQIIKKEGWGLQGLNKGLTATLGRHGVFNMVYFGFYYNVKNMIPVNKDPILEFWRKFGIGLLSGTIASVINIPFDVAKSRIQGPQPVPGEIKYRTCFKTMATVYQEEGILALYKGLLPKIMRLGPGGAVMLLVYEYTYSWLQENW

SEQ ID NO: 219389 - DNA, 900 bp, Artificial Sequence
  derived and/or modified sequence
atgtccgctaagcctgaagtatcactggttagagaggcgtcaagacagattgtggccgggggatccgcagggctggtcgagatttgcttgatgcaccctctggatgtggtgaagacacgtttccagattcagcgctgtgcgactgaccctaactcctataagtccctagttgattccttccgaatgatcttccagatggaaggattattcggattctacaagggaatcctacccccaattctcgccgaaacccctaaacgagcagttaaattttttacatttgagcagtacaaaaaactccttggctatgtgtcgcttagcccggccctaaccttcgctattgctggacttggctctggactcactgaagctatagtggtaaaccctttcgaggtggtcaaagtaggactgcaagccaatcgcaacaccttcgctgaacagcctagcacagtgggctacgctcgacagattattaaaaaagaaggatggggactgcaaggcctgaacaagggtctaactgccactttagggcgccacggcgtttttaatatggtgtacttcgggttttactataacgttaagaatatgattcctgtgaataaggatcccattctggaattttggcgcaaattcggtatcggtctgctgtcagggaccattgcaagcgtgatcaacatcccatttgatgtagctaaaagtagaatccagggcccgcagccagtgccgggggaaataaagtacaggacatgctttaaaacaatggcaactgtttaccaggaggagggcatcctggcactgtacaagggtttgctgccgaaaatcatgcgattggggccgggaggagccgttatgcttctagtttacgaatatacctacagctggctacaggaaaattggtag

SEQ ID NO: 219390 - DNA, 900 bp, Artificial Sequence
  derived and/or modified sequence
atgtctgccaagccagaggtgtccctggtgcgggaggccagccggcagatcgtggccggcggcagcgctggcctggtggagatctgcctgatgcaccccctggatgtggtgaagacccgcttccagatccagagatgtgccacagaccccaacagctacaagagcctggtggacagcttcaggatgatcttccagatggagggcctgtttggcttctacaagggcatcctgccccccatcctggccgagacccccaagagagctgtgaagttcttcacctttgagcagtacaagaagctgctgggctacgtgtccctgagccctgccctgacctttgccatcgccggcctgggcagcggcctgacagaggccatcgtggtgaacccctttgaggtggtgaaggtgggcctgcaggccaacagaaacacctttgctgagcagcccagcacagtgggctacgcccggcagatcatcaagaaggagggctggggcctgcagggcctgaacaagggcctgacagccaccctgggcagacatggagtcttcaacatggtgtacttcggcttctactacaacgtgaagaacatgatccctgtgaacaaggaccccatcctggagttctggaggaagtttggaattggcctgctgagcggcaccatcgccagcgtcatcaacatcccctttgatgtggccaagagccgcatccagggcccccagcctgtgcctggagagatcaagtaccgcacctgcttcaagaccatggccaccgtgtaccaggaggagggcatcctggccctgtacaagggcctgctgcccaagatcatgaggctgggccctggaggagctgtgatgctgctggtgtatgagtacacctacagctggctgcaggagaactggtag

SEQ ID NO: 219391 - DNA, 900 bp, Artificial Sequence
  derived and/or modified sequence
atgagcgccaagcccgaggtgagcctggtgcgggaggccagccggcaaattgtggctggtgggtctgccggtctcgttgagatctgtctgatgcatccgctcgacgtcgtgaagactagattccagatccagcggtgcgcaaccgacccaaactcctataagtccctggtggactcatttcgtatgatttttcagatggaaggcctcttcggcttctacaaggggatactgccgccaattctcgccgaaactcctaaacgtgctgttaagttttttactttcgagcagtacaagaaactgctgggatacgtgtccctgagtcctgctctcaccttcgccatcgctgggctcggtagtggtctgacagaagccatcgtggttaatccattcgaggtggttaaagtcggactgcaggccaatcgcaacacattcgctgaacagccatccacagtaggctatgctcgacagattattaagaaggaggggtgggggctgcagggcttgaacaaaggacttacagccacactcggcaggcatggagtgtttaacatggtatattttgggttctattacaacgtaaaaaacatgataccagtgaacaaagatcccatcctcgaattctggcggaagtttggaattggtctcctttctggaaccattgcctcggtgattaacattccttttgacgtggctaaatctcggattcaggggccccagccagtgcctggagaaattaagtaccgaacgtgcttcaaaactatggcaactgtgtatcaggaagaggggattttggcgctatataagggtttgctacctaagatcatgcgcttgggacctggaggtgcagtcatgttgctggtgtacgagtatacatatagctggcttcaggaaaattggtag

SEQ ID NO: 219392 - DNA, 900 bp, Artificial Sequence
  derived and/or modified sequence
atgtcagctaagcccgaagtctcactggtgagagaggcaagtcgacagattgtcgctgggggatctgccggtctcgtagaaatctgcctgatgcacccactggatgtcgtgaaaacaaggttccagattcaacggtgcgccacggaccccaactcttacaaatccctggtggactcgtttcgcatgatctttcaaatggagggactttttggcttttacaagggaattctgccacccatccttgcagagactccgaagagggcggtcaaattctttactttcgaacaatacaaaaagctgctgggatacgtctctttatcccctgcactgactttcgcaatcgcgggactcggctcagggcttaccgaggctattgtggtgaatccatttgaagtggtgaaagtgggcttgcaggccaatcgcaatacatttgccgagcagccttccactgtcggctatgcacggcaaattatcaaaaaggaaggatggggactccagggcctcaataagggactcaccgccacactgggcaggcacggcgtttttaacatggtgtattttggattttattataacgtgaagaatatgattcccgtgaataaagaccctatactggagttttggcggaaatttgggatagggctgttgtccggaactatcgcaagtgtcattaacattcctttcgatgtcgccaagtctagaattcagggtccacagcctgttccaggtgagataaaatacagaacctgcttcaagacaatggccaccgtgtaccaagaggagggaatcctcgccctgtataaaggtctcttgcccaagattatgagacttgggccagggggagccgtgatgctgctcgtctatgaatatacctacagctggctgcaggagaattggtag

SEQ ID NO: 219393 - DNA, 2785 bp, Artificial Sequence
  derived and/or modified sequence
ttataggacaactaactgaggaatttattcacttgtcccttcttttgaacctcactgtgctctggcttgccaggaggtgcaagtgtcgtccccgctttgtacttggcgctccaggcctgggtcacttcacttgagttatcagaggcaaccgtctagtttgacaaactaccggaggctcctgatagagaagggcgtgggcgccaatctaggagacaaagcctgagccgctgcggtgagccaacccaaacccatccgcgggtcttctttccagagacattttcggagccgagggcgcctctgcgagagcgctgcgaacaggttccgacgcgccggagatcgcgcgacgaatctgcgcctcgaaccctcgctttccagcagtcgccggattgctgctccacagggagccaacgcgcttgaggaccagcccagccggggctctctggatcagtaggctgtgcaggctgcgagctcgttgacgcatctcagcccactcccttgtcctcccgcctggcgaagatgtccgccaagcctgaagtcagcttagtgcgcgaggcttctcggcagatcgtggccggtggttctgcaggtcttgtagaaatttgcctgatgcaccccctagatgtggtgaaaaccaggtttcagattcagagatgtgcaaccgatccaaacagttataaaagcttggtagacagctttcgaatgattttccaaatggaagggttatttggtttttacaagggaattctgccacctatcttggctgaaaccccaaaaagagcagtgaagtttttcacctttgagcagtacaagaaattgctgggatatgtgtcactgtcaccagcattgacattcgccattgctggattgggatctggactaacagaagccattgtagttaacccttttgaggtagtaaaagttggcttgcaagcaaatcggaacacatttgcagagcaaccatccactgtgggttatgcaagacaaatcattaagaaggaaggctggggactccagggcctcaacaaaggattaactgcaactttgggacgacatggagttttcaacatggtttattttggcttctactacaatgtcaaaaacatgattcctgtcaataaggatccaatcttggagttttggagaaaatttgggattggtcttctctcggggacaatagcctcagtcattaacatcccttttgatgttgccaaaagtaggattcaagggcctcaaccagttcctggagagatcaagtacagaacctgttttaaaacaatggcaacagtctatcaggaagaagggattttagctttgtacaaaggcctgcttcccaagattatgagacttggaccaggtggtgcagtgatgctgctggtttatgaatacacctattcatggcttcaagagaactggtgattgcctatgaagtgtttttcccccttgagataatggatatttgctatgcagcaccatgaagaagagagactatcgatcggccaggtgtataattatgaaggagaaaactgttcaagaacaaaatctattttaatactttaaaaaatgtctataggcaacttgagattatagttttggctgtataaataaaactgtgagaagaaaaaaataatatgaaacaatgaggtatttaaagtgaatatagaaaaatagcatagaaatcatatatttatttcataaaataaatagaaactttgtctcctgtgttcctcttcaatgcttcacaatgaaaattcattgtattgatcagcatttttcctaagaggtctagaaatgcttaaactattgaaaataaatcaaattattcaaagactggattaaaaaaaagttaagccaaaatttaagcagtttttataatgaattaaattattccataaataatatttaaagagcacaagaaaaattttttaaagtgcactaaaatgaccttttaagaatgtttaattttatgaatactatgttaaaatgtaaatctgttggttttttttagtaactatgcacatatcagctctattttcctacatctactttatatctcatattgctgtaagataataaataggtattttaaaacattgtttaaaacagaatgttaaaacactgttgtttaagcatgtttaaatcaaggtattccaaatctcttctaacacaagtaggaaacatgaaataaaatttactttcctccacatagttctctttgaagataagttttgttgatgagatattgtcatgttaaatcacaaattggaaacacctttggacccatttgtcagccatcagtatttgcatccaaatacctttattcagcatgcctacctgtgccatttttaggaagaatgtatagaacagaactgcattttcaggttattagttttaaacgacaacttcaggtgggaagtcagctgtctgcagtattaaaatatgtatgatgaaggggaaatgttctgaaaaagaaatacacttagcatttctaaggattactatactaacatgtatcaacaaaaatatctccttggtcttgatgtaaccaaacttgattttatatctgcatccagagatgatgctgattcagtaaagtcaacaagaataactgaaagtccatatgacacctgtcctaagttactaccgtgggctatttctactacggggctatttcactaaagcattttgaaaataaaaagtaaaagataacatggtaattattactttttattaatttagagcatttgaagtataaaaataaaaggcttttgacatactgtatatacat

SEQ ID NO: 219394 - DNA, 900 bp, Artificial Sequence
  derived and/or modified sequence
atgagcgccaagcccgaggtgagcctggtgagagaggccagcagacagatcgtggccggcggcagcgccggcctggtggagatctgcctgatgcaccccctggacgtggtgaagaccagattccagatccagagatgcgccaccgaccccaacagctacaagagcctggtggacagcttcagaatgatcttccagatggagggcctgttcggcttctacaagggcatcctgccccccatcctggccgagacccccaagagagccgtgaagttcttcaccttcgagcagtacaagaagctgctgggctacgtgagcctgagccccgccctgaccttcgccatcgccggcctgggcagcggcctgaccgaggccatcgtggtgaaccccttcgaggtggtgaaggtgggcctgcaggccaacagaaacaccttcgccgagcagcccagcaccgtgggctacgccagacagatcatcaagaaggagggctggggcctgcagggcctgaacaagggcctgaccgccaccctgggcagacacggcgtgttcaacatggtgtacttcggcttctactacaacgtgaagaacatgatccccgtgaacaaggaccccatcctggagttctggagaaagttcggcatcggcctgctgagcggcaccatcgccagcgtgatcaacatccccttcgacgtggccaagagcagaatccagggcccccagcccgtgcccggcgagatcaagtacagaacctgcttcaagaccatggccaccgtgtaccaggaggagggcatcctggccctgtacaagggcctgctgcccaagatcatgagactgggccccggcggcgccgtgatgctgctggtgtacgagtacacctacagctggctgcaggagaactggtag

SEQ ID NO: 219395 - protein, 2248 aa, Artificial Sequence
  derived and/or modified sequence
MKDKRKKKDRTWAEAARLALEKHPNSPMTAKQILEVIQKEGLKETSGTSPLACLNAMLHTNTRIGDGTFFKIPGKSGLYALKKEESSCPADGTLDLVCESELDGTDMAEANAHGEENGVCSKQVTDEASSTRDSSLTNTAVQSKLVSSFQQHTKKALKQALRQQQKRRNGVSMMVNKTVPRVVLTPLKVSDEQSDSPSGSESKNGEADSSDKEMKHGQKSPTGKQTSQHLKRLKKSGLGHLKWTKAEDIDIETPGSILVNTNLRALINKHTFASLPQHFQQYLLLLLPEVDRQMGSDGILRLSTSALNNEFFAYAAQGWKQRLAEGEFTPEMQLRIRQEIEKEKKTEPWKEKFFERFYGEKLGMSREESVKLTTGPNNAGAQSSSSCGTSGLPVSAQTALAEQQPKSMKSPASPEPGFCATLCPMVEIPPKDIMAELESEDILIPEESVIQEEIAEEVETSICECQDENHKTIPEFSEEAESLTNSHEEPQIAPPEDNLESCVMMNDVLETLPHIEVKIEGKSESPQEEMTVVIDQLEVCDSLIPSTSSMTHVSDTEHKESETAVETSTPKIKTGSSSLEGQFPNEGIAIDMELQSDPEEQLSENACISETSFSSESPEGACTSLPSPGGETQSTSEESCTPASLETTFCSEVSSTENTDKYNQRNSTDENFHASLMSEISPISTSPEISEASLMSNLPLTSEASPVSNLPLTSETSPMSDLPLTSETSSVSSMLLTSETTFVSSLPLPSETSPISNSSINERMAHQQRKSPSVSEEPLSPQKDESSATAKPLGENLTSQQKNLSNTPEPIIMSSSSIAPEAFPSEDLHNKTLSQQTCKSHVDTEKPYPASIPELASTEMIKVKNHSVLQRTEKKVLPSPLELSVFSEGTDNKGNELPSAKLQDKQYISSVDKAPFSEGSRNKTHKQGSTQSRLETSHTSKSSEPSKSPDGIRNESRDSEISKRKTAEQHSFGICKEKRARIEDDQSTRNISSSSPPEKEQPPREEPRVPPLKIQLSKIGPPFIIKSQPVSKPESRASTSTSVSGGRNTGARTLADIKARAQQARAQREAAAAAAVAAAASIVSGAMGSPGEGGKTRTLAHIKEQTKAKLFAKHQARAHLFQTSKETRLPPPLSSKEGPPNLEVSSTPETKMEGSTGVIIVNPNCRSPSNKSAHLRETTTVLQQSLNPSKLPETATDLSVHSSDENIPVSHLSEKIVSSTSSENSSVPMLFNKNSVPVSVCSTAISGAIKEHPFVSSVDKSSVLMSVDSANTTISACNISMLKTIQGTDTPCIAIIPKCIESTPISATTEGSSISSSMDDKQLLISSSSASNLVSTQYTSVPTPSIGNNLPNLSTSSVLIPPMGINNRFPSEKIAIPGSEEQATVSMGTTVRAALSCSDSVAVTDSLVAHPTVAMFTGNMLTINSYDSPPKLSAESLDKNSGPRNRADNSGKPQQPPGGFAPAAINRSIPCKVIVDHSTTLTSSLSLTVSVESSEASLDLQGRPVRTEASVQPVACPQVSVISRPEPVANEGIDHSSTFIAASAAKQDSKTLPATCTSLRELPLVPDKLNEPTAPSHNFAEQARGPAPFKSEADTTCSNQYNPSNRICWNDDGMRSTGQPLVTHSGSSKQKEYLEQSCPKAIKTEHANYLNVSELHPRNLVTNVALPVKSELHEADKGFRMDTEDFPGPELPPPAAEGASSVQQTQNMKASTSSPMEEAISLATDALKRVPGAGSSGCRLSSVEANNPLVTQLLQGNLPLEKVLPQPRLGAKLEINRLPLPLQTTSVGKTAPERNVEIPPSSPNPDGKGYLAGTLAPLQMRKRENHPKKRVARTVGEHTQVKCEPGKLLVEPDVKGVPCVISSGISQLGHSQPFKQEWLNKHSMQNRIVHSPEVKQQKRLLPSCSFQQNLFHVDKNGGFHTDAGTSHRQQFYQMPVAARGPIPTAALLQASSKTPVGCNAFAFNRHLEQKGLGEVSLSSAPHQLRLANMLSPNMPMKEGDEVGGTAHTMPNKALVHPPPPPPPPPPPPLALPPPPPPPPPLPPPLPNAEVPSDQKQPPVTMETTKRLSWPQSTGICSNIKSEPLSFEEGLSSSCELGMKQVSYDQNEMKEQLKAFALKSADFSSYLLSEPQKPFTQLAAQKMQVQQQQQLCGNYPTIHFGSTSFKRAASAIEKSIGILGSGSNPATGLSGQNAQMPVQNFADSSNADELELKCSCRLKAMIVCKGCGAFCHDDCIGPSKLCVACLVVR

SEQ ID NO: 219396 - DNA, 6747 bp, Artificial Sequence
  derived and/or modified sequence
atgaaagacaaacggaaaaagaaagatcggacgtgggcagaggccgctagactggccctggagaaacaccccaatagtcccatgacagccaagcaaatcctggaggtgattcagaaggaaggtctcaaagagacgtctggcacttctcccctcgcatgcttgaatgccatgcttcacacaaatacccgtattggggatggcactttctttaaaatacccggaaaatctggcctctacgcactgaaaaaggaagagagtagctgtcctgcagatggcactttggaccttgtatgtgagagcgaactggacggaactgatatggcggaggccaacgcccatggcgaggaaaacggtgtttgctctaagcaggtgacagatgaggcgagcagcacccgggactcctcgctcaccaacacggcggtacagtccaagctggtctctagctttcagcagcacacaaagaaggccctgaaacaggcactcaggcaacagcagaaacgccggaacggggtgagcatgatggtcaataaaacagtgccacgtgttgttctgacccctctgaaagtgtctgatgaacagtctgactcaccaagcggctcagagagcaagaatggcgaggccgactctagtgataaggaaatgaaacacggccagaagtctcctaccggtaagcagactagccaacacttgaaaagattgaaaaagtcggggctgggacacctaaagtggacaaaggctgaggacatcgacattgaaacaccagggtcgatcttggtgaatacaaacttgcgagcgctgataaataaacatacctttgctagtcttccccagcatttccagcagtaccttctacttttactgccagaggtggatcggcaaatgggttccgatggcatcctgcggctgtcaaccagtgcactgaataacgagttcttcgcttatgccgctcaaggctggaaacagcgtcttgctgagggggaatttacacctgaaatgcagctgaggatacgtcaggaaatagaaaaggaaaaaaaaacagagccttggaaggaaaagtttttcgagcgcttctatggagaaaaattggggatgtcccgggaggaaagtgtgaagcttactacagggccaaataatgcaggagcacagtctagctccagctgcggcacctccgggcttcctgtatccgcccaaaccgccctcgcagaacaacagcctaagagtatgaaaagcccagcaagtccagagcccgggttctgtgccactctgtgccctatggtcgagatcccgccaaaggatattatggctgagttggagtcggaggatatcctcatccccgaggagtcagtgatccaagaggaaatcgccgaagaagtggagacgtctatctgcgaatgtcaagacgaaaatcataagacgatcccagaattttctgaggaggccgaatccctgaccaattctcacgaggagcctcagattgccccacccgaagacaacttagagtcttgtgtgatgatgaatgatgtgctggagaccctgccgcatattgaagtcaagatcgaaggaaagtccgagtccccccaggaagaaatgacggtggtgattgaccaactcgaggtgtgcgacagcctgattccaagcacatctagcatgacacatgttagtgacacggagcacaaagagtcagagacagccgttgaaacgtccaccccaaaaatcaagactggctccagttccttggagggacagtttcccaacgaaggcatagcaatcgacatggagctgcaatcagatcccgaagagcagctatctgagaacgcatgtattagcgagacctctttctcaagcgagagtccagagggggcctgcacatctctgcccagccccgggggagagacccagagcacaagcgaggaatcttgcacccccgccagcctggaaactacattttgtagcgaggtcagttctaccgagaacacagataagtacaaccaacgcaattctacggatgaaaattttcacgcatcgctgatgtcagagatctccccgatttctacaagtcccgagatatcagaggcgtctttgatgtccaacctacccctgacttccgaagcttcacctgtctccaatctgccgcttacaagcgagacttcccccatgagtgatttgcctttaacaagtgagacaagtagcgtgagttcaatgctgttgacttcggagacaacctttgttagttcactgcctctaccaagcgaaacctcgccgattagcaatagctccatcaacgaacgcatggctcaccagcagcgcaagtcaccctccgtctctgaggagcctctgagcccccagaaggacgaaagttcagccactgccaaacctctcggggagaacttgacatcccaacagaagaacctgagcaatacacccgagcccatcataatgagttcttcttccatcgccccagaggcttttccaagcgaagacctacataacaagaccctgagccagcaaacatgtaaaagtcatgtggatactgagaagccataccccgccagtattccagagttagcgtccactgaaatgataaaagtcaagaaccacagcgtcctccagcggaccgaaaagaaagttttaccttccccactggaactgtccgtgttcagtgaagggacagacaacaaggggaatgagctgccaagcgccaaattgcaggataaacagtacatcagttctgttgataaggcccccttttcggaaggttctcggaataaaacccataagcaaggttcaacccagtcccgcctggaaacaagccatacttctaagtctagcgagccatctaaatcacctgatggtatcagaaatgaaagccgcgatagcgaaatcagtaagcgcaagactgctgagcagcatagttttgggatctgtaaagagaagcgggcgaggattgaggatgatcagagcacgagaaatataagctcttcttctcctccagagaaggagcaaccacccagagaagaacctcgagtgccgcctctgaaaatccagcttagcaagattggaccaccatttatcattaaaagccagcctgttagcaaacccgagtccagggcatcaacaagtacctccgtcagcggtggccgcaacaccggtgctcgaaccttagcagatatcaaagccagggcccagcaggccagagctcagagggaagccgccgcagctgctgccgttgctgcagccgcctctattgtgtccggagctatgggctcgcccggcgaaggtggcaaaacacggactctcgcccacatcaaagaacagactaaggctaagctattcgcgaaacatcaagccagagctcacctgttccagacttctaaggaaacccgactgcctcctccgctatcatcaaaggagggcccccccaatcttgaagtgagcagtaccccagagactaagatggaaggatcaacaggtgtgataatagtgaatcccaactgtagatctccctccaataagagtgctcatttgagggagacaacaactgtgctccaacagagcctgaacccaagcaaacttcctgaaaccgctaccgatctaagcgtccacagctccgatgaaaacattcctgtttctcacctgtccgagaagatcgtgagttctacgtcctcggagaactcatccgtgcctatgctgttcaataagaacagcgtcccggtcagcgtgtgctctaccgccatcagcggggccattaaagagcatcctttcgtgagtagcgtggacaagtctagtgttctaatgagcgtggattctgctaatacaacaatctctgcttgtaacatatccatgcttaaaaccatccagggtacagatacaccctgcattgctatcattccaaagtgcatagaatcaactcccattagcgccacaaccgagggatccagcatttcgagctcaatggatgacaaacagctcctgatctcatcttccagcgccagtaatctcgtttcgacccagtacactagcgtgcccacaccaagtataggaaataacctgccaaatctctctacatcttctgtgctaattccaccgatgggcatcaacaaccgctttccgagtgagaagatcgctatccccggatctgaggagcaggccaccgtaagtatgggcaccaccgtccgcgcagcgttgtcatgttcagatagcgtggctgtgaccgattccttagtcgcgcatccaaccgtggccatgttcaccggcaatatgttgacaattaatagttacgacagccctcctaagctgagcgccgagagcctcgataaaaactctgggcctcgaaacagggcagataactctgggaagccgcagcaaccacccggaggctttgctcccgctgcaattaaccggagtatcccttgcaaggtcatagtcgaccattccacaacattaacgagttccctgtctctcaccgtaagtgttgagtcaagcgaggcttctcttgacctccagggacgtcctgtccgtactgaggccagcgtccaacccgtcgcttgcccccaagtaagtgtcatttctcgtccagaaccagtggcaaacgaaggcattgatcattcctcaaccttcattgcagcctccgcagctaagcaagattccaaaaccttgcctgccacttgtaccagcttgagggaacttccactagtcccagacaagctgaatgaaccaacagcaccgtcgcataattttgccgaacaggccagaggacccgcgccgttcaaatcagaagccgataccacatgtagtaatcagtataatccaagtaaccggatctgttggaatgacgatgggatgcggtccactggccagcccctggtgacccattccgggtcctccaagcagaaagaatatcttgaacagtcttgtccgaaggccatcaagacggagcacgctaactacttgaatgtgagtgagctccatccgagaaaccttgttaccaatgttgctttgcctgtcaaaagcgaacttcatgaggccgataaaggcttccgtatggacacagaagacttccccggtcctgagttacctcccccagctgccgaaggggcctcatccgtccagcagactcagaatatgaaggcatccacatcatctcccatggaagaggctatcagcctggctactgacgccctaaaaagggttccgggcgcaggctcatccggatgcagactgagctccgtcgaagcaaataaccctctagtgacacagctcctccagggaaacctccccctggaaaaggttcttccacaacctcggctgggggcaaaactggaaattaaccggctgccgctcccgctccagactacatccgttgggaaaactgcccctgaacgcaatgtcgagatccctccttcatcccctaaccccgatggcaagggatatctcgccggcaccttagcccccttgcagatgagaaaacgggagaatcacccaaagaagagggtagcaagaactgttggtgagcatacgcaggtgaagtgcgaacccggaaaactcctggtggaaccagacgtgaaaggcgtcccatgtgtgatctcaagtggcatctcacagctgggtcattcccagcctttcaaacaggagtggctcaacaaacacagcatgcagaataggatcgtacactcccctgaggtgaagcaacagaagcgcctccttccatcatgctcttttcaacagaatctgttccacgtcgacaagaatggaggtttccacacagatgccgggacgtcccatcgccagcaattttaccagatgccagttgccgccaggggccccattccgactgccgctctgctgcaagcctccagcaaaacgccagtggggtgcaatgcattcgcctttaacagacacctggagcaaaagggactgggtgaggtgtcgctgagctccgcgccacatcagctgaggctcgccaacatgttatcccccaacatgcctatgaaggaaggggatgaagtcggagggacagcacataccatgcctaacaaggctcttgtgcacccccctccaccccctccgcccccaccgccaccaccattagcactgccaccgccgcctcccccccctccccccctccctccacccctgcccaatgctgaagtgccttccgatcagaaacagcccccggttacaatggaaactacaaagcggctctcctggcctcaatcgaccggaatctgttctaatattaagagcgaaccactgagtttcgaagagggcctgagctcttcttgtgaactcggaatgaaacaggttagttacgatcagaacgagatgaaagaacagctgaaagcctttgcccttaaaagcgccgattttagctcatatctgctgtcagagccccagaagccttttactcagctggccgctcagaagatgcaggttcagcagcagcaacaattgtgcggaaattatcctacaatccatttcgggagtacatcatttaagcgcgccgcatcagccattgagaaaagtattgggatcctcggcagcggctctaacccagctaccggtctatccggtcagaatgcccaaatgcctgtacaaaatttcgcagactcctccaatgcggacgaactggagctgaaatgctcatgcagactaaaggcgatgatcgtgtgtaagggctgcggagctttttgccatgacgattgcatcggtccctcaaaactgtgtgtggcttgtctggtcgtgcgttag

SEQ ID NO: 219397 - DNA, 7620 bp, Artificial Sequence
  derived and/or modified sequence
gagcaccccgtggaatcccccacgtcatcatcagaaccatcaatgagatgcaaacatgaaagacaagaggaagaagaaggaccgcacctgggccgaggctgcccgcctggcactagaaaaacaccccaactcaccaatgacagcaaagcagatattggaagtcattcagaaagaagggttaaaagaaacaagtggaacctctccattagcctgtctgaatgcaatgcttcacactaacactcgaataggggatggaacattcttcaaaatccctggaaagtcaggcctctatgctctcaaaaaagaggagtcgtcatgcccagcagatggcacgttggatttagtctgtgaatctgaattggatggtacagatatggccgaggcaaatgcccatggagaagaaaatggagtttgttcgaagcaggtaactgatgaagcatcttccactcgagattcaagccttactaacacagcagtgcaaagcaagttagtgtcttccttccagcagcacaccaaaaaggctcttaaacaggctttgaggcagcagcagaaaagaagaaatggagtctcaatgatggtaaacaagactgttcctcgtgttgttttgacaccattaaaggtgtctgatgagcagtcggattcgccttcaggatctgaatctaaaaatggtgaagcagacagttcagataaagaaatgaaacatgggcaaaaatctcccactggaaaacaaacaagtcagcacttaaaacgattaaaaaagtctggtttagggcacttgaaatggaccaaagctgaggacattgacatagaaaccccaggatctattcttgtcaacactaacttgagggcattaataaataaacatacgtttgcttccttacctcagcattttcaacaatacctcctgcttttgctcccagaagtggataggcagatgggaagtgatggaattttacgcctcagtacttcagctctaaataatgaattctttgcatatgcagcacaagggtggaaacagcgactggcagaaggagagtttaccccagaaatgcagttgcggataaggcaagaaattgagaaggaaaagaaaacagaaccttggaaagaaaaattctttgagaggttttatggagaaaagctgggcatgtcaagagaggaatctgtgaagctcactactggaccaaacaacgctggagctcaaagtagttcttcatgtgggacttctggccttccagtttctgcacagacagccttggcagaacaacagccaaaaagcatgaaaagcccagcttctccagagcctggtttctgtgctactctttgccctatggtagaaattccacctaaagatataatggcagaattggagtcagaggatatcttgatccctgaagaatctgtaattcaggaggaaattgcagaagaggtagagactagtatctgtgaatgccaggatgaaaatcataagacaatacctgaattttctgaggaggctgaaagtctaaccaattctcatgaagaaccccaaatagcacctcctgaagataacttggaatcctgtgttatgatgaatgatgttttagaaactttgcctcatattgaagttaagatagaagggaagtcagaatcaccccaggaagaaatgacagttgttatcgatcagttagaagtctgtgactctcttattccttccacttcatctatgactcatgtcagtgacacagaacataaggagtcagaaactgcagtagagaccagtacccccaaaataaaaacagggtcatcttctctagaaggccagtttccaaatgaaggaattgctatagatatggagctacagagtgaccctgaagaacagctttcagaaaatgcctgcatctctgaaacgtccttttcttctgagagcccagagggagcctgtaccagcctgccttctccaggaggggaaacacagtccacatcagaagaatcatgtactccagcctcccttgagacaacattttgttctgaggtatctagcactgaaaatacagacaaatacaaccagagaaattccactgatgaaaactttcatgcatctttgatgtcagaaatatctccaatatccacttcacctgaaatatcagaagcatctcttatgtccaacttaccattaacatctgaagcatcaccagtatccaacttacctttaacatcagaaacctcaccgatgtctgacttacctttaacatcagaaacttcttcagtgtcttccatgcttctcacctctgagaccacttttgtatccagtttgccacttccttcagaaacatctccaatttccaactcttccataaatgagagaatggcacatcagcaaagaaagtcaccttctgtatctgaagagccactctccccgcagaaagatgagtcttccgccactgccaaacctctgggagagaaccttacctcccagcagaagaatctgtctaatactcccgaacccatcataatgagttcttcttccattgctcctgaagcatttccgtctgaagatttgcacaataagaccctgagtcagcaaacctgtaaatcacatgttgacactgagaagccctaccctgcttcaattccagaacttgcttctactgaaatgataaaagttaaaaatcatagcgtcctgcaaagaacagaaaaaaaagtgttaccttcaccattggaattatctgtcttttctgaagggacagataataagggaaatgagcttccatctgctaaattacaggacaagcaatatatctcatcagtggataaggctccattttcagaaggctctagaaataaaacacataagcaagggagtacacagagtcggttagaaacctcacatacttccaagtcatcagagccctccaagtcacctgatgggataagaaatgaaagtagagattcagagatatcaaagagaaaaactgcagagcaacacagctttggaatctgtaaggaaaagagagctaggatagaagatgatcagtcaacccggaacatatcatctagcagcccacctgagaaagaacagcctcccagagaggaaccaagggttccccctctcaagattcagctttccaaaattgggccaccttttataatcaagagccaaccagtctccaaacctgagtctcgagcatccactagcacatctgtcagtggcgggaggaacacaggagccaggaccctcgcagatatcaaggcccgggcccaacaagctcgggcccagcgagaggctgctgcagctgctgctgtggctgctgcagcgagcattgtctctggagccatgggaagtccaggagagggtggaaagacgagaactctggcacacatcaaagagcagacaaaggctaagctctttgcaaagcatcaagctcgagcccatctcttccagacctctaaagagacccggttgcctcctccgctcagctcaaaggaagggcctccaaacttagaagtctcttctacccctgaaacaaaaatggaaggttcgactggtgtcattattgtcaatccaaactgtagatctcctagcaacaagtctgcccacctccgggagaccaccactgtactacagcagtctcttaacccaagtaaacttccagaaactgccactgacttatctgtgcatagttctgatgaaaacatacctgtgtcacatttatctgagaaaattgtttcatctacctcttctgaaaatagcagtgtgcccatgctttttaataaaaattctgtccctgtatctgtttgcagcactgctatatcgggagcaattaaagaacatccctttgtgagttctgttgataaatcctctgtcctaatgtctgttgacagtgcaaacactacaatttctgcttgtaatataagcatgttaaaaaccatccagggaactgacactccatgcatagccattataccaaaatgtattgaaagcactcccatttcagccactacagagggctccagcatatcaagctccatggatgataagcagttactaatatcaagcagcagtgctagtaacttagtctccactcagtacacctctgtgccaactccctccatcggaaacaatttgccaaacctctccactagctctgtcttgattcccccaatgggaattaacaacagatttccttctgagaagatagccatacctgggagtgaagaacaggccactgtatccatgggtaccactgtgagagcagccctcagctgcagtgattctgtagcggtcacagactctctggttgcacacccgaccgtcgcaatgtttactggaaacatgctgacaataaactcttatgatagtcctcccaagttaagtgctgaaagcttggacaaaaattcagggcctcgaaacagggcagataattctggaaaacctcagcaaccaccagggggctttgcaccagcagccataaaccgatcaattccgtgtaaagtcatcgttgaccacagcaccacgctgacctccagtttgtctctgactgtctccgttgaaagctcagaagccagcttggacctgcagggcagaccagtgaggacagaggcatccgtacagcccgtggcgtgtcctcaggtgtctgtgattagcaggcctgagccagttgccaacgaaggtatagatcacagttccactttcattgctgcttcggcagcaaaacaagacagtaaaacattgccggccacctgcacaagtctccgagaattaccccttgttccagataaattaaatgagccgactgctcccagtcataactttgctgagcaggcacgtggcccagctcctttcaaaagtgaagcagacacaacctgtagcaatcagtataacccaagtaaccggatttgctggaatgatgatgggatgaggagcacaggacagcctctggttactcactcgggttcaagtaaacaaaaagaatatctagagcaaagctgtccaaaggctatcaaaactgaacatgccaactacttgaacgtgtcagaacttcatcccaggaatcttgtaacaaatgttgctcttcctgtgaaatctgaacttcacgaagcagacaagggctttagaatggacactgaagacttccctggccctgagctgcctcctccggctgcagagggagcctctagtgtacaacaaacacagaacatgaaagcttccacctcaagtcccatggaagaggctatttccttggctaccgatgccctgaagagagtccctggtgcagggagctcaggctgtcgtctgtcctctgtggaggctaacaatccgctggtgacgcagttactacagggcaacctgcctttggaaaaagtgttgccacagcccagattgggagccaagcttgaaatcaacaggcttccattgcctcttcaaactacctcagtgggtaaaacagcaccagagagaaacgttgaaattccgcccagctctccaaatccagatggtaagggctacttggcagggactctggcaccactccaaatgagaaagcgagaaaaccaccccaaaaagagagtagctaggactgtaggagaacacactcaagttaaatgtgaaccaggaaaattgttggtggagccagatgttaaaggggtgccttgtgtcatcagttccggcatcagtcagctaggacacagccagccatttaagcaagaatggctaaacaagcactccatgcagaacagaattgttcacagccctgaggtcaaacagcaaaagcggctgctcccctcgtgtagcttccagcagaacctatttcatgttgacaagaatggcggcttccacactgacgctggtacctcacacagacagcagttttaccaaatgcctgtggctgccaggggccccattcctactgcagctctgttacaggcctcttccaagaccccagtggggtgtaatgcatttgccttcaacaggcatcttgaacagaagggattgggagaggttagtctttcctcagcacctcaccagctaaggttagccaacatgttatcccccaatatgcccatgaaagaaggtgatgaggtgggaggcactgcacacacaatgccaaacaaagcactagtacatccgccgccgccaccgcctccccctccccctccacccttggctttgcccccgcctccccccccaccacctccgctacctccacctctccctaatgcagaagtcccatctgatcaaaaacaacctccagttaccatggaaaccactaagagacttagttggccacagtccacgggcatatgtagcaatataaaatcggaacctctttcttttgaggaaggtttaagcagcagctgtgaactgggcatgaaacaagtttcctatgaccagaatgaaatgaaagaacagttaaaagcattcgcgctaaaaagtgcagatttctcttcctatttgctttctgagccacaaaagccttttacccaattagctgctcagaaaatgcaggtgcagcaacaacagcagctctgtggaaattatccaacaatacactttggtagcacgagtttcaaaagggcagcatctgcaattgaaaagtccattgggattttgggaagtggctccaatcctgccacaggcttgtctggtcagaacgctcagatgcccgttcagaactttgccgacagcagcaatgcagatgaattggaactgaaatgctcttgccggctgaaagccatgattgtgtgcaaaggctgtggggccttctgccatgacgactgcataggtccttcaaaactttgtgtagcatgcctggttgtacgataagagctgagtgaaagatgcagtatcccttttccacacggaaaagccaaatagcatcagcaacaacaaatagaataatgcagtggtttctatcatgctaatttattttgctttggagcaggtacctttcctctatggcattattttcttgcatttctcataaaggggaggatgcatcccaactgaatggctcactggcatgtcttttatgtgttcagttgccattcctagctttggaaagtttctatctgtccatgtgtatacaagtcaatgccccatttttgtttttcttttaaccgaggtgtagataggaaaaggacatttttaattacttaataaccggaaatgcagatgtgtaaggagaatgagaggaatgagttaaagtggttatgcatttttctatagatgagccattacagcaaggaattttacagttgacttctctgaacctagctttaccacagtgattaaatcctatttagaaaggggaatctgatttaaatgtgtgattccttgtatttgctcctatcacaaaagatatattaaaggaggtatgccattaatgaaatccactgtcctgagtattatctttcctcctgttgtactttctcagagactatggcagaatatctggatcttccttggattttgtacacatattgtagtgaaatgtgtcctacatctgaaattgcatgggactcatgcccagcaatctggttctaggcctttgacacctgataatatgagagcaattggccagccaatagccataagcccagaggattttagagcttcatgtgtggcttttaagagcaggtttg

SEQ ID NO: 219398 - DNA, 6747 bp, Artificial Sequence
  derived and/or modified sequence
atgaaggacaagaggaagaagaaggacaggacctgggccgaggccgcccggctggccctggagaagcaccccaacagccccatgacagccaagcagatcctggaggtgatccagaaggagggcctgaaggagaccagcggcaccagccccctggcctgcctgaatgccatgctgcacaccaacaccagaattggagatggcaccttcttcaagatccctgggaagagcggcctgtatgccctgaagaaggaggagagcagctgcccagcagatggcaccctggacctggtgtgtgagagcgagctggatggaacagacatggccgaggccaatgcccatggagaggagaatggagtgtgcagcaagcaggtgacagatgaggccagcagcacccgggacagcagcctgaccaacacagctgtgcagagcaagctggtgagcagcttccagcagcacaccaagaaggccctgaagcaggccctgcggcagcagcagaagagaagaaatggagtgtccatgatggtgaacaagacagtgccccgggtggtgctgacccccctgaaggtgtctgatgagcagagcgacagccccagcggcagcgagagcaagaatggagaggccgacagcagtgacaaggagatgaagcacggccagaagagccccaccgggaagcagaccagccagcacctgaagaggctgaagaagagcggcctgggccacctgaagtggaccaaggcagaagatattgatattgagaccccaggcagcatcctggtgaacaccaacctgcgggccctgatcaacaagcacacctttgccagcctgccccagcacttccagcagtacctgctgctgctgctgcctgaggtggaccggcagatgggcagtgatggcatcctgcggctgagcaccagcgccctgaacaatgagttctttgcctatgctgcccagggctggaagcagaggctggccgagggggagttcaccccagagatgcagctgcgcatccggcaggagattgagaaggagaagaagacagagccctggaaggagaagttctttgagcgcttctacggggagaagctgggcatgagccgggaggagagcgtgaagctgaccaccggccccaacaatgctggggcccagagcagcagcagctgtggcaccagcggcctgcctgtgtctgcccagacagccctggccgagcagcagcccaagtccatgaagagccctgccagccctgagcccggcttctgtgccaccctgtgccccatggtggagatcccccccaaggacatcatggccgagctggagagcgaggacatcctgatccctgaggagagcgtcatccaggaggagattgctgaggaggtggagaccagcatctgtgagtgccaggatgagaaccacaagaccatccctgagttcagcgaggaggccgagagcctgaccaacagccatgaggagccccagatcgcccctcctgaggacaacctggagagctgtgtgatgatgaatgatgtgctggagaccctgccccacatcgaggtgaagattgagggcaagtctgagagcccccaggaggagatgacagtggtgattgaccagctggaggtgtgtgacagcctcatccccagcaccagctccatgacccacgtgtctgacacagagcacaaggagagcgagacagctgtggagaccagcacccccaagatcaagacaggcagcagcagcctggagggccagttccccaatgaaggcatcgccatcgacatggagctgcagagcgaccctgaggagcagctgtctgaaaatgcctgcatcagcgagaccagcttcagcagcgagagccctgagggcgcctgcaccagcctgcccagccctggaggagagacccagagcaccagcgaggagagctgcaccccagccagcctggagaccaccttctgcagcgaggtgagcagcacagaaaatacagacaagtacaaccagaggaacagcacagatgagaacttccacgccagcctgatgtctgagatcagccccatcagcaccagccctgagatcagcgaggccagcctgatgagcaacctgcccctgaccagcgaggccagccctgtgagcaacctgcccctgaccagcgagaccagccccatgtctgacctgcccctgaccagcgagaccagctctgtgtcctccatgctgctgaccagcgagaccacctttgtgagcagcctgcccctgcccagcgagaccagccccatcagcaacagcagcatcaatgaaagaatggcccaccagcagaggaagagccccagcgtgtctgaggagcccctgagcccccagaaggatgagagcagcgccacagccaagcccctgggggagaacctgaccagccagcagaagaacctgagcaacaccccagagcccatcatcatgagcagcagcagcatcgcccctgaggccttccccagcgaggacctgcacaacaagaccctgagccagcagacctgcaagagccacgtggacacagagaagccctacccagccagcatccctgagctggccagcacagagatgatcaaggtgaagaaccacagcgtgctgcagaggacagagaagaaggtgctgcccagccccctggagctgagcgtcttcagcgagggcacagacaacaagggaaatgagctgcccagcgccaagctgcaggacaagcagtacatcagctctgtggacaaggcccccttcagcgagggcagcaggaacaagacccacaagcagggcagcacccagagccggctggagaccagccacaccagcaagagcagcgagcccagcaagagcccagatggcatcagaaatgaaagccgggacagcgagatcagcaagaggaagacagctgagcagcacagctttggcatctgcaaggagaagagggccagaattgaagatgaccagagcaccaggaacatcagcagcagcagccccccagagaaggagcagcccccccgggaggagccccgggtgccccccctgaagatccagctgagcaagattggcccccccttcatcatcaagagccagcctgtgtccaagccagagagccgggccagcaccagcacctctgtgtctgggggcagaaatactggagcccggaccctggccgacatcaaggcccgggcccagcaggcccgggcccagcgggaggccgctgctgctgctgctgtggccgctgctgccagcatcgtgtctggggccatgggcagccctggagagggcggcaagaccaggaccctggcccacatcaaggagcagaccaaggccaagctgtttgccaagcaccaggcccgggcccacctgttccagaccagcaaggagacccggctgcccccacccctgagcagcaaggagggcccccccaacctggaggtgagcagcaccccagagaccaagatggagggcagcactggagtcatcatcgtgaaccccaactgccgcagccccagcaacaagagcgcccacctgcgggagaccaccaccgtgctgcagcagagcctgaaccccagcaagctgcctgagacagccacagacctgtctgtgcacagcagtgatgagaacatccctgtgagccacctgtctgagaagatcgtgagcagcaccagcagcgagaacagctctgtgcccatgctgttcaacaagaacagcgtgcctgtgtctgtgtgcagcacagccatcagcggggccatcaaggagcacccctttgtgtcctctgtggacaagagctctgtgctgatgtctgtggacagcgccaacaccaccatcagcgcctgcaacatctccatgctgaagaccatccagggcacagacaccccctgcatcgccatcatccccaagtgcatcgagagcacccccatcagcgccaccacagagggcagcagcatcagcagctccatggatgacaagcagctgctgatcagcagcagcagcgccagcaacctggtgtccacccagtacacctctgtgcccacccccagcatcggcaacaacctgcccaacctgagcaccagctctgtgctgatcccccccatgggcatcaacaaccgcttccccagcgagaagatcgccatccctggcagcgaggagcaggccaccgtgtccatgggcaccaccgtgcgggccgccctgagctgcagcgacagcgtggccgtgacagacagcctggtggcccaccccaccgtggccatgttcaccggcaacatgctgaccatcaacagctatgacagcccccccaagctgtctgctgagagcctggacaagaacagcggccccaggaacagagctgacaacagcggcaagccccagcagcccccaggcggctttgccccagctgccatcaacagaagcatcccctgcaaggtgattgtggaccacagcaccaccctgaccagcagcctgagcctgactgtgtctgtggagagcagcgaggccagcctggacctgcagggccggcctgtgaggacagaggcctctgtgcagcctgtggcctgcccccaggtgtctgtcatcagcaggcctgagcctgtggccaatgaaggaattgaccacagcagcaccttcatcgccgccagcgctgccaagcaggacagcaagaccctgcctgccacctgcaccagcctgcgggagctgcccctggtgcctgacaagctgaatgagcccacagcccccagccacaactttgctgagcaggcccggggccctgcccccttcaagtctgaggccgacaccacctgcagcaaccagtacaaccccagcaaccgcatctgctggaatgatgatggcatgaggagcacaggccagcccctggtgacccacagcggcagcagcaagcagaaggagtacctggagcagagctgccccaaggccatcaagacagagcacgccaactacctgaatgtgtctgagctgcaccccaggaacctggtgaccaacgtggccctgcctgtgaagtctgagctgcatgaagctgacaagggcttcaggatggacacagaggacttccctggccctgagctgcccccacctgctgctgagggcgccagctctgtgcagcagacccagaacatgaaggccagcaccagcagccccatggaggaggccatcagcctggccacagatgccctgaagagggtgcctggagctggcagcagcggctgccgcctgagctctgtggaggccaacaaccccctggtgacccagctgctgcagggcaacctgcccctggagaaggtgctgccccagccccggctgggcgccaagctggagatcaaccggctgcccctgcccctgcagaccacctctgtgggcaagacagcccctgagagaaatgtggagatcccccccagcagccccaacccagatggcaagggctacctggccggcaccctggcccccctgcagatgaggaagcgggagaaccaccccaagaagagggtggccaggacagtgggggagcacacccaggtgaagtgtgagcccgggaagctgctggtggagccagatgtgaagggcgtgccctgtgtgatcagcagcggcatcagccagctgggccacagccagcccttcaagcaggagtggctgaacaagcacagcatgcagaaccgcatcgtgcacagccctgaggtgaagcagcagaagaggctgctgcccagctgcagcttccagcagaacctcttccacgtggacaagaatggaggcttccacacagatgctggcaccagccaccggcagcagttctaccagatgcctgtggccgcccggggccccatccccacagctgccctgctgcaggccagcagcaagacccctgtgggctgcaatgcctttgccttcaacagacacctggagcagaagggcctgggggaggtgtccctgagcagcgccccccaccagctgcggctggccaacatgctgagccccaacatgcccatgaaggagggagatgaggtgggcggcacagcccacaccatgcccaacaaggccctggtgcaccccccacctcctcctcctcctcctcctcctccacccctggccctgcccccacctcctcctcctcctccacccctgcccccacccctgcccaatgctgaggtgcccagcgaccagaagcagccccctgtgaccatggagaccaccaagaggctgtcctggccccagagcacaggcatctgcagcaacatcaagtctgagcccctgagctttgaggagggcctgagcagcagctgtgagctgggcatgaagcaggtgtcctatgaccagaatgagatgaaggagcagctgaaggcctttgccctgaagtctgctgacttcagcagctacctgctgtctgagccccagaagcccttcacccagctggccgcccagaagatgcaggtgcagcagcagcagcagctgtgtggcaactaccccaccatccacttcggcagcaccagcttcaagagagctgccagcgccatcgagaagagcatcggcatcctgggcagcggcagcaacccagccaccggcctgagcggccagaatgcccagatgcctgtgcagaactttgctgacagcagcaatgctgatgagctggagctgaagtgcagctgccgcctgaaggccatgattgtgtgcaagggctgtggggccttctgccatgatgactgcatcggccccagcaagctgtgtgtggcctgcctggtggtgaggtag

SEQ ID NO: 219399 - DNA, 6747 bp, Artificial Sequence
  derived and/or modified sequence
atgaaggacaagcggaagaagaaggaccggacctgggccgaggccgctcgacttgctctggagaaacatccaaatagccctatgactgctaaacagattctggaggtgatccagaaagaggggctcaaagaaacatcagggacttcgcccctggcatgtttgaatgccatgctgcacaccaatactagaatcggcgatgggacattctttaaaatcccaggtaaatctggcctctacgcacttaagaaggaggaaagttcttgtccagccgatggaacactggatttggtatgtgaaagcgagttggacggaacagatatggcagaagctaatgctcatggagaagagaatggcgtctgctcaaaacaggtgactgacgaagcctcatccacgagggacagctctctaaccaacactgcagtccaatctaaattagtctctagctttcaacagcacaccaaaaaggctcttaagcaagctttaaggcagcagcagaagcggagaaatggtgtctccatgatggttaacaaaacagtgcctagagtggtgctgacacctctgaaggtttccgacgaacagagcgatagtcccagcggctccgagtctaaaaacggcgaagcagattcatctgataaggaaatgaaacatggccagaagtcgccaacaggaaagcagacatcacagcacctgaagcgtcttaaaaagagtggtttaggccatctgaagtggaccaaagctgaagatatagatatcgaaacaccggggagtatacttgtgaacacaaacctgcgggcactaattaacaaacatacattcgcaagcttaccccagcatttccagcagtatctgctgctgttgttacccgaggttgataggcagatgggctcagatgggattttgcggctctctactagcgcccttaacaatgaattctttgcttacgcagcccaaggctggaagcagcgtcttgcagagggagagttcactccagagatgcagctgagaatcaggcaggagatagagaaagaaaaaaagaccgaaccctggaaggaaaagttcttcgaaagattctacggagaaaagctagggatgtcacgggaggaatccgtcaagctcaccaccgggccgaataatgccggtgcccagtcttctagcagttgtggcacatccgggctgccagtgtctgcgcaaaccgccttggctgaacaacagcccaaatccatgaaatcccccgcttctccagaacctggcttttgcgcaaccttgtgcccaatggtggaaatcccaccaaaggacattatggccgagttggagtctgaggatatactcattccagaggaaagcgtcattcaagaggagatcgctgaggaagttgagaccagcatctgcgaatgtcaggacgagaaccacaaaactatcccagagttcagtgaggaagctgaaagtctcaccaactctcacgaagaaccacagattgccccccccgaagataatctggaaagttgcgtcatgatgaacgacgtcctggaaacattgcctcatatcgaagtgaagattgagggaaaatccgagagcccccaggaggagatgactgtggtcattgaccagctcgaggtttgcgactcgctgattcccagtactagtagcatgactcacgtcagcgatactgaacacaaggagtccgagaccgccgtcgagacttctactcctaagatcaaaacaggtagttctagcctcgagggccagtttccaaatgaaggcatcgccattgacatggagttacagtctgacccggaggaacaactgagtgagaacgcatgcatcagtgaaacctcattttcatctgagagtcctgagggcgcctgtacgagcctgccctctcctggtggagaaactcagagcacttctgaagaatcctgcaccccagctagcctcgagactaccttttgcagtgaggtaagctccaccgagaacactgacaagtataaccagcgcaatagcacagacgaaaattttcacgcatcacttatgtctgaaatatctcccataagtactagccctgaaatcagcgaggcatcccttatgagcaacctgccactcactagcgaggcctccccagtgagcaacctccccctcacgtctgagacgagccccatgagcgatctgccactcacatcagaaaccagctccgttagtagcatgctccttacatctgagacaaccttcgtaagctctctgcctctgccgagcgaaacctctccaatcagcaacagctccatcaacgaacgcatggcacaccagcaacgtaagtctcccagcgtttccgaggagcctctgtcaccgcagaaggacgaatcctccgcaaccgccaaaccattgggagagaacttaacctcccagcagaaaaatctctctaatacacccgaaccgataattatgtcaagctccagcatagcacctgaggcctttccttccgaggacctacataataaaaccctgtctcagcagacctgcaaatcacatgtggataccgaaaagccctatccggcctcaatccccgaacttgccagcaccgaaatgatcaaggtgaaaaaccacagcgttctgcagaggacagagaagaaagtgttgccttctcccttagaactctcagttttttcagagggaacggataacaaaggcaacgagcttccctctgccaagctgcaggacaagcagtatatctcgtcagtagataaagccccattcagtgaaggttctcggaataagacccataagcagggcagtactcagtctaggttggaaaccagccacacttccaaaagctcagaaccttccaagtcaccagatggcatcaggaacgaatcacgagacagtgagatctccaaacggaaaacggccgagcagcactccttcgggatatgcaaagagaagcgagctcgcattgaggatgaccagagtactcgcaatatcagttctagcagtccacccgagaaagaacagcccccgcgggaagaacctcgcgtccccccgcttaagattcaattgtccaaaatcggcccgcccttcatcatcaaatcccagcctgtgagcaagccagagagtcgcgcctctacgtcaacttcagtgtccggggggaggaacacaggagcccggaccctggccgatataaaggcccgtgctcagcaggcgagagcccagcgtgaggccgcagctgccgcggccgtggccgcagcagcttcgattgtaagtggcgcaatgggatctcccggtgaaggcggtaagactagaactctagctcatatcaaggaacaaacgaaggccaaactgttcgccaaacatcaggctcgcgcgcatctattccagacctctaaagagacacgactaccaccaccacttagttcaaaagagggaccaccaaacctggaggtgagctccaccccagagactaagatggaaggcagcacaggtgtgattatcgttaacccgaactgccgatctccgtcaaacaagtcagcccacctacgcgaaactactactgttctgcaacaatctctcaacccgagtaaactcccagagactgcaacggacttgagcgtgcacagtagcgatgagaatattcccgtctcccatcttagtgaaaaaatcgtgtcctcaacctccagtgaaaattccagtgtgcctatgctgttcaataagaatagcgttcccgtgtccgtgtgctctacagccatctctggagcaataaaagagcacccttttgtcagttccgtcgataagtccagcgtattgatgtcagtggattctgctaatactaccatcagcgcgtgtaatatctcgatgctgaagacaatccagggcactgatacgccgtgcatagctattatcccgaagtgtatagagtctacacccatcagcgctacgacagaaggctcttctatatctagtagcatggacgacaagcaattgctgatttctagctccagtgcttctaacctggtatccacccagtacacttctgttcctaccccaagcatcggtaacaatctcccaaatttatccactagtagcgtgctaatccccccaatgggaatcaacaatcgattcccatccgaaaaaatagccataccgggctcagaggaacaagctaccgttagcatgggaacaacagtaagagcagctttaagctgctctgattcggtggccgtgacggattccctcgtggcacatcccacggtagctatgttcacggggaacatgttgacaatcaattcatacgattcgccgccaaagctttcagccgagagtctggacaagaattcaggcccgcgcaaccgggccgataacagcggtaaaccccagcaaccacctggcgggttcgctccagccgcaataaaccgttccattccctgcaaagtgattgtggatcactccacaacactgaccagttcgcttagcctcaccgttagtgttgagagttctgaagcgagcctggacctgcaaggcaggccagtccggaccgaggcatctgtgcagccagtcgcctgtccccaggtgagcgttatcagcaggcccgagcctgttgccaatgaggggatagatcactctagtacatttatcgccgcctcagccgccaagcaggattctaagactctgcccgccacatgcacgtcattgcgggagttacccctggtcccggacaagcttaacgagcccacggcaccttctcacaactttgccgaacaggcaaggggccccgcgcctttcaagagtgaggctgacaccacttgctccaatcagtacaacccatctaatcggatttgttggaacgacgacgggatgcggtccaccgggcagccccttgtaacgcactcaggaagtagtaagcaaaaggaatatctcgaacagagttgccctaaggctataaaaacagaacatgcaaactacctaaacgtatctgagctgcatccaagaaatcttgtgacaaatgtggctctgcctgtgaagagcgaactgcacgaggcagataaaggtttccgcatggacaccgaagacttccccgggcccgaacttccccctcccgccgctgagggcgcaagctccgttcaacagactcaaaacatgaaagccagtacaagctccccaatggaggaggcgatcagcctcgctaccgacgccttgaaaagagtgcccggagccggctcttcaggttgtcgcctgtcatcagtcgaagccaataaccctttagtgactcaactcctgcagggtaacttacctctcgagaaagtgctgccccagcccaggcttggcgccaagctggagatcaaccggcttccactcccccttcaaacgacaagtgtgggtaagaccgcacccgaacggaatgtggagattccaccatcgtcaccaaaccctgatgggaagggctacctagctggaacactggcacccctgcagatgaggaagcgggagaaccatcccaaaaaacgagttgccaggaccgtgggagaacacacacaggtcaaatgtgaacccggcaaactgctcgtagagccagatgtgaagggggtgccatgcgtgatatcatcaggcatcagtcagctgggccattcgcaaccattcaagcaggaatggctcaacaagcatagcatgcagaatagaattgtacacagtcccgaggtgaaacagcaaaagcgcctgttaccctcctgttcctttcaacagaacctgttccacgtcgataagaatggtgggtttcacactgacgcaggcacaagccataggcagcaattctaccaaatgccagtggcagcacgcgggcccataccaaccgctgctttactccaggcatcgtccaagacacccgttggctgcaatgcctttgctttcaatcgtcacttggagcagaaaggcctgggcgaagtgagcttgtctagcgcacctcaccaactgagattagctaatatgctgagcccaaacatgccgatgaaggagggagatgaagtgggcggcactgcacatacgatgcccaacaaagccctggtgcatccacctcctcccccaccccctccccctcctcctccactggctctacctccacccccccccccccctcccccattaccaccgccactcccaaacgccgaggttcccagtgaccagaagcagccgcctgtaaccatggagacgactaaaagattgagctggccacagtccaccggaatctgctcaaacatcaaaagtgagcccctgagcttcgaggaagggctgtcatcaagctgcgaactgggcatgaagcaagtgagctacgaccagaatgagatgaaggagcagctcaaggcattcgcgctcaaatcagccgacttttctagttatcttctgtccgaacctcagaagccttttacccaattagctgctcaaaagatgcaggtgcagcagcaacagcagttgtgcggtaattatcctaccatccattttggcagcacatcttttaagcgggccgcgtccgcaatcgaaaaatctattggtatactcggtagcggctcaaaccccgctacaggcctctccggccaaaacgcccagatgcccgtgcaaaacttcgcggactcaagtaatgctgacgagttggaattaaagtgtagttgtcgtttaaaggccatgatagtgtgcaaaggctgcggtgctttttgccacgacgattgcattgggccgtcaaaactgtgcgtcgcttgtctggtggtacggtag

SEQ ID NO: 219400 - DNA, 6746 bp, Artificial Sequence
  derived and/or modified sequence
atgaaggataagcggaagaaaaaggatcgtacctgggccgaggcggctagactggccttggagaagcaccccaattccccaatgactgctaaacagattctggaggtgatccaaaaagaaggtttaaaggagacttccggcacgagccctttggcctgtctcaatgccatgctgcacacaaatacaagaataggggacgggaccttcttcaaaatccctggcaaatcaggcctgtatgcactgaaaaaggaggagtcctcatgtcctgcggacggcaccctagacctcgtgtgtgagtcagagctcgatgggactgacatggcggaggcaaacgcacacggcgaggagaatggtgtttgcagcaagcaggtgaccgatgaggcctcaagtactcgggattcgtcgttgacaaataccgcggtccagagcaaactggtgagcagctttcagcaacacaccaagaaggccctgaaacaagcactgagacagcagcagaaaaggcgaaatggggtgtcaatgatggtgaataagacggtgccgagagtcgtattgaccccgcttaaagtgtcggatgaacaaagcgatagtccatctgggtcagaatccaaaaatggtgaggcagactcatctgacaaagagatgaaacatggtcaaaaaagtcctaccggcaaacagacatcacagcacctgaagagattaaagaagagcggcctcgggcacctcaaatggaccaaggctgaggacattgacatagaaacaccaggctctattctggtgaacacaaacctgcgcgctcttattaacaagcacacatttgcctcactgccccagcacttccagcagtatctgctgctgctgcttcccgaagtggacagacaaatgggttctgacggcatcctgagacttagtacaagcgccttaaataacgagttcttcgcatacgctgcccaggggtggaagcagcggttggctgagggcgagtttactcctgaaatgcagctgagaatccggcaggagatcgagaaagagaagaagaccgagccctggaaagagaagtttttcgaacgattttacggcgagaaactcgggatgtcccgcgaggagagcgtaaaactgaccactggccctaacaacgccggagctcagagctcgagctcttgcggaacctctggactgcctgtgagcgcacaaactgccctcgccgagcagcagccaaagagcatgaagagtccagcatcccctgaacccggtttctgcgccactctgtgcccaatggtggagataccacctaaggatattatggccgagttggaatcagaagacattcttatccccgaggagtcagtgatccaggaagaaattgctgaggaggtagaaacatccatctgtgagtgccaggacgaaaatcacaaaaccattcctgagttttcggaggaggcagagtctcttaccaattcccatgaagagcctcagatagcgccaccagaggacaatctcgagtcgtgtgtgatgatgaacgatgtgcttgagacgctccctcatattgaagtaaagatcgaaggcaagtccgagtccccccaggaggagatgacagtggtaattgatcagctggaagtttgtgattccttgatcccctctacctcgtcaatgactcacgtgagcgacaccgagcacaaggagtcagagacagccgtagaaactagcacccccaagattaagactgggtcctcctcattggagggtcagtttcccaacgaggggattgccatcgatatggaactgcagtctgaccctgaagaacagctgagcgaaaacgcttgcatctccgaaaccagcttctcctcggaaagccctgaaggagcttgtactagtctcccctctcctggcggtgagacccagtctacctcagaggagagttgcacaccggcaagcctggaaactacattttgctctgaggtgagcagcaccgaaaacactgacaagtataatcagaggaatagcaccgatgaaaattttcatgcttcactgatgtcggagatcagtcctatcagtacgtcacccgaaatctccgaagcctctttgatgtcaaacctccccctcacctccgaagcctcccctgtcagcaacttgcccctgaccagcgagacatccccaatgtccgacctgcccctgacaagtgagacaagcagtgttagtagcatgctgttaacttccgagacaaccttcgttagcagtcttccgctgccatccgaaacgtctcccatcagcaactcttccataaatgagaggatggcccatcagcagcgtaagagccccagcgtgtcggaagagcctcttagcccgcaaaaggatgagtcctcagccaccgccaaacccctcggtgagaatctcactagtcaacagaagaacctgtccaacacccccgagccaatcatcatgtcatcctcgtctatagcccctgaggcctttcctagcgaagatctgcacaacaagaccctcagtcaacagacatgcaagagccacgtggatactgagaagccataccccgcttctattcccgaactggcatcaacggagatgattaaagtgaagaatcatagtgtgctgcagagaacagagaaaaaggttctgccctctccgctcgaactgtctgtcttcagcgagggcactgacaataaaggcaatgagttgccgagtgcaaaactgcaagacaagcaatatatttcttccgttgacaaggctccattctcagagggtagtaggaacaagacccacaagcagggaagtacacaaagcaggctcgagacatcccacacctctaagtcaagcgaaccctcgaaaagtccggacggcatcagaaatgaaagcagagactcagagatcagtaagcgcaaaactgcggagcaacatagctttggcatttgtaaggagaagagggcgaggattgaagatgatcagagtacacggaacattagtagtagttcacctcctgaaaaggagcagccccctcgtgaagaacctcgggtgccccctctgaagattcagttgagcaagattggaccgccatttattatcaagagccagcctgtaagtaaaccggagtctcgtgcctcaacttcgacatccgtgtctggtggaaggaacactggggctagaacgctggccgatataaaggcccgtgcccagcaagctagggcacagcgggaggcagccgctgccgctgcggtggctgccgctgcctctatcgtttctggcgcaatggggtctcccggagagggaggaaagacacgtaccctagctcacataaaggagcaaaccaaggccaagcttttcgcaaagcaccaggccagagcccatttgttccagacctcaaaggaaacaaggctgccccctcccctctctagcaaagaaggacctccaaacctggaagttagcagtacccctgagacaaaaatggagggcagcaccggagtcatcatcgtcaacccgaactgtcgatcccctagtaataaatccgctcatctaagggagaccacaaccgtgttacagcaatcacttaatccctccaaactacccgagaccgcaaccgacctgagtgttcactcctcagacgaaaacatccctgtgtcacacctgtccgagaaaatcgtgtcatccaccagcagcgaaaactcgagcgttcccatgctgtttaataaaaactctgtgcctgtgagtgtgtgctctacagctatatcaggcgcaataaaggagcatccttttgtatctagcgtggacaagagttccgtgctcatgagcgtcgactcagcgaacaccacaatttctgcctgcaatatcagcatgttaaagactattcagggcaccgacactccctgcatagctattattcctaaatgcatagaatctacccccatctctgctaccacggagggtagctcaatctctagttccatggacgataaacagctgcttatttcatcgtcatccgcctctaatctggtctctacacagtacacttccgtgcccaccccctcgatcggcaataatctgccaaacctctctaccagctctgtgttaataccaccaatgggcatcaataaccggtttccctccgagaaaatagcaataccaggctctgaagaacaggccaccgtgagcatgggaactacggttagagccgctctttcttgtagcgatagtgtggctgttaccgacagcctcgttgcccatccaacggtagcgatgttcaccggtaatatgttaaccattaatagctacgactctcctcctaagctttcagccgaatcactcgacaagaattccggacccaggaaccgcgcagacaacagcgggaagccacaacagccaccaggtggtttcgctccagccgctattaaccgatcaatcccatgtaaggtcatcgttgatcactccaccacgctgacaagctccttgtccctcacagtgagcgtcgagtcttcagaagcttctctggatctccagggaaggcctgtccggaccgaggcttccgttcagcccgtcgcctgtccccaggtcagcgtaatatcaagaccagagccagtggccaatgaaggcatcgatcacagcagtacgtttatcgcagccagcgctgcgaagcaggattccaagacgctgcctgccacctgtacatcactacgcgaattacctcttgttcccgataagctgaatgagccaacagctcctagccacaattttgcagagcaggcccgtgggcctgcacccttcaagagtgaagcggatacaacgtgcagcaatcagtacaacccgtcgaatcggatctgttggaatgacgatggcatgaggtcaacaggacagcccctggtaacccactcagggagtagcaagcagaaagaatatctagaacagtcctgccctaaggccataaaaaccgagcatgctaactatctgaacgtgtcggaactccatccacgcaatttggtcaccaacgttgccctgcctgttaagtctgagttgcacgaagccgacaaggggttccggatggacacggaagactttccaggccctgagcttccaccccctgccgctgagggtgcttcctcagttcagcaaactcagaatatgaaggccagcacatcttctccgatggaggaagccatctcactggccacggacgcactgaaacgggttcctggcgctggttcttctggatgcaggttgtcatcagtcgaggcaaacaatccgctagtgacacagctcctgcagggtaacctgcccctagaaaaggtgctgccacagcccaggctgggggctaagctcgaaattaaccgcctgcccctcccactgcagactaccagcgtaggaaagacggcacctgaaagaaatgtagaaatcccacccagcagccccaaccctgacgggaagggatatctagccggaaccctggcgcctctgcagatgaggaaacgcgaaaatcatcccaagaagcgggtcgcacggacggttggtgagcatacacaggtgaagtgtgagcccggtaagctgcttgtagagcctgacgtcaaaggcgtgccatgtgtcatcagctccggaattagccagctcgggcactctcagcccttcaaacaggaatggctgaacaagcacagtatgcaaaaccgcattgtacactccccagaagtgaaacagcagaagaggctactaccgtcatgttccttccagcagaatttatttcacgttgataaaaacggtggtttccacaccgatgctgggaccagccacagacagcagttttatcaaatgcccgtcgctgccaggggcccaatacctaccgctgctcttctgcaagcgagctctaaaacccccgttggatgtaatgcattcgcatttaatcgacatttggaacagaaaggtctcggcgaggtgtcactttcatctgccccacaccaactgagattggccaatatgctcagccctaatatgcccatgaaagagggtgacgaggtgggcggtaccgcacacaccatgccaaataaggcactggtacatccaccccctccgcctccccctcctcccccacctccactggccctgccaccgccaccccctcccccacctcctctgccccctccgcttcctaacgctgaagtgcctagtgatcagaaacaacctccagtaactatggagaccacaaaaagactttcctggccacagtcaacagggatctgtagcaacatcaaaagtgaaccgctctctttcgaggagggcctcagctcatcatgcgagctggggatgaaacaggtcagctacgatcagaatgagatgaaggaacagctgaaggctttcgctctgaagtccgccgattttagcagctacctgctcagtgaaccccagaaacccttcacacagctcgcggcacagaagatgcaggtacagcagcagcagcaactgtgcggaaactatcccaccattcactttgggtccacttcatttaagcgcgctgccagtgcgatcgagaaaagtatcggcatcctgggcagtgggtcgaatcccgctaccgggctaagcggccaaaatgctcagatgccagtccagaacttcgccgactctagtaacgccgacgaactggagctgaaatgctcgtgtagactcaaagccatgatagtgtgcaaagggtgtggcgctttttgccacgatgactgtatcggcccttcgaagctgtgtgtcgcatgtcttgtagtgaggta

SEQ ID NO: 219401 - DNA, 6747 bp, Artificial Sequence
  derived and/or modified sequence
atgaaggacaagagaaagaagaaggacagaacctgggccgaggccgccagactggccctggagaagcaccccaacagccccatgaccgccaagcagatcctggaggtgatccagaaggagggcctgaaggagaccagcggcaccagccccctggcctgcctgaacgccatgctgcacaccaacaccagaatcggcgacggcaccttcttcaagatccccggcaagagcggcctgtacgccctgaagaaggaggagagcagctgccccgccgacggcaccctggacctggtgtgcgagagcgagctggacggcaccgacatggccgaggccaacgcccacggcgaggagaacggcgtgtgcagcaagcaggtgaccgacgaggccagcagcaccagagacagcagcctgaccaacaccgccgtgcagagcaagctggtgagcagcttccagcagcacaccaagaaggccctgaagcaggccctgagacagcagcagaagagaagaaacggcgtgagcatgatggtgaacaagaccgtgcccagagtggtgctgacccccctgaaggtgagcgacgagcagagcgacagccccagcggcagcgagagcaagaacggcgaggccgacagcagcgacaaggagatgaagcacggccagaagagccccaccggcaagcagaccagccagcacctgaagagactgaagaagagcggcctgggccacctgaagtggaccaaggccgaggacatcgacatcgagacccccggcagcatcctggtgaacaccaacctgagagccctgatcaacaagcacaccttcgccagcctgccccagcacttccagcagtacctgctgctgctgctgcccgaggtggacagacagatgggcagcgacggcatcctgagactgagcaccagcgccctgaacaacgagttcttcgcctacgccgcccagggctggaagcagagactggccgagggcgagttcacccccgagatgcagctgagaatcagacaggagatcgagaaggagaagaagaccgagccctggaaggagaagttcttcgagagattctacggcgagaagctgggcatgagcagagaggagagcgtgaagctgaccaccggccccaacaacgccggcgcccagagcagcagcagctgcggcaccagcggcctgcccgtgagcgcccagaccgccctggccgagcagcagcccaagagcatgaagagccccgccagccccgagcccggcttctgcgccaccctgtgccccatggtggagatcccccccaaggacatcatggccgagctggagagcgaggacatcctgatccccgaggagagcgtgatccaggaggagatcgccgaggaggtggagaccagcatctgcgagtgccaggacgagaaccacaagaccatccccgagttcagcgaggaggccgagagcctgaccaacagccacgaggagccccagatcgccccccccgaggacaacctggagagctgcgtgatgatgaacgacgtgctggagaccctgccccacatcgaggtgaagatcgagggcaagagcgagagcccccaggaggagatgaccgtggtgatcgaccagctggaggtgtgcgacagcctgatccccagcaccagcagcatgacccacgtgagcgacaccgagcacaaggagagcgagaccgccgtggagaccagcacccccaagatcaagaccggcagcagcagcctggagggccagttccccaacgagggcatcgccatcgacatggagctgcagagcgaccccgaggagcagctgagcgagaacgcctgcatcagcgagaccagcttcagcagcgagagccccgagggcgcctgcaccagcctgcccagccccggcggcgagacccagagcaccagcgaggagagctgcacccccgccagcctggagaccaccttctgcagcgaggtgagcagcaccgagaacaccgacaagtacaaccagagaaacagcaccgacgagaacttccacgccagcctgatgagcgagatcagccccatcagcaccagccccgagatcagcgaggccagcctgatgagcaacctgcccctgaccagcgaggccagccccgtgagcaacctgcccctgaccagcgagaccagccccatgagcgacctgcccctgaccagcgagaccagcagcgtgagcagcatgctgctgaccagcgagaccaccttcgtgagcagcctgcccctgcccagcgagaccagccccatcagcaacagcagcatcaacgagagaatggcccaccagcagagaaagagccccagcgtgagcgaggagcccctgagcccccagaaggacgagagcagcgccaccgccaagcccctgggcgagaacctgaccagccagcagaagaacctgagcaacacccccgagcccatcatcatgagcagcagcagcatcgcccccgaggccttccccagcgaggacctgcacaacaagaccctgagccagcagacctgcaagagccacgtggacaccgagaagccctaccccgccagcatccccgagctggccagcaccgagatgatcaaggtgaagaaccacagcgtgctgcagagaaccgagaagaaggtgctgcccagccccctggagctgagcgtgttcagcgagggcaccgacaacaagggcaacgagctgcccagcgccaagctgcaggacaagcagtacatcagcagcgtggacaaggcccccttcagcgagggcagcagaaacaagacccacaagcagggcagcacccagagcagactggagaccagccacaccagcaagagcagcgagcccagcaagagccccgacggcatcagaaacgagagcagagacagcgagatcagcaagagaaagaccgccgagcagcacagcttcggcatctgcaaggagaagagagccagaatcgaggacgaccagagcaccagaaacatcagcagcagcagcccccccgagaaggagcagccccccagagaggagcccagagtgccccccctgaagatccagctgagcaagatcggcccccccttcatcatcaagagccagcccgtgagcaagcccgagagcagagccagcaccagcaccagcgtgagcggcggcagaaacaccggcgccagaaccctggccgacatcaaggccagagcccagcaggccagagcccagagagaggccgccgccgccgccgccgtggccgccgccgccagcatcgtgagcggcgccatgggcagccccggcgagggcggcaagaccagaaccctggcccacatcaaggagcagaccaaggccaagctgttcgccaagcaccaggccagagcccacctgttccagaccagcaaggagaccagactgcccccccccctgagcagcaaggagggcccccccaacctggaggtgagcagcacccccgagaccaagatggagggcagcaccggcgtgatcatcgtgaaccccaactgcagaagccccagcaacaagagcgcccacctgagagagaccaccaccgtgctgcagcagagcctgaaccccagcaagctgcccgagaccgccaccgacctgagcgtgcacagcagcgacgagaacatccccgtgagccacctgagcgagaagatcgtgagcagcaccagcagcgagaacagcagcgtgcccatgctgttcaacaagaacagcgtgcccgtgagcgtgtgcagcaccgccatcagcggcgccatcaaggagcaccccttcgtgagcagcgtggacaagagcagcgtgctgatgagcgtggacagcgccaacaccaccatcagcgcctgcaacatcagcatgctgaagaccatccagggcaccgacaccccctgcatcgccatcatccccaagtgcatcgagagcacccccatcagcgccaccaccgagggcagcagcatcagcagcagcatggacgacaagcagctgctgatcagcagcagcagcgccagcaacctggtgagcacccagtacaccagcgtgcccacccccagcatcggcaacaacctgcccaacctgagcaccagcagcgtgctgatcccccccatgggcatcaacaacagattccccagcgagaagatcgccatccccggcagcgaggagcaggccaccgtgagcatgggcaccaccgtgagagccgccctgagctgcagcgacagcgtggccgtgaccgacagcctggtggcccaccccaccgtggccatgttcaccggcaacatgctgaccatcaacagctacgacagcccccccaagctgagcgccgagagcctggacaagaacagcggccccagaaacagagccgacaacagcggcaagccccagcagccccccggcggcttcgcccccgccgccatcaacagaagcatcccctgcaaggtgatcgtggaccacagcaccaccctgaccagcagcctgagcctgaccgtgagcgtggagagcagcgaggccagcctggacctgcagggcagacccgtgagaaccgaggccagcgtgcagcccgtggcctgcccccaggtgagcgtgatcagcagacccgagcccgtggccaacgagggcatcgaccacagcagcaccttcatcgccgccagcgccgccaagcaggacagcaagaccctgcccgccacctgcaccagcctgagagagctgcccctggtgcccgacaagctgaacgagcccaccgcccccagccacaacttcgccgagcaggccagaggccccgcccccttcaagagcgaggccgacaccacctgcagcaaccagtacaaccccagcaacagaatctgctggaacgacgacggcatgagaagcaccggccagcccctggtgacccacagcggcagcagcaagcagaaggagtacctggagcagagctgccccaaggccatcaagaccgagcacgccaactacctgaacgtgagcgagctgcaccccagaaacctggtgaccaacgtggccctgcccgtgaagagcgagctgcacgaggccgacaagggcttcagaatggacaccgaggacttccccggccccgagctgcccccccccgccgccgagggcgccagcagcgtgcagcagacccagaacatgaaggccagcaccagcagccccatggaggaggccatcagcctggccaccgacgccctgaagagagtgcccggcgccggcagcagcggctgcagactgagcagcgtggaggccaacaaccccctggtgacccagctgctgcagggcaacctgcccctggagaaggtgctgccccagcccagactgggcgccaagctggagatcaacagactgcccctgcccctgcagaccaccagcgtgggcaagaccgcccccgagagaaacgtggagatcccccccagcagccccaaccccgacggcaagggctacctggccggcaccctggcccccctgcagatgagaaagagagagaaccaccccaagaagagagtggccagaaccgtgggcgagcacacccaggtgaagtgcgagcccggcaagctgctggtggagcccgacgtgaagggcgtgccctgcgtgatcagcagcggcatcagccagctgggccacagccagcccttcaagcaggagtggctgaacaagcacagcatgcagaacagaatcgtgcacagccccgaggtgaagcagcagaagagactgctgcccagctgcagcttccagcagaacctgttccacgtggacaagaacggcggcttccacaccgacgccggcaccagccacagacagcagttctaccagatgcccgtggccgccagaggccccatccccaccgccgccctgctgcaggccagcagcaagacccccgtgggctgcaacgccttcgccttcaacagacacctggagcagaagggcctgggcgaggtgagcctgagcagcgccccccaccagctgagactggccaacatgctgagccccaacatgcccatgaaggagggcgacgaggtgggcggcaccgcccacaccatgcccaacaaggccctggtgcacccccccccccccccccccccccccccccccccccccctggccctgcccccccccccccccccccccccccccctgcccccccccctgcccaacgccgaggtgcccagcgaccagaagcagccccccgtgaccatggagaccaccaagagactgagctggccccagagcaccggcatctgcagcaacatcaagagcgagcccctgagcttcgaggagggcctgagcagcagctgcgagctgggcatgaagcaggtgagctacgaccagaacgagatgaaggagcagctgaaggccttcgccctgaagagcgccgacttcagcagctacctgctgagcgagccccagaagcccttcacccagctggccgcccagaagatgcaggtgcagcagcagcagcagctgtgcggcaactaccccaccatccacttcggcagcaccagcttcaagagagccgccagcgccatcgagaagagcatcggcatcctgggcagcggcagcaaccccgccaccggcctgagcggccagaacgcccagatgcccgtgcagaacttcgccgacagcagcaacgccgacgagctggagctgaagtgcagctgcagactgaaggccatgatcgtgtgcaagggctgcggcgccttctgccacgacgactgcatcggccccagcaagctgtgcgtggcctgcctggtggtgagatag

SEQ ID NO: 219402 - protein, 872 aa, Artificial Sequence
  derived and/or modified sequence
MNYPGRGSPRSPEHNGRGGGGGAWELGSDARPAFGGGVCCFEHLPGGDPDDGDVPLALLRGEPGLHLAPGTDDHNHHLALDPCLSDENYDFSSAESGSSLRYYSEGESGGGGSSLSLHPPQQPPLVPTNSGGGGATGGSPGERKRTRLGGPAARHRYEVVTELGPEEVRWFYKEDKKTWKPFIGYDSLRIELAFRTLLQTTGARPQGGDRDGDHVCSPTGPASSSGEDDDEDRACGFCQSTTGHEPEMVELVNIEPVCVRGGLYEVDVTQGECYPVYWNQADKIPVMRGQWFIDGTWQPLEEEESNLIEQEHLNCFRGQQMQENFDIEVSKSIDGKDAVHSFKLSRNHVDWHSVDEVYLYSDATTSKIARTVTQKLGFSKASSSGTRLHRGYVEEATLEDKPSQTTHIVFVVHGIGQKMDQGRIIKNTAMMREAARKIEERHFSNHATHVEFLPVEWRSKLTLDGDTVDSITPDKVRGLRDMLNSSAMDIMYYTSPLYRDELVKGLQQELNRLYSLFCSRNPDFEEKGGKVSIVSHSLGCVITYDIMTGWNPVRLYEQLLQKEEELPDERWMSYEERHLLDELYITKRRLKEIEERLHGLKASSMTQTPALKFKVENFFCMGSPLAVFLALRGIRPGNTGSQDHILPREICNRLLNIFHPTDPVAYRLEPLILKHYSNISPVQIHWYNTSNPLPYEHMKPSFLNPAKEPTSVSENEGISTIPSPVTSPVLSRRHYGESITNIGKASILGAASIGKGLGGMLFSRFGRSSTTQSSETSKDSMEDEKKPVASPSATTVGTQTLPHSSSGFLDSALELDHRIDFELREGLVESRYWSAVTSHTAYWSSLDVALFLLTFMYKHEHDDDAKPNLDPI

SEQ ID NO: 219403 - DNA, 2619 bp, Artificial Sequence
  derived and/or modified sequence
atgaactaccccggcagaggcagccccagaagccccgagcacaacggcagaggcggcggcggcggcgcctgggagctgggcagcgacgccagacccgccttcggcggcggcgtgtgctgcttcgagcacctgcccggcggcgaccccgacgacggcgacgtgcccctggccctgctgagaggcgagcccggcctgcacctggcccccggcaccgacgaccacaaccaccacctggccctggacccctgcctgagcgacgagaactacgacttcagcagcgccgagagcggcagcagcctgagatactacagcgagggcgagagcggcggcggcggcagcagcctgagcctgcaccccccccagcagccccccctggtgcccaccaacagcggcggcggcggcgccaccggcggcagccccggcgagagaaagagaaccagactgggcggccccgccgccagacacagatacgaggtggtgaccgagctgggccccgaggaggtgagatggttctacaaggaggacaagaagacctggaagcccttcatcggctacgacagcctgagaatcgagctggccttcagaaccctgctgcagaccaccggcgccagaccccagggcggcgacagagacggcgaccacgtgtgcagccccaccggccccgccagcagcagcggcgaggacgacgacgaggacagagcctgcggcttctgccagagcaccaccggccacgagcccgagatggtggagctggtgaacatcgagcccgtgtgcgtgagaggcggcctgtacgaggtggacgtgacccagggcgagtgctaccccgtgtactggaaccaggccgacaagatccccgtgatgagaggccagtggttcatcgacggcacctggcagcccctggaggaggaggagagcaacctgatcgagcaggagcacctgaactgcttcagaggccagcagatgcaggagaacttcgacatcgaggtgagcaagagcatcgacggcaaggacgccgtgcacagcttcaagctgagcagaaaccacgtggactggcacagcgtggacgaggtgtacctgtacagcgacgccaccaccagcaagatcgccagaaccgtgacccagaagctgggcttcagcaaggccagcagcagcggcaccagactgcacagaggctacgtggaggaggccaccctggaggacaagcccagccagaccacccacatcgtgttcgtggtgcacggcatcggccagaagatggaccagggcagaatcatcaagaacaccgccatgatgagagaggccgccagaaagatcgaggagagacacttcagcaaccacgccacccacgtggagttcctgcccgtggagtggagaagcaagctgaccctggacggcgacaccgtggacagcatcacccccgacaaggtgagaggcctgagagacatgctgaacagcagcgccatggacatcatgtactacaccagccccctgtacagagacgagctggtgaagggcctgcagcaggagctgaacagactgtacagcctgttctgcagcagaaaccccgacttcgaggagaagggcggcaaggtgagcatcgtgagccacagcctgggctgcgtgatcacctacgacatcatgaccggctggaaccccgtgagactgtacgagcagctgctgcagaaggaggaggagctgcccgacgagagatggatgagctacgaggagagacacctgctggacgagctgtacatcaccaagagaagactgaaggagatcgaggagagactgcacggcctgaaggccagcagcatgacccagacccccgccctgaagttcaaggtggagaacttcttctgcatgggcagccccctggccgtgttcctggccctgagaggcatcagacccggcaacaccggcagccaggaccacatcctgcccagagagatctgcaacagactgctgaacatcttccaccccaccgaccccgtggcctacagactggagcccctgatcctgaagcactacagcaacatcagccccgtgcagatccactggtacaacaccagcaaccccctgccctacgagcacatgaagcccagcttcctgaaccccgccaaggagcccaccagcgtgagcgagaacgagggcatcagcaccatccccagccccgtgaccagccccgtgctgagcagaagacactacggcgagagcatcaccaacatcggcaaggccagcatcctgggcgccgccagcatcggcaagggcctgggcggcatgctgttcagcagattcggcagaagcagcaccacccagagcagcgagaccagcaaggacagcatggaggacgagaagaagcccgtggccagccccagcgccaccaccgtgggcacccagaccctgccccacagcagcagcggcttcctggacagcgccctggagctggaccacagaatcgacttcgagctgagagagggcctggtggagagcagatactggagcgccgtgaccagccacaccgcctactggagcagcctggacgtggccctgttcctgctgaccttcatgtacaagcacgagcacgacgacgacgccaagcccaacctggaccccatctag

SEQ ID NO: 219404 - DNA, 5603 bp, Artificial Sequence
  derived and/or modified sequence
aacgcagctgcggcggctgcgggtctcgtgggggcggagcggtcgccgctgccgccgcagctcgggtcgggatttgaaagattagaaacttcgggtggagagggcggcggcgttgaatgtgtggcggaagcgctgggggtcacggctccgcgcgccgccggacagccggcggcgtctccacagcatgaattacccgggccgcgggtccccacggagccccgagcataacggccgaggcggcggcggcggcgcctgggagctgggctcagacgcgaggccagcgttcggcggcggcgtctgctgcttcgagcacctgcccggcggggacccggacgacggcgacgtgcccctggccctgctgcgcggggaacccgggctgcatttggcgccgggcaccgacgaccacaaccaccacctcgcgctggacccctgcctcagtgacgagaactatgacttcagctccgccgagtcgggctcctcgctgcgctactacagcgagggtgagagcggcggcggcggcagctccttgtcgctgcacccgccgcagcagcctccgctggtcccgacgaactcggggggcggcggcgcgacaggagggtcccccggggaaaggaaacgtacccggcttggcggcccggcggcccggcaccgctatgaggtagtgacggagctgggcccggaggaggtacgctggttctacaaggaggacaagaagacctggaagcccttcatcggctacgactcgctccgcatcgagctcgccttccggaccctgctgcagaccacgggtgcccggccccagggcggggaccgggacggcgaccatgtgtgctcccccacgggcccagcctccagttccggagaagatgacgatgaggaccgcgcctgcggcttctgccagagtacgacggggcacgagccggagatggtggagcttgtgaacatcgagcctgtgtgcgtgcggggcggcctctacgaggtggatgtgacccaaggagagtgctacccggtgtactggaaccaggctgataaaataccagtaatgcgtggacagtggtttattgacggcacttggcagcctctagaagaggaagaaagtaatttaattgagcaagaacatctcaattgttttaggggccagcagatgcaggaaaatttcgatattgaagtgtcaaaatccatagatggaaaagatgctgttcatagtttcaagttgagtcgaaaccatgtggactggcacagtgtggatgaagtatatctttatagtgatgcaacaacatctaaaattgcaagaacagttacccaaaaactgggattttctaaagcatcaagtagtggtaccagacttcatagaggttatgtagaagaagccacattagaagacaagccatcacagactacccatattgtatttgttgtgcatggcattgggcagaaaatggaccaaggaagaattatcaaaaatacagctatgatgagagaagctgcaagaaaaatagaagaaaggcatttttccaaccatgcaacacatgttgaatttctgcctgttgagtggcggtcaaaacttactcttgatggagacactgttgattccattactcctgacaaagtacgaggtttaagggatatgctgaacagcagtgcaatggacataatgtattatactagtccactttatagagatgaactagttaaaggccttcagcaagagctgaatcgattgtattcccttttctgttctcggaatccagactttgaagaaaaagggggtaaagtctcaatagtatcacattccttgggatgtgtaattacttatgacataatgactggctggaatccagttcggctgtatgaacagttgctgcaaaaggaagaagagttgcctgatgaacgatggatgagctatgaagaacgacatcttcttgatgaactctatataactaaacgacggctgaaggaaatagaagaacggcttcacggattgaaagcatcatctatgacacaaacacctgccttaaaatttaaggttgagaatttcttctgtatgggatccccattagcagttttcttggcgttgcgtggcatccgcccaggaaatactggaagtcaagaccatattttgcctagagagatttgtaaccggttactaaatatttttcatcctacagatccagtggcttatagattagaaccattaatactgaaacactacagcaacatttcacctgtccagatccactggtacaatacttcaaatcctttaccttatgaacatatgaagccaagctttctcaacccagctaaagaacctacctcagtttcagagaatgaaggcatttcaaccataccaagccctgtgacctcaccagttttgtcccgccgacactatggagaatctataacaaatataggcaaagcaagcatattaggggctgctagcattggaaagggacttggaggaatgttgttctcaagatttggacgttcatctacaacacagtcatctgaaacatcaaaagactcaatggaagatgagaagaagccagttgcctcaccttctgctaccaccgtagggacacagacccttccacatagcagttctggcttcctcgattctgcattggagttggatcacaggattgattttgaactcagagaaggccttgtggagagccgctattggtcagctgtcacgtcgcatactgcctattggtcatccttggatgttgccctttttcttttaaccttcatgtataaacatgagcacgatgatgatgcaaaacccaatttagatccaatctgaactctcttgaaggacatgaatggcctaaaactgattttttttttttccgttaaaatgtgtgtgtcaagatacggagatttcagggttaaagtatatttcagttttctttagggcaacatatatttgaatttaaaagcactttatttaaaaaaaaaagaagttttcagttctgaagaagtcatttacagtttgcatcattttaattatgagtctgacaaaaccttctccagagaatcaagcaagacctggatgtgaagaaggtttgggtaaactgcatgtaaaggctacaaatcacaatctgattcctcccaaatataaaggcatatggaacataatgtattaaccaaagtatgttataaatcaaaaatggtcaaggttcagcatattctatatgaagatcacaaggtggtatcgttttagatttctatgaaggctttcatttgtacatccctttgaaaaaatataacagatttaaaatgttttgaatttaacttgtttagaaaaactaatgcttaaaacaatatttgaactactgtatttataatttattacctctaattgctttatttcagtgtatgagacattactgttttaatgtttgctttgaacataatttaagaaccagatttattttctatagtgataaacccttttttctcagaactccatctttgtactcttcagatgaatatatagacactgtggcatacattttttttcattaaaaacttatggcttcatacaacactagttcaattttttaaataaactttttattatgttacatgtacttcagagaaagctaaagtttctctaaacttgacacggagtactccataatgggtacatttcattagctttattagaaaactagtaaatgcttttgaataggtagtatgacagctattttaaatgtataaacatttgtgtgccaaacaacatatatgaagggatgtgatgccactaactagtgcacattgtttctcaatgtgccattgagacacaaggcacagtaagtcaggattctgaggcattggaagggttttcttcagctgtaattgtttccacagtgcttttcatctgaggggctcaaagtttaagagtgcattcaataacccatgtactagcttcttgaggtaagtaaataaatcttgttctcatgttacatgttaatacaccaaggcaccaaaacatttaaagtgccatgaattagattacatcagaaatcagaaaagcttggattgagctagtcaccgtggttcacgcctgtaatcccaacacttcgggaggccaagatgggaggatctcttgagcccaggatttcaagaccagcttgggcaacatagtgagaccctcttctctgcaaaaactgacaaaaattagccacttgtagtggtgtacacctgtagtcccagctactcaagaggctgaggtgggaggatcacccgagcccagaagttcaaagctgcagtgagctctgatcacaccaatgcactccagcctgggtgacagagccagaccctgtctctaaaaaacaaaaaagaaaagcttgggttgaagccaggccatattcttttatatgctgttcaatgacttgattcacatgtgaccttttagtagtttgcaaacaataataacagaagttgcaattcataattcagagaaatgaccatgaagccggtgtttccctgcttgatttctatgttcttggattctcacacaaaagaggagttacctagaggggatcagtagccatccctgttgcacacaaccctcacttctgagtggtttccactaggttccacttaaggtgctgtcttttcttaacttgcaaggaattgcttagcttcccaataatcattgtcaaactgggagcaaagttggtcagctgtatctctcacctcctcctttcttcataagatagtagaatctgtggcttacttgtaggttttacttagtgcttcagtactgttggctgttttggccttttgctgaatttgcacaacaacataaagcacttctttttaatgtttaaaaaaaattccaaggctccatgaccaagtatgtgactcactaagaaacccttgctataaaaggcttttgatgaaatcttagcaaagctaaattatctctaacttagagattcctatgaactcaggtcattttcatagcctgtttattttgtaggtctaatttagttctcaggaaaattaaactcatgctatatgactgtatcgttaaaggtacttgagcgtatgttgctgtaggtggtatgacactcaaatgcataagaacttgaagggatttattcttaaccactagaatatgaagagccctttttacctgagaagagtgaaattatgtcagaccttttaatttgatatcactgagtaaaaggtatgttcctatagccataggaatatgtctgcttcctttttttcatgttgagaaaacagtcaaatttaaccatttggagtttatttgaattcttggaaagagcaatattcaaaaccttttcaaaaataagatattctggactactggatggatgttttgttttcagttcatttttcatcagtagagatggtgatttcggttttgtagtatccttgtttctatgtctgtgcatgttaacattggatgtatttgtatatacttaattaatatacagactgtgtgtcattctggcttgattagaagctaagtcagttactgagtaacattttgcaactttattccagcaagtactaaatcggccaaaaaaagttttgtttttgataccattaaaattttattctct

SEQ ID NO: 219405 - DNA, 2619 bp, Artificial Sequence
  derived and/or modified sequence
atgaactacccgggaaggggatcacccagatctccagaacataatggtcgtggcgggggaggcggcgcatgggaactgggcagcgatgctagaccagcctttggtggcggggtgtgttgcttcgagcacttgccagggggtgatcccgacgacggggatgttccactggctttgctgaggggggagccgggcctgcacttggcccctggcacggatgatcacaaccatcatcttgcactggatccttgtctgtccgatgaaaattatgatttttctagtgctgagtcagggtcgtcgctccggtattacagcgagggcgagtctggaggcggcgggagctctctatcactgcatccccctcaacaacctccactcgtgcctaccaatagcggcggtgggggcgcaacaggcggatcgcccggcgagcgaaagcgcacgaggttggggggcccagccgcgagacaccgttacgaggtcgtcactgagcttggaccagaggaagtccggtggttttataaagaagataagaagacttggaaaccattcattgggtatgattcactgagaatagagctggccttcagaacactgctgcagacaacaggagccaggccccaggggggtgatcgcgacggtgaccacgtctgtagcccaacgggcccagcttccagctccggcgaggacgacgacgaggatcgggcatgtggcttttgtcagtccactacgggccacgagcctgaaatggtggagctggtgaacattgaacctgtctgtgtgcgcggaggactgtatgaggtagatgtaactcagggggagtgctatcctgtctattggaaccaggctgacaagatacctgtgatgaggggacagtggttcatcgatggaacatggcagccactggaagaagaagagagcaatctgatcgagcaagagcacctaaactgtttccgtggccagcagatgcaggaaaatttcgacatcgaggtgtctaaaagtatagacggtaaagatgcagtccactcatttaagctgagtagaaaccacgtggactggcactcagttgatgaagtttatttatattcagacgccactacgtccaaaattgcacggacagtcactcagaaactgggcttcagcaaggcctcaagcagcggtacacggttacataggggatacgtggaggaggccaccctggaggataagccatcccaaacaacgcatattgtatttgttgtgcacgggatcggacaaaaaatggatcaaggaagaatcatcaaaaacaccgcgatgatgagggaagctgccaggaagatcgaagagaggcactttagcaatcacgctacacacgtggaattcttgcccgtcgagtggcgatctaagcttactctggacggggataccgtcgacagcattacaccagataaggttaggggattgagggacatgctcaactcttctgcgatggacattatgtactacactagtccactgtatagggatgagctggtgaaggggctccagcaggagctcaatcgcttgtactctcttttctgcagccgtaaccccgacttcgaagagaaggggggcaaggtttctatagtgtcccacagcctggggtgcgttattacatatgacattatgacagggtggaaccctgtgcgactttatgagcaactgctgcagaaggaggaagagcttcccgatgaacggtggatgtcatatgaggaacgtcacttgctagatgagctatacattaccaaacgcaggctgaaggaaatcgaagagagactccatggcctcaaggcttcctctatgacccaaacacctgccctgaagtttaaggtcgaaaatttcttctgcatgggaagcccattggctgtgttcctggctctgcgcggaatcaggccgggtaacacaggatcccaggaccacattctaccgcgggaaatttgcaacagacttcttaacatctttcatcccactgaccccgtggcataccggcttgagccgctgatccttaaacattactccaacatcagccccgtccagatccactggtataatacaagcaatcctctgccgtatgagcacatgaaaccatcctttcttaaccccgccaaggaacccacttctgtttctgaaaacgagggaataagcacgattccgtcacctgtgacctcaccagtcctgagccggagacactatggagagtccatcaccaatattggcaaggcatcaatactcggggcagctagcataggaaaaggcctcggcggaatgctcttttctcgctttggtagaagctcaacgacgcagtcttctgagacctcgaaggacagcatggaggacgagaagaaacccgtggcctcaccttccgcaaccacagtgggcacacagactctgccacattctagcagcgggttcctcgactctgcactggagctggaccaccgtattgacttcgaattgagagaggggctggtcgagtccagatactggtctgctgtgacgtcacacacggcatactggtcttctctggatgtcgcgctgtttctgcttacattcatgtataaacatgagcatgacgatgacgcaaagccaaatctcgatcccatctag

SEQ ID NO: 219406 - DNA, 2619 bp, Artificial Sequence
  derived and/or modified sequence
atgaactacccaggccggggcagccccaggagccctgagcacaacggccggggcggcggcggcggggcctgggagctgggcagtgatgcccggcctgccttcggcggcggcgtgtgctgctttgagcacctgcctggaggagaccctgatgatggagatgtgcccctggccctgctgcggggggagcccggcctgcacctggcccctggaacagatgaccacaaccaccacctggccctggacccctgcctgagtgatgaaaattatgacttcagcagcgctgagagcggcagcagcctgcgctactacagcgagggggagagcggcggcggcggcagcagcctgagcctgcaccccccccagcagccccccctggtgcccaccaacagcggcggcggcggggccaccggcggcagccctggagagaggaagaggacccggctgggcggccctgctgcccggcacagatatgaggtggtgacagagctgggccctgaggaggtgcgctggttctacaaggaggacaagaagacctggaagcccttcatcggctatgacagcctgcgcatcgagctggccttccgcaccctgctgcagaccactggagcccggccccagggcggggacagagatggagaccacgtgtgcagccccactggacctgccagcagcagtggagaagatgatgatgaagatcgggcctgtggcttctgccagagcaccaccggccacgagcctgagatggtggagctggtgaacatcgagcctgtgtgtgtgcggggcggcctgtatgaggtggatgtgacccagggcgagtgctaccctgtgtactggaaccaggccgacaagatccctgtgatgaggggccagtggttcattgatggcacctggcagcccctggaggaggaggagagcaacctgattgagcaggagcacctgaactgcttccggggccagcagatgcaggagaactttgatattgaggtgtccaagagcattgatggcaaggatgctgtgcacagcttcaagctgagcaggaaccacgtggactggcacagcgtggatgaggtgtacctgtacagtgatgccaccaccagcaagatcgccaggacagtgacccagaagctgggcttcagcaaggccagcagcagcggcacccggctgcaccggggctacgtggaggaggccaccctggaggacaagcccagccagaccacccacatcgtgtttgtggtgcatggaattggccagaagatggaccagggccgcatcatcaagaacacagccatgatgagggaggccgccaggaagattgaggagcggcacttcagcaaccacgccacccacgtggagttcctgcctgtggagtggaggagcaagctgaccctggatggagacacagtggacagcatcaccccagacaaggtgcggggcctgcgggacatgctgaacagcagcgccatggacatcatgtactacaccagccccctgtacagagatgagctggtgaagggcctgcagcaggagctgaacagactctacagcctcttctgcagcaggaacccagactttgaggagaagggcggcaaggtgtccatcgtgagccacagcctgggctgcgtcatcacctatgacatcatgacaggctggaaccctgtgcggctgtatgagcagctgctgcagaaggaggaggagctgcctgatgagcgctggatgtcctatgaggagcggcacctgctggatgagctgtacatcaccaagaggcggctgaaggagattgaggagcggctgcacggcctgaaggccagctccatgacccagaccccagccctgaagttcaaggtggagaacttcttctgcatgggcagccccctggccgtgttcctggccctgcggggcatccggcccggcaacacaggcagccaggaccacatcctgccccgggagatctgcaaccggctgctgaacatcttccaccccacagatcctgtggcctaccgcctggagcccctcatcctgaagcactacagcaacatcagccctgtgcagatccactggtacaacaccagcaaccccctgccctatgagcacatgaagcccagcttcctgaacccagccaaggagcccacctctgtgtctgaaaatgaaggcatcagcaccatccccagccctgtgaccagccctgtgctgagccgccgccactatggagagagcatcaccaacatcggcaaggccagcatcctgggcgccgccagcatcggcaagggcctgggcggcatgctgttcagcagatttggccgcagcagcaccacccagagcagcgagaccagcaaggacagcatggaggatgagaagaagcctgtggccagccccagcgccaccaccgtgggcacccagaccctgccccacagcagcagcggcttcctggacagcgccctggagctggaccacagaattgactttgagctgcgggagggcctggtggagagccgctactggagcgctgtgaccagccacacagcctactggagcagcctggatgtggccctcttcctgctgaccttcatgtacaagcatgaacatgatgatgatgccaagcccaacctggaccccatctag

SEQ ID NO: 219407 - DNA, 2619 bp, Artificial Sequence
  derived and/or modified sequence
atgaactaccccggccggggcagcccccggagccccgagcacaacggaagaggtggggggggaggagcctgggaactgggatcagatgctcggcccgctttcggtggaggcgtctgttgttttgaacacctacctgggggcgaccctgacgacggagacgttccactggctttgctgaggggagaaccgggcctgcatcttgcccctggcactgacgatcacaatcaccacctggctttagacccatgcctatctgacgaaaactatgatttttcttccgctgagtctggaagctctctgaggtactattcagagggggaatctgggggcggaggctcatcacttagtcttcatcctccgcagcagcctcctttggtccctaccaatagtgggggaggcggcgcaactggggggtcccctggcgaaagaaagaggaccagattgggaggcccagccgcccggcacaggtatgaagttgtcactgaacttggcccggaagaagtacgctggttctataaggaggacaaaaaaacctggaagcccttcatcggatatgattccctgcgcatcgagttagcattccgcacattgttgcagaccacaggcgcaaggcctcagggaggcgatcgagatggggaccacgtatgcagtcctacaggcccggcgagttctagtggagaggatgatgatgaggacagggcttgcgggttctgtcagtccacgactggacatgagcccgaaatggtggagctggtgaatattgaaccagtctgtgtaagagggggcctttatgaagtcgacgtgactcagggtgagtgttatcccgtatattggaaccaggctgacaagattccagtcatgcgaggtcagtggtttatcgacggtacctggcagccgctcgaggaggaggagagcaacctcattgaacaggaacatttaaactgttttcgggggcaacagatgcaggaaaactttgacatcgaagtctccaaaagcatagacggcaaagacgccgtacactccttcaaactgagcagaaatcacgtcgattggcactccgtggatgaagtctatctgtactcggacgcaaccacgtctaaaattgccaggactgtgactcagaagttggggttttccaaagcatcaagttccggaacacgcctacataggggttacgttgaggaggctaccttggaagacaaaccctcccagactacgcacattgtcttcgtagttcacggcattggccagaagatggatcaggggcggatcataaagaacacagcaatgatgcgagaagccgcccgcaagatcgaggaaaggcacttctcaaaccatgccacccatgtggagtttctccctgtcgagtggcgtagcaaactcacacttgacggcgataccgtcgattctataacaccagataaagtgaggggcctgcgtgacatgctgaactcctcagctatggatattatgtactacacctcccctctgtatcgggacgagttggtgaaagggctgcaacaggagctcaacaggctgtactctctcttttgctctaggaatcccgattttgaggaaaagggtggcaaagtgtcaatagtgtcccattccttgggttgcgtgatcacgtatgacatcatgaccggttggaatcctgtcaggctgtacgaacagttactgcagaaggaggaggagctgcccgacgagagatggatgagttacgaagagagacatctgctggatgaattgtatataaccaagcgtcggctgaaggagatagaggaacgccttcacgggctgaaggctagcagtatgactcagactccagccttgaaattcaaggtcgaaaatttcttctgcatgggaagcccactggcagttttcctggccctgcggggcatcagaccaggcaataccggatcacaggatcatatcctgcctagagaaatttgtaacagattgttgaacatcttccaccctactgatcccgttgcctacagattagaacccttgattcttaagcactacagtaacatcagtccggtccagattcattggtacaataccagcaaccccctgccctacgaacacatgaaacctagctttctgaatcctgcgaaagagcctacctccgtgtcagaaaacgaaggcatttccacgatcccttctccagtgaccagcccggtactgtctagaaggcattacggcgaatccatcactaacattgggaaagccagcattctgggcgccgccagcataggaaaaggtttgggagggatgctgttctcaaggttcgggagatcatctacaacacagtcatctgaaacgagtaaagattctatggaggacgagaagaaaccagtagcttcgccctcagccactacggtcggtacacaaaccttaccccactccagttccggcttccttgacagtgctcttgaattggatcaccggatcgattttgaacttcgcgagggcttggtggagagcaggtactggtctgccgtaactagtcatactgcttactggtccagccttgacgtggccctgttcctgcttacctttatgtataagcacgagcacgacgacgatgccaagccgaacctggaccccatctag

SEQ ID NO: 219408 - DNA, 2619 bp, Artificial Sequence
  derived and/or modified sequence
atgaattatcccggacgcggaagtccccgatcaccagagcacaacggcagaggaggcggtgggggtgcttgggaactaggaagcgatgctcgacccgcattcggaggcggtgtgtgttgtttcgaacatctcccaggaggcgaccctgacgacggtgacgtacccttggcacttctccgcggagagcccggattacaccttgccccaggaaccgatgatcacaatcaccacctcgcacttgatccctgtctgtcagacgaaaattacgatttctcgagcgcggagagtgggagctcactgcgttactatagcgaaggtgaatctggaggcggaggatcctctctgtctctgcacccaccgcaacagcctcctcttgtgccaacgaactccggagggggaggggctacagggggatcccccggagagcgaaagaggacaagactggggggtcccgctgctagacacagatacgaagttgttaccgaactgggaccagaagaagtccggtggttttataaggaggataagaagacatggaaacccttcattgggtatgattccctccgaattgaactggcctttcggactctgctgcagacaaccggtgctcgaccccagggaggggacagagacggggaccatgtgtgtagtccaacaggccctgcctcttcgagcggcgaggacgacgacgaagaccgcgcttgcggcttctgtcagagcactactggtcacgagcctgaaatggtcgaattggtgaatattgaaccggtgtgcgtacgtggcggtctgtatgaagtagacgtgacgcagggtgagtgctatccagtctactggaatcaggccgataaaatccctgtcatgagaggccagtggtttatcgacgggacatggcaaccgttggaagaggaagaaagtaatcttatcgaacaggagcacctgaactgcttcagggggcagcagatgcaggaaaacttcgatatcgaagtgagcaagtccattgacggcaaggacgcggtgcactctttcaagctctcgagaaaccatgtggactggcactctgtcgatgaggtgtatctgtattccgatgcaacaaccagtaagatagctcgaacggtaacacagaagctcggcttctccaaggcaagttcttcagggacaagactgcatcggggttacgtggaagaggcaaccctggaagacaagccctctcagactacccacattgtatttgttgttcatggcattgggcaaaagatggaccaggggagaatcatcaaaaatactgctatgatgcgtgaagcagctaggaagatcgaggagaggcatttcagcaatcacgctacacacgttgaattcttacctgtcgagtggcggtcaaagcttaccttggacggtgacactgtagactccattaccccggataaggtgagaggactgcgtgacatgttaaattcgagtgccatggacatcatgtattacacctccccactgtatcgcgacgaactggtgaagggcctgcagcaagaactgaaccgcctctactcgttgttttgttctcggaaccctgactttgaggagaaagggggtaaggtctctatcgtctctcacagtttgggatgcgtgattacgtacgacatcatgaccgggtggaatccagtgcgcctgtacgagcagctcctgcagaaggaggaagaactcccggacgaacgttggatgtcctacgaagaacgacacctactggacgagctctatatcacaaagagacgactgaaagagattgaggaacggctgcatggactgaaagcaagtagcatgactcagacccctgcactgaaattcaaggtggaaaactttttttgtatgggcagtccgctggctgtctttctggcacttagaggtatcaggccaggaaacacgggaagccaagaccatatcctgcctagagagatctgcaatcgcctgctgaacatatttcacccaacagatcctgtggcataccgcctggaacccctcatcttgaagcactactctaatatctcacccgtgcaaattcattggtacaatacatcaaacccgctcccttacgagcatatgaagcctagcttcctgaacccagccaaggaaccaacatccgttagcgaaaacgagggaattagcacgatcccttcaccagtgacctcaccagtacttagcagacgtcactacggcgagtccattacaaatattggcaaagcctccattttgggggctgccagcattggcaagggactcgggggaatgctgttctctcgatttgggaggtcttcaaccacccagtcttccgaaacctcaaaagactcaatggaggatgagaagaagccggtcgcttcgccctctgcaacgaccgtgggaacccagactctcccgcattccagttccggcttccttgatagtgcattagaacttgatcaccggatcgacttcgagttaagggaaggactggtggaatccaggtattggtccgccgtaacaagtcatacagcctactggagctccctggacgtcgcgttgtttctactgactttcatgtataagcatgagcatgatgatgacgcgaaacccaacctggatcccatctag

SEQ ID NO: 219409 - protein, 343 aa, Artificial Sequence
  derived and/or modified sequence
MDNQAERESEAGVGLQRDEDDAPLCEDVELQDGDLSPEEKIFLREFPRLKEDLKGNIDKLRALADDIDKTHKKFTKANMVATSTAVISGVMSLLGLALAPATGGGSLLLSTAGQGLATAAGVTSIVSGTLERSKNKEAQARAEDILPTYDQEDREDEEEKADYVTAAGKIIYNLRNTLKYAKKNVRAFWKLRANPRLANATKRLLTTGQVSSRSRVQVQKAFAGTTLAMTKNARVLGGVMSAFSLGYDLATLSKEWKHLKEGARTKFAEELRAKALELERKLTELTQLYKSLQQKVRSRARGVGKDLTGTCETEAYWKELREHVWMWLWLCVCLCVCVYVQFT

SEQ ID NO: 219410 - DNA, 93 bp, Artificial Sequence
  derived and/or modified sequence
aaagaaatgtcactgcgtatacacacacacgcacatacacacaccatggaatactactcagctatacaaaggaatgaaataatccacagccac

SEQ ID NO: 219411 - DNA, 1032 bp, Artificial Sequence
  derived and/or modified sequence
atggataatcaagcggaacgcgagagcgaggccggggtgggccttcaacgggatgaggacgacgcacccctgtgtgaggatgtggaacttcaggatggagacctgagtccggaggagaaaatttttctgagagagttccctcgcctcaaggaagatctgaagggaaacatcgataaactgcgcgccctggctgacgacatcgataaaacccacaagaagtttacaaaagctaatatggtggctacctctactgcggtgattagcggcgtcatgtcgctccttggcctcgcactggctccggcaacgggcgggggctctctgttactcagtactgctggccaaggactcgccactgccgccggagtcacttccatagtgagtggcaccctggagcgaagcaaaaacaaagaggcacaggctcgggctgaggacatcttaccaacgtacgaccaggaggacagggaggacgaagaagaaaaagctgactatgttaccgctgccggtaaaataatttacaacttgcgaaacaccctgaaatatgctaagaagaatgtgagagccttctggaagcttcgcgccaaccctcgtctcgcaaatgcaactaagagactcctgacaacaggtcaggtgtctagccgctctcgggtgcaggttcagaaagccttcgcaggcaccacgcttgctatgaccaagaatgcccgtgtactgggcggcgtgatgagtgctttttcactcggatacgaccttgctacactgagcaaggaatggaagcacctcaaggagggggctcgcacgaagtttgccgaggaattgagggccaaagctctggagttggaaaggaagctgacagaactgacacagctgtataagtcactgcaacagaaagtcagaagtagggcacgcggcgttggcaaagacctgacaggtacttgcgagacagaggcttattggaaagaactccgagaacacgtctggatgtggctctggctctgtgtgtgcctatgtgtgtgcgtatacgtgcagttcacatag

SEQ ID NO: 219412 - DNA, 1032 bp, Artificial Sequence
  derived and/or modified sequence
atggacaaccaggccgagcgggagagcgaggccggcgtgggcctgcagagagatgaagatgatgcccccctgtgtgaagatgtggagctgcaggatggagacctgagccctgaggagaagatcttcctgcgggagttcccccggctgaaggaggacctgaagggcaacatcgacaagctgcgggccctggctgatgacatcgacaagacccacaagaagttcaccaaggccaacatggtggccaccagcacagctgtgatcagcggcgtgatgagcctgctgggcctggccctggccccagccaccggcggcggcagcctgctgctgagcacagctggccagggcctggccacagctgctggggtgaccagcatcgtgtctggcaccctggagaggagcaagaacaaggaggcccaggcccgggcagaggacatcctgcccacctatgaccaggaggacagagaagatgaggaggagaaggctgactatgtgacagctgctgggaagatcatctacaacctgaggaacaccctgaagtatgccaagaagaatgtgcgggccttctggaagctgcgggccaacccccggctggccaatgccaccaagaggctgctgaccaccggccaggtgagcagccgcagccgggtgcaggtgcagaaggcctttgctggcaccaccctggccatgaccaagaatgcccgggtgctgggcggcgtgatgtctgccttcagcctgggctatgacctggccaccctgagcaaggagtggaagcacctgaaggagggcgcccggaccaagtttgctgaggagctgcgggccaaggccctggagctggagaggaagctgacagagctgacccagctgtacaagagcctgcagcagaaggtgcgcagccgggcccggggcgtgggcaaggacctgaccggcacctgtgaaacagaggcctactggaaggagctgcgggagcacgtgtggatgtggctgtggctgtgtgtgtgcctgtgtgtgtgtgtgtatgtgcagttcacctag

SEQ ID NO: 219413 - DNA, 1032 bp, Artificial Sequence
  derived and/or modified sequence
atggacaaccaggccgagcgggagagcgaggccggcgtgggcctgcagcgggacgaggatgatgcacccttgtgcgaggatgtggaactccaggatggcgacttgagccctgaggagaaaatatttttgagagagttccccagattgaaagaagaccttaaagggaatatcgataaattgcgggccttggctgacgacattgacaaaacccataaaaagttcactaaggccaacatggtggctactagtacggcagtcatcagtggcgtgatgtctctgcttggtctggcgctggccccagccacaggggggggctcactgctcttgtcaaccgccgggcagggccttgccaccgccgcgggcgtcacttctattgtctccgggacactggaacggtcaaaaaacaaggaggcacaggctcgagcagaggacatcttaccgacctacgatcaggaagaccgggaagacgaagaagaaaaagccgactatgtgaccgctgcagggaagatcatttataacctccgcaatactctgaaatatgccaagaagaacgttcgtgccttctggaagctcagggcaaacccaaggctggctaatgcgactaaacggttgctgactacaggccaggtgagctccaggtctcgggtgcaagtccaaaaagcctttgcgggaaccacccttgctatgacaaagaacgctcgcgtgcttgggggagtgatgtctgccttcagcctgggatatgatttggctacattgtcaaaggagtggaaacatctgaaggagggagcgcgcacaaaattcgccgaagaactgcgcgccaaggcgctggagctggagcgcaaactcacggaactcacccaactgtacaagagtctgcagcagaaggtgcgatcacgtgctaggggtgtggggaaggatctcactggaacatgtgaaaccgaggcatactggaaagaactccgggagcacgtatggatgtggttatggctttgtgtttgcctttgcgtttgcgtttacgtgcagtttacatag

SEQ ID NO: 219414 - DNA, 1032 bp, Artificial Sequence
  derived and/or modified sequence
atggataaccaggctgagcgtgagtcagaggccggagtagggttacagagagatgaggatgatgctccattatgcgaagacgtggaattgcaggacggcgatctgagtccggaggagaaaatcttccttagggaatttccaaggttgaaggaagacctcaaaggcaacatcgacaaactcagagcacttgctgacgacatcgacaagacgcataagaaatttacaaaagcaaatatggttgccacgtctacagcagtgataagcggggtgatgagccttctcggccttgccctggcccctgctactggaggtggaagcctcctgctgtccactgcagggcagggcctggctaccgccgctggcgttacctcaatagtctctggcacactggaaagaagtaaaaataaggaagcacaggccagagccgaggacatcctaccgacatacgaccaggaggacagagaagacgaggaggagaaagccgactacgtgacagccgctgggaaaataatatataatttgcggaacaccctgaagtacgctaaaaaaaatgttcgcgctttctggaagttgagagccaaccctcggctggccaacgccacaaagcgactgttgaccactgggcaggtttctagccggtcgcgtgtgcaggtgcaaaaggctttcgctggtaccacgttagctatgaccaagaatgccagggtgctgggaggcgtgatgtctgctttctctctgggatacgacctcgcaacgctgagcaaggagtggaagcatctgaaagagggcgctaggacgaaattcgccgaggagctgcgagccaaagcacttgagctcgagaggaagctaacagagctcacccagctttataagtccctgcagcaaaaggtgcgatcgcgagccaggggtgtcggcaaggatctgaccgggacatgtgagacagaggcatactggaaggagctgcgtgagcacgtgtggatgtggctttggttgtgcgtctgtctttgcgtgtgcgtctatgttcagtttacctag

SEQ ID NO: 219415 - DNA, 3069 bp, Artificial Sequence
  derived and/or modified sequence
gaagagccctagagctttgctttttctctcctgcagcacttaaccgaaaccagttttgcaatcaattcctgttcaaaggccaccctactcttcctatccgtctttctccagcccagacactcacagccccctgccagaccaggggacctcggagaggcaaggacagaggttcaggatcttcctctccctcgggacccaaggccacaaaggagagctccgtggagagaagaaaatcatttgactcctggggacacagatttgctgccacagaggctgatggacaaccaggcggagagagaaagtgaggctggtgttggtttgcaaagggatgaggatgacgctcctctgtgtgaagacgtggagctacaagacggagatctgtcccccgaagaaaaaatatttttgagagaatttcccagattgaaagaagatctgaaagggaacattgacaagctccgtgccctcgcagacgatattgacaaaacccacaagaaattcaccaaggctaacatggtggccacctctactgctgtcatctctggagtgatgagcctcctgggtttagcccttgccccagcaacaggaggaggaagcctgctgctctccaccgctggtcaaggtttggcaacagcagctggggtcaccagcatcgtgagtggtacgttggaacgctccaaaaataaagaagcccaagcacgggcggaagacatactgcccacctacgaccaagaggacagggaggatgaggaagagaaggcagactatgtcacagctgctggaaagattatctataatcttagaaacaccttgaagtatgccaagaaaaacgtccgtgcattttggaaactcagagccaacccacgcttggccaatgctaccaagcgtcttctgaccactggccaagtctcctcccggagccgcgtgcaggtgcaaaaggcctttgcgggaacaacactggcgatgaccaaaaatgctcgcgtgctgggaggtgtgatgtccgccttctcccttggctatgacttggccactctctcaaaggaatggaagcacctgaaggaaggagcaaggacaaagtttgcggaagagttgagagccaaggccttggagctggagaggaaactcacagaactcacccagctctacaagagcttgcagcagaaagtgaggtcaagggccagaggggtggggaaggatttaactgggacctgcgaaaccgaggcttactggaaggagttaagggagcatgtgtggatgtggctgtggctgtgtgtgtgtctgtgtgtctgtgtgtatgtacagtttacatgaatgttcctcaggacatggcatacaatggccttggaggtccaaataatatcaagtacatcttggagatgagggtgcctgtcctggacagacctcggcatgccttctgtttctccttcaatgctccttaaggcctatgtgctgggaaaagggtcttccctgtttgtttgtttgtttgtttgtttgtttgttttgagacagggtctctgttgcccaggctggagtgcagtggcgtaatctcggctcactgcaacctctgcctcctgagtgcaagcaagtctcctgcctcagcctcccaagtagctgggattacaggcacgcaccaccacgcccagctaattttggtatttttttgtagagacagggtttcaccattttggccaggctggtctcgaattcctgacctcaagtgatccacccaccttggcctcccaaaatgctgggattacaagcgtgagctaccctgcccagccgggtcttcccagttttaacaaagaggtcacagagccacaggcggagttaggaactaaattgtctcctcctcccaattcatatgttgaagtcctaaaccaaaatgtggctgtatttagagatggaccctttgggaggtaattagggttgactgaggccatagggtgaggtcctaacccgatggaattgacttctttataagaggaggaggaaatacaagagggcctccccacccctgctgcacacctacactgaaggaaggctatttgcagatgcagcaagaaggcagccatctgcaaggcagaagaagagagccctcaccaggaactgaataagtcagtcagtctgggacttccagcctctagaactgtgaaacaataaatttctgtggtgtaagcaactcaatctatagtagtttgttactattttgttatagcaaccaaagatgactaagccagacaggttatgtcactcgccaagtgtcttagtctgtttgtgctgctataacaaaataccttagactgggtaatttacaaacaacagagatgtatccagagatccacagttctggaggctgagaagtctaaaatcaaggcaccagcagattccacatctcgtgaaggctcactctctgcttcacagatggcactgtcttgctgtgttctcacatggcagaaggggcaaacaagcccccctgggcctcttttataaaggcactaactctatgcctaaaggcagggccctcatgactctatcacctaccaaaaggctccacttctttatactattggaggggtagaaggaacttcctttctagaccttgaaggtttaagaatttgaatctataaaacaagctgacaatagacagattaacaggagaaaaagcatatacattttttaatgtgggccagatggcagaagcttaaataacaccccaagctacaggaagtgaggcctctgatggggaggtagtgacacaggctgtgggagggggtagggggaggaagtctgtggtgagcaaagtttgccttattacactgataaagtgtaattacactaataaagctggatcacctgaggttaggagtttgagaacagcctggccaacatggcaaaaccctgtctctactataaatacaaaaattagccaggtgtagtggcagggcacttgtaatcctatctactcgggaggctgaggcaggagaatcgcttgaacccaggctgtaaaggttgcagtgagccaagatcatgccactgcactccagtctgggtgtcagaatgagaccccatctc

SEQ ID NO: 219416 - DNA, 1032 bp, Artificial Sequence
  derived and/or modified sequence
atggacaaccaggccgagagagagagcgaggccggcgtgggcctgcagagagacgaggacgacgcccccctgtgcgaggacgtggagctgcaggacggcgacctgagccccgaggagaagatcttcctgagagagttccccagactgaaggaggacctgaagggcaacatcgacaagctgagagccctggccgacgacatcgacaagacccacaagaagttcaccaaggccaacatggtggccaccagcaccgccgtgatcagcggcgtgatgagcctgctgggcctggccctggcccccgccaccggcggcggcagcctgctgctgagcaccgccggccagggcctggccaccgccgccggcgtgaccagcatcgtgagcggcaccctggagagaagcaagaacaaggaggcccaggccagagccgaggacatcctgcccacctacgaccaggaggacagagaggacgaggaggagaaggccgactacgtgaccgccgccggcaagatcatctacaacctgagaaacaccctgaagtacgccaagaagaacgtgagagccttctggaagctgagagccaaccccagactggccaacgccaccaagagactgctgaccaccggccaggtgagcagcagaagcagagtgcaggtgcagaaggccttcgccggcaccaccctggccatgaccaagaacgccagagtgctgggcggcgtgatgagcgccttcagcctgggctacgacctggccaccctgagcaaggagtggaagcacctgaaggagggcgccagaaccaagttcgccgaggagctgagagccaaggccctggagctggagagaaagctgaccgagctgacccagctgtacaagagcctgcagcagaaggtgagaagcagagccagaggcgtgggcaaggacctgaccggcacctgcgagaccgaggcctactggaaggagctgagagagcacgtgtggatgtggctgtggctgtgcgtgtgcctgtgcgtgtgcgtgtacgtgcagttcacctag

SEQ ID NO: 219417 - protein, 347 aa, Artificial Sequence
  derived and/or modified sequence
MGSWVQLITSVGVQQNHPGWTVAGQFQEKKRFTEEVIEYFQKKVSPVHLKILLTSDEAWKRFVRVAELPREEADALYEALKNLTPYVAIEDKDMQQKEQQFREWFLKFPQIRWKIQESIERLRVIANEIEKVHRGCVIANVVSGSTGILSVIGVMLAPFTAGLSLSITAAGVGLGIASATAGIASSIVENTYTRSAELTASRLTATSTDQLEALRDILRDITPNVLSFALDFDEATKMIANDVHTLRRSKATVGRPLIAWRYVPINVVETLRTRGAPTRIVRKVARNLGKATSGVLVVLDVVNLVQDSLDLHKGAKSESAESLRQWAQELEENLNELTHIHQSLKAG

SEQ ID NO: 219418 - protein, 127 aa, Artificial Sequence [sequence omitted]

SEQ ID NO: 219419 - protein, 65 aa, Artificial Sequence
  derived and/or modified sequence
MGSWVQLITSVGVQQNHPGWTVAGQFQEKKRFTEEVIEYFQKKVSPVHLKILLTSDEAWKRFVRV

SEQ ID NO: 219420 - protein, 60 aa, Artificial Sequence
  derived and/or modified sequence
MGSWVQLITSVGVQQNHPGWTVAGQFQEKKRFTEEVIEYFQKKVSPVHLKILLTSDEAWK

SEQ ID NO: 219421 - protein, 72 aa, Artificial Sequence
  derived and/or modified sequence
MGSWVQLITSVGVQQNHPGWTVAGQFQEKKRFTEEVIEYFQKKVSPVHLKILLTSDEAWKRFVRVAELPREE

SEQ ID NO: 219422 - protein, 70 aa, Artificial Sequence
  derived and/or modified sequence
MGSWVQLITSVGVQQNHPGWTVAGQFQEKKRFTEEVIEYFQKKVSPVHLKILLTSDEAWKRFVRVAELPR

SEQ ID NO: 219423 - DNA, 1044 bp, Artificial Sequence
  derived and/or modified sequence
atgggttcatgggtccagttaatcacttcagtgggcgtacagcaaaaccaccccgggtggaccgtggcaggccaatttcaggagaagaagcgtttcaccgaagaggtcattgagtacttccagaagaaagtgtctcctgtacacctgaagattctcctcacaagcgacgaagcctggaagaggttcgtccgcgtcgctgagctacccagagaggaagcagacgccctatacgaggctctgaagaacttgactccttacgtggccatcgaggataaggacatgcaacagaaggagcagcaatttcgtgagtggttcttgaagtttccccagatcaggtggaagatccaggagtccatcgagcgactgcgggtcatcgcgaatgagattgaaaaggtgcatcggggatgtgtaattgccaacgtggtgtctgggagcacaggcatcctctccgtgattggcgtgatgttggccccattcaccgccggcctcagtttatccattactgcagccggggtcggactgggcatcgcaagcgctacagccgggatagcgtcaagcattgtggagaacacctatacaaggagcgctgaactgaccgcgtcaaggctaacagcaactagtaccgaccagctggaggcactacgagatattttaagagatatcaccccaaatgtgctgagctttgccctcgacttcgacgaggccacaaagatgatcgctaacgatgtacatactcttcgtcgctctaaagctaccgttggccgtccacttattgcatggagatatgtgccaattaatgtagtagagactctcaggacgagaggtgctccaacacggattgtcaggaaggtggccagaaatctcggcaaagcaacgagtggcgtcctcgtcgttcttgatgttgttaacctggtgcaggattcactggatcttcacaagggtgccaaatcggagtccgccgaatccctgaggcaatgggcacaggagcttgaggagaacctgaatgagcttacccacattcatcagtccctcaaggccggttag

SEQ ID NO: 219424 - DNA, 384 bp, Artificial Sequence
  derived and/or modified sequence
atgggtagctgggtgcagcttatcacaagtgtcggggtgcagcagaatcaccctggctggaccgtcgcaggccagttccaggagaaaaagcgtttcaccgaagaagtgatagaatatttccagaagaaagtttctccggtgcacttgaaaatcttactgacctcagacgaggcctggaagcgattcgttagggtggccgagctgccaagagaggaggctgacgctctgtacgaagctctgaagaacttaaccccctatgtggcgattgaagataaagacatgcaacagaaagaacagcaatttcgggagtggttcctaaaggtgtcatctaaccagatggaagactcaggtgtgcacagaaaggcctcgtgccattgcaaatag

SEQ ID NO: 219425 - DNA, 198 bp, Artificial Sequence
  derived and/or modified sequence
atgggtagttgggtccagctgatcacatctgttggggtgcagcagaatcacccaggatggacggtggcaggacaattccaggagaagaagcgatttaccgaggaagtgatagaatacttccaaaagaaggtgtcacctgtgcacctgaagatcctgctgacgagtgatgaagcctggaagcggttcgtgcgagtgtag

SEQ ID NO: 219426 - DNA, 384 bp, Artificial Sequence
  derived and/or modified sequence
atggggtcttgggtgcagctcatcaccagcgttggggtgcagcaaaaccatcccggctggactgtagctgggcagttccaggagaaaaaaagattcactgaggaggtgattgaatactttcaaaaaaaagtgtccccagtacacctaaagattttgttaacatcagacgaagcttggaagagattcgtgagggtagcggagctaccgcgcgaggaggccgacgctctctatgaagcattgaagaacctgacaccctatgtcgctatcgaggacaaagatatgcagcaaaaagagcagcagttccgcgagtggttcctcaaggtctcttcaaatcaaatggaggattccggagtgcatcgcaaggcgagctgccactgcaaatag

SEQ ID NO: 219427 - DNA, 183 bp, Artificial Sequence
  derived and/or modified sequence
atggggagttgggtgcaactcattacaagtgtgggcgtgcaacagaatcatcctggatggactgtcgccggccagttccaggagaaaaagcgctttacagaggaggtgatagagtatttccaaaagaaggttagccccgtgcacctcaagatacttctgacttccgatgaggcttggaaatag

SEQ ID NO: 219428 - DNA, 219 bp, Artificial Sequence
  derived and/or modified sequence
atgggttcatgggtgcagctgattacttcagtgggggtccagcagaatcacccagggtggaccgtggctggtcagtttcaagagaagaagagatttacagaggaggtgatcgaatattttcaaaagaaggtgtcacctgtacacttgaagatccttctgacatctgacgaggcctggaagcgcttcgttagggtggccgagttgccccgcgaagagtag

SEQ ID NO: 219429 - DNA, 213 bp, Artificial Sequence
  derived and/or modified sequence
atgggcagctgggttcagctcatcaccagtgtgggtgtgcagcagaaccaccctggctggactgttgctggacagtttcaggagaagaagagatttacagaagaggtcatcgagtactttcagaaaaaggtgagtcctgtacacctgaaaatcttattgacaagtgatgaggcttggaaacgatttgtccgtgtggcagaactgcctcgatag

SEQ ID NO: 219430 - DNA, 324 bp, Artificial Sequence
  derived and/or modified sequence
atgggctcctgggtgcagctgatcacctctgtgggcaccagcggcctcttcctgggcgtgcgggtgcgggaggagggcgccggcatgcgctgcagcaagaccatccaggccggccagtggctggacagcagcaagggccccctgggccccagccccccacctgtgcccacagctggctacagcagcagcttctgtgtgcactacgtgaacctgctgcccggggtgctggtgctgtctgtgaccagccagtacccccacctgtccatggccctgtgccagctggccgcccatgactggccccggctgagctgtgtgtgtgtgtag

SEQ ID NO: 219431 - DNA, 1044 bp, Artificial Sequence
  derived and/or modified sequence
atgggctcctgggtgcagctgatcacctctgtgggcgtgcagcagaaccaccctggctggacagtggccggccagttccaggagaagaagcgcttcacagaggaggtgattgagtacttccagaagaaggtgtcccctgtgcacctgaagatcctgctgaccagtgatgaggcctggaagagatttgtgcgggtggccgagctgccccgggaggaggctgatgccctgtatgaggccctgaagaacctgaccccctacgtggccatcgaggacaaggacatgcagcagaaggagcagcagttccgggagtggttcctgaagttcccccagatccgctggaagatccaggagagcattgagcggctgcgggtgattgccaatgaaattgagaaggtgcaccggggctgcgtcatcgccaacgtggtgtctggcagcacaggcatcctgagcgtcatcggcgtgatgctggcccccttcaccgctggcctgagcctgagcatcacagctgctggggtgggcctgggcatcgccagcgccacagctggcatcgccagcagcatcgtggagaacacctacaccaggtctgctgagctgacagccagccggctgacagccaccagcacagaccagctggaggccctgcgggacatcctgcgggacatcacccccaacgtgctgagctttgccctggactttgatgaggccaccaagatgattgccaatgatgtgcacaccctgcggcgcagcaaggccaccgtgggccggcccctcatcgcctggaggtatgtgcccatcaacgtggtggagaccctgcggaccaggggggcccccacccgcatcgtgaggaaggtggccaggaacctgggcaaggccaccagcggcgtgctggtggtgctggatgtggtgaacctggtgcaggacagcctggacctgcacaagggggccaagtctgagagcgctgagagcctgcggcagtgggcccaggagctggaggagaacctgaatgagctgacccacatccaccagagcctgaaggccggctag

SEQ ID NO: 219432 - DNA, 384 bp, Artificial Sequence
  derived and/or modified sequence
atgggctcctgggtgcagctgatcacctctgtgggcgtgcagcagaaccaccctggctggacagtggccggccagttccaggagaagaagcgcttcacagaggaggtgattgagtacttccagaagaaggtgtcccctgtgcacctgaagatcctgctgaccagtgatgaggcctggaagagatttgtgcgggtggccgagctgccccgggaggaggctgatgccctgtatgaggccctgaagaacctgaccccctacgtggccatcgaggacaaggacatgcagcagaaggagcagcagttccgggagtggttcctgaaggtgagcagcaaccagatggaggacagcggcgtgcacaggaaggccagctgccactgcaagtag

SEQ ID NO: 219433 - DNA, 198 bp, Artificial Sequence
  derived and/or modified sequence
atgggctcctgggtgcagctgatcacctctgtgggcgtgcagcagaaccaccctggctggacagtggccggccagttccaggagaagaagcgcttcacagaggaggtgattgagtacttccagaagaaggtgtcccctgtgcacctgaagatcctgctgaccagtgatgaggcctggaagagatttgtgcgggtgtag

SEQ ID NO: 219434 - DNA, 183 bp, Artificial Sequence
  derived and/or modified sequence
atgggctcctgggtgcagctgatcacctctgtgggcgtgcagcagaaccaccctggctggacagtggccggccagttccaggagaagaagcgcttcacagaggaggtgattgagtacttccagaagaaggtgtcccctgtgcacctgaagatcctgctgaccagtgatgaggcctggaagtag

SEQ ID NO: 219435 - DNA, 219 bp, Artificial Sequence
  derived and/or modified sequence
atgggctcctgggtgcagctgatcacctctgtgggcgtgcagcagaaccaccctggctggacagtggccggccagttccaggagaagaagcgcttcacagaggaggtgattgagtacttccagaagaaggtgtcccctgtgcacctgaagatcctgctgaccagtgatgaggcctggaagagatttgtgcgggtggccgagctgccccgggaggagtag

SEQ ID NO: 219436 - DNA, 213 bp, Artificial Sequence
  derived and/or modified sequence
atgggctcctgggtgcagctgatcacctctgtgggcgtgcagcagaaccaccctggctggacagtggccggccagttccaggagaagaagcgcttcacagaggaggtgattgagtacttccagaagaaggtgtcccctgtgcacctgaagatcctgctgaccagtgatgaggcctggaagagatttgtgcgggtggccgagctgcccaggtag

SEQ ID NO: 219437 - DNA, 1044 bp, Artificial Sequence
  derived and/or modified sequence
atgggcagctgggtgcagctgatcaccagcgtgggcgtgcagcagaaccatcctggctggactgtggctgggcagttccaggaaaagaaaagattcacggaggaggttatagagtactttcaaaaaaaagtttctcctgttcatttaaaaatacttttaaccagcgatgaggcctggaagcgcttcgtgcgtgtggcagagttgcctcgggaggaggccgacgcactgtatgaagccctgaaaaaccttacaccttatgtggcaattgaggacaaggatatgcagcagaaagaacagcaatttagagaatggtttctcaaattcccccagatccgctggaagatccaggaatccatcgaaagattgagagttatcgctaacgaaatcgagaaagtgcaccgtggatgtgtaatcgcaaacgtcgtctccggtagtaccggaatactgagcgtaatcggtgtcatgctggccccatttactgctggccttagcctgagcattacagccgccggcgtgggcttgggcatagcatcagctacagctggaattgcatcttctattgtggaaaacacgtatactcgatccgccgagttgacggcttctcggctcaccgccacttccaccgaccagttagaagccctccgggatatcctgcgtgacattacaccgaacgtcttgagctttgctttggacttcgatgaggctaccaagatgattgccaatgatgtgcataccctccggaggagtaaagctaccgtgggaaggcctttaattgcttggcggtacgtgcccataaatgtcgttgagactctacggactcggggggctcccactcgcatcgtgaggaaggtggctagaaatttaggcaaagccacctcaggggtcctcgtggtgctggatgttgtcaacctggttcaggactcactcgacctgcataagggggcaaagagtgagtccgccgagtccctgagacagtgggctcaggagttggaggagaacctcaatgagctcacccatatacaccagtccctaaaggctggatag

SEQ ID NO: 219438 - DNA, 384 bp, Artificial Sequence
  derived and/or modified sequence
atgggcagctgggtgcagctgatcaccagcgtgggcgtgcagcagaaccatcccggctggaccgtggccgggcagttccaggaaaagaagaggtttacggaggaggtcatcgagtatttccagaagaaagttagcccagtgcacttgaagattttactaacaagtgatgaggcatggaagcgctttgtcagggtggccgagcttccgagggaggaagccgacgctttgtatgaggccctgaagaatctcactccctacgtggccattgaagataaggatatgcagcagaaagagcaacaatttagagaatggtttcttaaagtgagtagcaaccagatggaggattccggcgtgcaccgaaaggcctcgtgtcactgtaagtag

SEQ ID NO: 219439 - DNA, 198 bp, Artificial Sequence
  derived and/or modified sequence
atgggcagctgggtgcagctgatcaccagcgtgggcgtgcagcagaaccacccggggtggactgtggctgggcagtttcaggagaaaaagcggttcacagaggaggttattgagtacttccagaagaaggtatccccagttcacctaaaaattctgcttaccagcgatgaagcctggaaacgttttgtgagagtgtag

SEQ ID NO: 219440 - DNA, 384 bp, Artificial Sequence
  derived and/or modified sequence
atgggcagctgggtgcagctgatcaccagcgtgggcgtgcagcagaaccaccctggatggacagtagctggtcagttccaggagaagaagagatttaccgaagaagtcatcgagtacttccagaaaaaggtctcacccgttcatctgaagattctgctgacatcagatgaggcctggaaacgcttcgtgcgcgtagccgaacttcctagggaggaagccgacgcactttatgaggctcttaagaacttgaccccatacgtggcaattgaggacaaggacatgcaacagaaagaacagcagttccgggaatggtttttgaaggtctcatccaatcagatggaagactctggtgtgcataggaaggcgagttgtcactgcaaatag

SEQ ID NO: 219441 - DNA, 183 bp, Artificial Sequence
  derived and/or modified sequence
atgggcagctgggtgcagctgatcaccagcgtgggcgtgcagcagaatcatcctggatggactgtggctggacagttccaagagaaaaagagatttacggaggaggtgatcgagtatttccagaagaaagttagccccgtgcatcttaagattttgttaacctctgatgaagcttggaagtag

SEQ ID NO: 219442 - DNA, 219 bp, Artificial Sequence
  derived and/or modified sequence
atgggcagctgggtgcagctgatcaccagcgtgggcgtgcagcagaaccatcctggttggaccgtggcaggacagttccaggagaagaagcgcttcaccgaggaggtgatcgagtattttcaaaagaaggtgtccccagttcatttgaagatcttactgacttctgacgaagcttggaaaagattcgtgagagttgcggagctgcccagagaagaatag

SEQ ID NO: 219443 - DNA, 213 bp, Artificial Sequence
  derived and/or modified sequence
atgggcagctgggtgcagctgatcaccagcgtgggcgtgcagcagaatcaccccggctggaccgtagcaggtcagtttcaggaaaaaaagaggttcactgaagaagtaatcgagtactttcaaaagaaggtgagccccgtccatctcaaaattcttttgacttccgatgaggcttggaaaaggttcgtgagagtggcagagttgccacgctag

SEQ ID NO: 219444 - DNA, 1044 bp, Artificial Sequence
  derived and/or modified sequence
atgggcagttgggtacaacttattacctccgtgggtgtgcagcagaatcatcccggttggacggtggcgggacaatttcaggagaagaagcgctttaccgaagaggtgatcgagtactttcaaaagaaggtgtcaccagtgcacctcaaaatcttacttactagcgatgaggcctggaaacgatttgtgagagtggcagaactcccaagggaggaggccgacgctctttacgaagcactaaagaacctaaccccctatgttgccattgaagataaggatatgcagcagaaggagcaacaatttagggaatggttcttgaaatttccacaaatccgatggaaaatccaagagagtattgagcgactgcgagtcatcgctaacgaaatcgagaaagtgcatagaggctgtgtgatcgccaatgtggtgtctggttctacaggaatcttgagtgttatcggggttatgctcgccccattcaccgcaggcctgtctttgtccattacagcagccggtgtgggcttaggtatcgctagcgctacagccggaatcgcttcaagtatcgttgagaacacctacaccagatctgcagaacttaccgcgtcaaggcttacggccacatcaactgaccaactggaggctctgagagatatcctaagagatatcacaccgaacgtgctctcattcgccctggacttcgacgaagcaaccaaaatgattgctaacgatgttcacaccctgcgccgtagtaaggctaccgtgggaagacccctgattgcgtggagatatgtgccaatcaatgtggtcgagacccttcggacacgtggggctcccactagaatcgtccggaaggtggctagaaatttgggcaaggcaacctccggcgtgttagtcgtcctagatgtggtgaacctagtccaagattctttagatcttcacaaaggagccaagagcgagagcgccgagagcctgcgacagtgggcccaagagctagaagagaacctcaatgaactgacccacatccaccagtcgctgaaggcgggatag

SEQ ID NO: 219445 - DNA, 384 bp, Artificial Sequence
  derived and/or modified sequence
atggggtcctgggttcagctgataactagtgtgggcgtgcagcagaatcaccccggatggaccgtagcagggcagtttcaggagaagaaaagattcactgaggaggtaatcgaatactttcagaaaaaagtgtcaccggtgcacctaaagatcttactcaccagtgacgaggcctggaaacgttttgtgagggtggcagagctgccacgcgaggaggcagacgctctctacgaggccctaaaaaacctgaccccttacgtggcgatagaagataaagatatgcagcagaaagagcagcaattcagagaatggtttctgaaggtgtcctccaaccaaatggaagattcaggggtacacagaaaggcgagctgtcactgcaagtag

SEQ ID NO: 219446 - DNA, 198 bp, Artificial Sequence
  derived and/or modified sequence
atgggatcctgggtgcaacttattacctccgttggagtccagcagaaccacccaggctggacggttgcgggtcagtttcaggagaagaagagatttacagaggaagtgatcgaatatttccagaagaaagtgagtcctgttcacctgaaaatcctgctcacatccgacgaggcctggaagcgctttgtgagagtgtag

SEQ ID NO: 219447 - DNA, 384 bp, Artificial Sequence
  derived and/or modified sequence
atgggttcctgggtccaactgattaccagcgttggcgtccaacagaaccatcccggatggactgttgcaggccagtttcaggaaaagaagcgtttcactgaggaagttatcgagtattttcaaaaaaaggtctccccagttcatttaaaaattctgctcacaagcgacgaggcgtggaaacgttttgtgagggtcgctgaattgccgagggaagaggccgacgctctctacgaagcacttaaaaacctgacaccatatgtggcaatcgaagataaagatatgcagcagaaagagcagcagtttcgcgaatggttccttaaggtgtccagcaatcagatggaggatagtggcgtacacaggaaggcatcttgccattgtaagtag

SEQ ID NO: 219448 - DNA, 183 bp, Artificial Sequence
  derived and/or modified sequence
atgggatcatgggtgcagctcatcacttcagtgggggtacagcagaatcacccaggctggactgtcgccggacagtttcaggaaaaaaagaggtttacagaagaggtaattgagtactttcagaaaaaggtaagtccggtgcatctaaagatcctgctaacatcagacgaagcctggaagtag

SEQ ID NO: 219449 - DNA, 219 bp, Artificial Sequence
  derived and/or modified sequence
atgggcagctgggtgcagctcattaccagtgtcggagtgcaacagaaccaccctggctggaccgttgcaggccagttccaagagaagaaaaggtttactgaagaggtgatcgagtactttcagaaaaaggttagcccagtgcacctgaaaatccttttaacatcagacgaagcatggaaacgcttcgtcagggtagccgagctgccacgggaggagtag

SEQ ID NO: 219450 - DNA, 213 bp, Artificial Sequence
  derived and/or modified sequence
atgggatcgtgggtgcagcttattacctctgtcggagttcaacaaaaccacccagggtggacagtggccggacagtttcaagagaagaagaggtttacggaggaagtaattgagtactttcagaaaaaggtatctccagttcatttaaagatcctgctgacctccgacgaggcatggaagagatttgttcgggtcgccgagctgcccagatag

SEQ ID NO: 219451 - DNA, 844 bp, Artificial Sequence
  derived and/or modified sequence
atcttgggggctggaggacgtgtctggttattatataggtgcacagctggaggtgagatccacacagctcagaccagctggatcttgctcagtctctgtcagaggaagatcccttggaggaggccccgcagcgacatggagggagctgctttgctgaaaatctttgtcgtctgcatctggaaccaaaatcacttcccggaattgaccaactggtagactcgcctagaggggacgcactgtgtcctagttgaggctaacagtcagtatccagcctcaacattcagcagaggccccagatcagcgtctgagccaggccaacaatgaccaaggaggatgggatcctgggtgcagctcatcacaagcgtcgggacaagcggacttttccttggtgtgagagtgagggaagagggagctggaatgaggtgcagcaaaaccatccaggctggacagtggctggacagttccaagggtcctctgggcccatcccctccccctgtccctacagctggttacagcagctccttctgtgtccattatgtgaacctgctgcctggagttcttgttctttctgtgacctcccagtatccacatctcagcatggccctctgtcagctggctgctcatgactggccgaggttaagctgtgtttgtgtctgacagaagcgcccatctgatatgaccccagttcagattcatagcttgcagtttcatggggggttacagctgttctgaaggtctggttggttttgtttgcccgggaatgtttcaggtctggtttttattttaattttgctttaatattcaccatccccaccccatcaataaaacacaaatttagtgctgg

SEQ ID NO: 219452 - DNA, 1467 bp, Artificial Sequence
  derived and/or modified sequence
gaggtgctggggagcagcgtgtttgctgtgcttgattgtgagctgctgggaagttgtgactttcattttacctttcgaattcctgggtatatcttgggggctggaggacgtgtctggttattatataggtgcacagctggaggtgagatccacacagctcagaccagctggatcttgctcagtctctgtcagaggaagatcccttggaggaggccccgcagcgacatggagggagctgctttgctgaaaatctttgtcgtctgcatctggaaccaaaatcacttcccggaattgaccaactggtagactcgcctagaggggacgcactgtgtcctagttgaggctaacagtcagtatccagcctcaacattcagcagaggccccagatcagcgtctgagccaggccaacaatgaccaaggaggatgggatcctgggtgcagctcatcacaagcgtcggggtgcagcaaaaccatccaggctggacagtggctggacagttccaagaaaagaaacgcttcactgaagaagtcattgaatacttccagaagaaagttagcccagtgcatctgaaaatcctgctgactagcgatgaagcctggaagagatttgtgcgtgtggctgaattgcccagggaagaggcagatgctctctatgaagctctgaagaatcttacaccatatgtggctattgaggacaaagacatgcagcaaaaagaacagcagtttagggagtggtttttgaaatttcctcaaatcagatggaagattcaggagtccatagaaaggcttcgtgtcattgcaaatgagattgaaaaggtccacagaggctgcgtcatcgccaatgtggtgtctggctccactggcatcctgtctgtcattggcgttatgttggcaccatttacagcagggctgagcctgagcattactgcagctggggtagggctgggaatagcatctgccacggctgggatcgcctccagcatcgtggagaacacatacacaaggtcagcagaactcacagccagcaggctgactgcaaccagcactgaccaattggaggcattaagggacattctgcgtgacatcacacccaatgtgctttcttttgcacttgattttgacgaagccacaaaaatgattgcgaatgatgtccatacactcaggagatctaaagccactgttggacgccctttgattgcttggcgatatgtacctataaatgttgttgagacactgagaacacgtggggcccccacccggatagtgagaaaagtagcccggaacctgggcaaggccacttcaggtgtccttgttgtgctggatgtagtcaaccttgtgcaagactcactggacttgcacaagggggcaaaatccgagtctgctgagtcgctgaggcagtgggctcaggagctggaggagaatctcaatgagctcacccatatccatcagagtctaaaagcaggctag

SEQ ID NO: 219453 - DNA, 3414 bp, Artificial Sequence
  derived and/or modified sequence
gaggtgctggggagcagcgtgtttgctgtgcttgattgtgagctgctgggaagttgtgactttcattttacctttcgaattcctgggtatatcttgggggctggaggacgtgtctggttattatataggtgcacagctggaggtgagatccacacagctcagaccagctggatcttgctcagtctctgtcagaggaagatcccttggaggaggccccgcagcgacatggagggagctgctttgctgaaaatctttgtcgtctgcatctggaaccaaaatcacttcccggaattgaccaactggtagactcgcctagaggggacgcactgtgtcctagttgaggctaacagtcagtatccagcctcaacattcagcagaggccccagatcagcgtctgagccaggccaacaatgaccaaggaggatgggatcctgggtgcagctcatcacaagcgtcggggtgcagcaaaaccatccaggctggacagtggctggacagttccaagaaaagaaacgcttcactgaagaagtcattgaatacttccagaagaaagttagcccagtgcatctgaaaatcctgctgactagcgatgaagcctggaagagatttgtgcgtgtggctgaattgcccagggaagaggcagatgctctctatgaagctctgaagaatcttacaccatatgtggctattgaggacaaagacatgcagcaaaaagaacagcagtttagggagtggtttttgaaagtttcctcaaatcagatggaagattcaggagtccatagaaaggcttcgtgtcattgcaaatgagattgaaaaggtccacagaggctgcgtcatcgccaatgtggtgtctggctccactggcatcctgtctgtcattggcgttatgttggcaccatttacagcagggctgagcctgagcattactgcagctggggtagggctgggaatagcatctgccacggctgggatcgcctccagcatcgtggagaacacatacacaaggtcagcagaactcacagccagcaggctgactgcaaccagcactgaccaattggaggcattaagggacattctgcgtgacatcacacccaatgtgctttcttttgcacttgattttgacgaagccacaaaaatgattgcgaatgatgtccatacactcaggagatctaaagccactgttggacgccctttgattgcttggcgatatgtacctataaatgttgttgagacactgagaacacgtggggcccccacccggatagtgagaaaagtagcccggaacctgggcaaggccacttcaggtgtccttgttgtgctggatgtagtcaaccttgtgcaagactcactggacttgcacaagggggcaaaatccgagtctgctgagtcgctgaggcagtgggctcaggagctggaggagaatctcaatgagctcacccatatccatcagagtctaaaagcaggctaggcccaattgttgcgggaagtcagggaccccaaacggagggactggctgaagccatggcagaagaacgtggattgtgaagatttcatggacatttattagttccccaaattaatacttttataatttcctatgcctgtctttaccgcaatctctaaacacaaattgtgaagatttcatggacactgatcacttccccaatcaatacccttgtgatttcttatgcctgtctttactttaatctcctaatcctgtcagctgaggaggatgtatgtcacctcaggaccatgtgataattgcgttaactgcacaaattgtagagcatgtgtgtttgaacaatatgaaatctgggcaccttgaaaaaagaacaggataacagcaattgttcagggaataagagagataaccttaaactctgaccaacagtgagcctggtggaacagagtcatatttctcttctttcaaaagcaaatgggagaaatatcgctgaattctttttctcagcaaggaacatccctgagaaagagaatgcacccctgagggtgggtctataaatggcctccttgggtgtggccatcttctatggtcgagactgtagggatgaaataaaccccagtctcccatagcgctcccaggcttattaggaagaggaaattcccgcctaataaattttggtcagaccggttgctctcaaaaccctgtctcctgataagatgttatcaatgacaatggtgcccgaaacctcattagcaattttaatttctccccggtcctgtgttcctgtgatctcgccctgcctccacttgccttgtgatattctattaccttgtgaagtaggtgatctttgtgacccacacccacaccctattcatacactccctccccttttgaaagtccctaataaaaacttgctggttttgcggcttgtgaggcatcacggaacctaccgatgtgtgatgtctcccctggacacctagctttaaaatttctctcttttgtactctgtgcctttatttctcaaaccggccaacacttagggaaaatagaaaagaacctacgtgaccatcggggcaggttccccgatacccaatgaccccagagcagtgcagccaccagggaaggtgagccagacacaggccgggacaaaacgcagacattttttaggggaataaagagggcgaggtaaagtttatggaactcagtgttaggaactttggcatctgtagctgagcacagcaggggaggggttactcaagatggcaagtgcgccaaggagaaggcagaaatgctggggcctggaataagggaggagaggggactggagagtgtggggaatggaaagaagcagtttactctagactaaagagtatattgggggaggaagagagggaggcacgtaggaacaagcaatgagaagaccaggaaaagaaagagctgaaaatggagaaagccacagttagaactgttggatacaggagaagaaacagcggctccactaaagacccgccccccggttggatgtccttccaagaatggaatccttccctggtgatggtctctcaccctgtcttaccagcatccactctcccttgtcctcccgggggtgtatctgagtcagccagtggcttcttgatgatggtggtggtggttgtagtgtgacaggtcccctttaggttatttaagggtgcatgtcccctgcttgaaccctgaaggccgggtaatgagccatttccatggtgcccagctgaggaccaggtgtctctgagaatccaaacatcctggagagtatctgagaaccaaccaagtaaaagtctcgttgctcatatatagtagacaaagagccagaaaattaactgaaaagcagtttagacattgggggaggctggatctctcgagctgtcttgctgagtgccctgtgtgtaagtcctaataaacttagctactcgcca

SEQ ID NO: 219454 - DNA, 543 bp, Artificial Sequence
  derived and/or modified sequence
gtgcttgattgtgagctgctgggaagttgtgactttcattttacctttcgaattcctgggtatatcttgggggctggaggacgtgtctggttattatataggtgcacagctggaggtgagatccacacagctcagaccagctggatcttgctcagtctctgtcagaggaagatcccttggaggaggccccgcagcgacatggagggagctgctttgctgaaaatctttgtcgtctgcatctgaggggacgcactgtgtcctagttgaggctaacagtcagtatccagcctcaacattcagcagaggccccagatcagcgtctgagccaggccaacaatgaccaaggaggatgggatcctgggtgcagctcatcacaagcgtcggggtgcagcaaaaccatccaggctggacagtggctggacagttccaagaaaagaaacgcttcactgaagaagtcattgaatacttccagaagaaagttagcccagtgcatctgaaaatcctgctgactagcgatgaagcctggaagagatttgtgcgtgt

SEQ ID NO: 219455 - DNA, 1823 bp, Artificial Sequence
  derived and/or modified sequence
gtgcttgattgtgagctgctgggaagttgtgactttcattttacctttcgaattcctgggtatatcttgggggctggaggacgtgtctggttattatataggtgcacagctggaggtgagatccacacagctcagaccagctggatcttgctcagtctctgtcagaggaagatcccttggaggaggccccgcagcgacatggagggagctgctttgctgaaaatctttgtcgtctgcatctggtgagcttggctcagagccctgaggtgggagggagggctccctgtctgggctgcacaattgggcagggcttgggctgggccaggagccatgtgggtttttctaggaaccaaaatcacttcccggaattgaccaactggtagactcgcctagaggggacgcactgtgtcctagttgaggctaacagtcagtatccagcctcaacattcagcagaggccccagatcagcgtctgagccaggccaacaatgaccaaggaggatgggatcctgggtgcagctcatcacaagcgtcggggtgcagcaaaaccatccaggctggacagtggctggacagttccaagaaaagaaacgcttcactgaagaagtcattgaatacttccagaagaaagttagcccagtgcatctgaaaatcctgctgactagcgatgaagcctggaagagatttgtgcgtgtggctgaattgcccagggaagaggcagatgctctctatgaagctctgaagaatcttacaccatatgtggctattgaggacaaagacatgcagcaaaaagaacagcagtttagggagtggtttttgaaagtttcctcaaatcagatggaagattcaggagtccatagaaaggcttcgtgtcattgcaaatgagattgaaaaggtccacagaggctgcgtcatcgccaatgtggtgtctggctccactggcatcctgtctgtcattggcgttatgttggcaccatttacagcagggctgagcctgagcattactgcagctggggtagggctgggaatagcatctgccacggctgggatcgcctccagcatcgtggagaacacatacacaaggtcagcagaactcacagccagcaggctgactgcaaccagcactgaccaattggaggcattaagggacattctgcgtgacatcacacccaatgtgctttcttttgcacttgattttgacgaagccacaaaaatgattgcgaatgatgtccatacactcaggagatctaaagccactgttggacgccctttgattgcttggcgatatgtacctataaatgttgttgagacactgagaacacgtggggcccccacccggatagtgagaaaagtagcccggaacctgggcaaggccacttcaggtgtccttgttgtgctggatgtagtcaaccttgtgcaagactcactggacttgcacaagggggcaaaatccgagtctgctgagtcgctgaggcagtgggctcaggagctggaggagaatctcaatgagctcacccatatccatcagagtctaaaagcaggctaggcccaattgttgcgggaagtcagggaccccaaacggagggactggctgaagccatggcagaagaacgtggattgtgaagatttcatggacatttattagttccccaaattaatacttttataatttcctatgcctgtctttaccgcaatctctaaacacaaattgtgaagatttcatggacactgatcacttccccaatcaatacccttgtgatttcttatgcctgtctttactttaatctcctaatcctgtcagctgaggaggatgtatgtcacctc

SEQ ID NO: 219456 - DNA, 575 bp, Artificial Sequence
  derived and/or modified sequence
actgcaggaggtgctggggagcagcgtgtttgctgtgcttgattgtgagctgctgggaagttgtgactttcattttacctttcgaattcctgggtatatcttgggggctggaggacgtgtctggttattatataggtgcacagctggaggtgagatccacacagctcagaccagctggatcttgctcagtctctgtcagaggaagatcccttggaggaggccccgcagcgacatggagggagctgctttgctgaaaatctttgtcgtctgcatctgactcgcctagaggggacgcactgtgtcctagttgaggctaacagtcagtatccagcctcaacattcagcagaggccccagatcagcgtctgagccaggccaacaatgaccaaggaggatgggatcctgggtgcagctcatcacaagcgtcggggtgcagcaaaaccatccaggctggacagtggctggacagttccaagaaaagaaacgcttcactgaagaagtcattgaatacttccagaagaaagttagcccagtgcatctgaaaatcctgctgactagcgatgaagcctggaagag

SEQ ID NO: 219457 - DNA, 520 bp, Artificial Sequence
  derived and/or modified sequence
gtgcttgattgtgagctgctgggaagttgtgactttcattttacctttcgaattcctgggtatatcttgggggctggaggacgtgtctggttattatataggtgcacagctggaggtgagatccacacagctcagaccagctggatcttgctcagtctctgtcagaggaagatcccttggaggaggccccgcagcgacatggagggagctgctttgctgaaaatctttgtcgtctgcatctgcctcaacattcagcagaggccccagatcagcgtctgagccaggccaacaatgaccaaggaggatgggatcctgggtgcagctcatcacaagcgtcggggtgcagcaaaaccatccaggctggacagtggctggacagttccaagaaaagaaacgcttcactgaagaagtcattgaatacttccagaagaaagttagcccagtgcatctgaaaatcctgctgactagcgatgaagcctggaagagatttgtgcgtgtggctgaattgcccagggaagag

SEQ ID NO: 219458 - DNA, 616 bp, Artificial Sequence
  derived and/or modified sequence
acttcccggaattgaccaactggtagactcgcctagaggggacgcactgtgtcctagttgaggctaacagtcagtatccagcctcaacattcagcagaggccccagatcagcgtctgagccaggccaacaatgaccaaggaggatgggatcctgggtgcagctcatcacaagcgtcggggtgcagcaaaaccatccaggctggacagtggctggacagttccaagaaaagaaacgcttcactgaagaagtcattgaatacttccagaagaaagttagcccagtgcatctgaaaatcctgctgactagcgatgaagcctggaagagatttgtgcgtgtggctgaattgcccaggtaacctccatggggttacctccttggggcaccccggtgatgccacccagatctccccgggctagttttctctggcaggcacacctcctccaggcagccccctctgctgggcttgaggatgtccctctcagcagtgcaggaagaatatttcctccaagtgcttcgctggcagtgagtgacctcaggctgaggggagaagaagcccacaagggcaggggaagaggcagatgctctctatgaagctctgaagaatcttacaccata

SEQ ID NO: 219459 - DNA, 324 bp, Artificial Sequence
  derived and/or modified sequence
atgggatcctgggttcagctcatcacctcagtcggcacgagcgggctctttctaggcgtacgcgtccgggaagaaggcgcgggaatgcgatgttcgaaaaccatacaggcgggccaatggctggacagtagtaaaggcccacttggtccttcccccccccctgttcccaccgcaggttactccagctccttttgcgtgcactacgtcaacttgctccccggcgtacttgtcctgtcagttacctctcagtacccacatctctcgatggctctttgccagttagccgcccacgactggccccgtctgtcttgtgtgtgtgtttag

SEQ ID NO: 219460 - DNA, 1044 bp, Artificial Sequence
  derived and/or modified sequence
atgggatcctgggtgcaattaataacaagtgtcggcgttcaacaaaaccatccaggctggaccgttgcaggacaatttcaagagaaaaagagatttaccgaagaggtcatcgaatatttccaaaagaaggtaagtccagttcaccttaaaattctactgacttcggacgaagcctggaagagattcgttcgggtggctgagctgcccagagaagaggctgacgccctttacgaagctctgaaaaacttaacaccatacgtggctatcgaggacaaggacatgcagcagaaagagcaacagtttagagaatggttcctcaagtttcctcagatcaggtggaaaatccaagaaagtattgagcggctaagggtaattgctaatgaaatagaaaaggtacaccgcggatgcgtaattgcaaacgttgtatccgggtcaaccggcatcctctccgtgattggagttatgctggcccccttcaccgccgggctttcactaagcatcaccgcagctggtgttggactcggtattgcttcggccaccgccggaatcgcttcttccatcgtggagaacacgtacaccagatctgcagagctaacggcaagcagactcaccgcaacctccacagatcaactcgaagcactccgagatatcctgcgagatatcacacctaatgtactgtcttttgcattggacttcgatgaggctaccaaaatgatcgcaaatgacgtccataccctgagaagatccaaggctacagtcggcaggcctttgatcgcttggcgatacgtcccaattaacgtcgtggaaaccctccgcactagaggcgctcccacgaggatcgtgcgtaaggtggcaaggaatcttgggaaagcaacttctggtgtgctggtcgtacttgatgtggttaatctggtgcaggactctctcgaccttcacaagggagccaaatcagagtccgcagaaagtcttcggcagtgggcacaagagctcgaagagaacctgaacgagcttactcacattcaccagagcctcaaggcagggtag

SEQ ID NO: 219461 - DNA, 384 bp, Artificial Sequence
  derived and/or modified sequence
atgggtagttgggtccagctgattacctccgtgggtgtgcagcaaaatcaccccggctggacagtggccggtcaattccaagagaagaagcgatttactgaggaggtcatcgaatacttccagaagaaggttagccccgtgcatctgaaaatcctgctcacaagtgatgaggcctggaaaagatttgtccgcgtggccgagctaccacgggaagaagccgacgcattgtatgaggctctgaagaatctaaccccttacgtcgcaatagaagataaagacatgcagcaaaaggaacagcagtttcgcgaatggtttctaaaggttagctcaaaccaaatggaggattccggcgtgcatcgtaaagccagttgtcactgcaaatag

SEQ ID NO: 219462 - DNA, 198 bp, Artificial Sequence
  derived and/or modified sequence
atgggttcttgggttcaactcatcactagcgtaggcgtccagcagaatcaccccggatggactgtggcagggcagttccaagagaaaaagcgcttcaccgaagaagtcatcgaatatttccagaaaaaagtcagcccagtgcacctgaaaattctgttaacctctgatgaggcctggaagaggttcgtcagggtctag

SEQ ID NO: 219463 - DNA, 384 bp, Artificial Sequence
  derived and/or modified sequence
atggggagctgggtgcagctgatcacctctgttggggttcagcagaatcatccaggctggaccgtggccggacaattccaggagaagaaaagatttacagaagaagtgatcgaatacttccagaagaaggttagtcctgttcacctcaaaatactcttgacctccgacgaggcatggaagaggttcgtccgtgtagcagaattgccccgcgaagaagctgacgcactttacgaagctctcaagaatttgacaccttacgttgccatcgaggacaaggatatgcagcagaaagaacagcagtttagagagtggttcttaaaagtttccagtaaccaaatggaggactcaggagtgcaccgcaaggcttcgtgtcactgcaagtag

SEQ ID NO: 219464 - DNA, 183 bp, Artificial Sequence
  derived and/or modified sequence
atgggaagctgggtgcagttgattacttctgtcggagtccaacagaatcaccctggatggacagtcgccgggcaatttcaggagaagaaaagatttacagaagaagttattgagtatttccagaaaaaggtaagtccagtgcatctgaaaattcttttgacttccgatgaagcatggaaatag

SEQ ID NO: 219465 - DNA, 219 bp, Artificial Sequence
  derived and/or modified sequence
atgggctcatgggtgcagttaatcacaagcgtgggagtgcaacaaaatcacccaggatggactgtggctggacaattccaagaaaagaagcgattcacagaggaggttatagagtatttccagaaaaaggtgagccccgttcatctgaaaattttgcttacttcagatgaggcctggaaaagatttgtgcgagtggctgagcttccaagagaggagtag

SEQ ID NO: 219466 - DNA, 213 bp, Artificial Sequence
  derived and/or modified sequence
atgggctcgtgggtgcagctgataacttctgtgggcgtccagcagaatcatcccgggtggaccgtagctggccagtttcaagaaaaaaagcgttttaccgaagaagtgatcgaatatttccaaaagaaagtgtcacccgtgcatctgaagatactccttaccagcgatgaggcttggaaacggtttgtccgcgttgccgagctacctagatag

SEQ ID NO: 219467 - DNA, 324 bp, Artificial Sequence
  derived and/or modified sequence
atgggatcctgggttcagctcatcacctcagtcggcacgagcgggctctttctaggcgtacgcgtccgggaagaaggcgcgggaatgcgatgttcgaaaaccatacaggcgggccaatggctggacagtagtaaaggcccacttggtccttcccccccccctgttcccaccgcaggttactccagctccttttgcgtgcactacgtcaacttgctccccggcgtacttgtcctgtcagttacctctcagtacccacatctctcgatggctctttgccagttagccgcccacgactggcccaggttgtcttgtgtgtgcgtctag

SEQ ID NO: 219468 - DNA, 1044 bp, Artificial Sequence
  derived and/or modified sequence
atgggttcatgggtacagcttatcacaagcgtcggagtacaacagaatcatcccgggtggacagttgccggccaattccaggaaaagaaaagattcacagaagaggtgattgagtatttccagaagaaagtgagtcccgttcacctgaaaatccttcttacttccgatgaagcatggaaacggtttgtccgcgtggccgaattgcctagagaagaggccgatgccctctatgaagccctgaagaacttgactccctatgtcgccattgaagataaggatatgcaacagaaagagcagcagtttagagaatggtttttgaagttcccacaaattcggtggaagatacaggagtcaatcgagcgactgagagttatcgcaaacgaaatcgagaaggttcatagagggtgcgtaatcgccaatgtcgtaagcggatcgactggtatcctgagcgtaatcggcgtgatgctggcccccttcacagccggcttgagtttgtccattacagccgcaggagtcgggttagggatcgcatccgccacggcgggcatcgctagctcaattgttgagaatacatacacacggtctgctgagctcaccgctagcagactaaccgcaaccagtaccgaccagctcgaagcccttagagacatcttaagagacatcacgccgaatgtgctttccttcgcccttgactttgacgaagctaccaagatgatcgctaacgatgtccacaccctgcggcgctccaaagcaaccgttggcagacctcttatcgcttggcgctacgtccccatcaacgtggtcgagacactaagaacccgcggcgctcccacacgaatcgtgaggaaagtagcccgcaacctgggcaaggcaacttccggagttctggttgtcttggatgttgtcaaccttgttcaagacagtctcgatctacacaagggcgctaagtccgagtctgccgaatctctcaggcagtgggcacaggagctggaagaaaatttgaacgaactcacccacattcaccaaagcctaaaggcaggttag

SEQ ID NO: 219469 - DNA, 384 bp, Artificial Sequence
  derived and/or modified sequence
atgggtagttgggtccagctgattacctccgtgggtgtgcagcaaaatcaccccggctggacagtggccggtcaattccaagagaagaagcgatttactgaggaggtcatcgaatacttccagaagaaggttagccccgtgcatctgaaaatcctgctcacaagtgatgaggcctggaaaagatttgtccgcgtggccgagctaccacgggaagaagccgacgcattgtatgaggctctgaagaatctaaccccttacgtcgcaatagaagataaagacatgcagcaaaaggaacagcagttcagagagtggtttctaaaggtcagctcaaatcagatggaagattcaggtgttcacaggaaagctagttgccattgtaagtag

SEQ ID NO: 219470 - DNA, 384 bp, Artificial Sequence
  derived and/or modified sequence
atgggcagctgggtacagctcatcaccagcgtaggtgtgcagcaaaaccaccctggatggactgtggctggtcagtttcaggaaaagaagaggttcactgaggaggtcatcgaatactttcagaaaaaagttagtccggttcacttgaagatacttttgacgtctgatgaagcttggaagaggtttgtcagggtggccgaactgcccagggaggaagctgacgccctgtacgaagctttgaagaaccttacaccctatgtggctatagaagacaaggatatgcagcagaaagaacaacagtttagagaatggttcttgaaggtctctagtaatcaaatggaagactccggtgtgcatcgaaaggccagctgtcactgcaaatag

SEQ ID NO: 219471 - DNA, 1044 bp, Artificial Sequence
  derived and/or modified sequence
atgggcagctgggtgcagctgatcaccagcgtgggcgtgcagcagaaccaccccggctggaccgtggccggccagttccaggagaagaagagattcaccgaggaggtgatcgagtacttccagaagaaggtgagccccgtgcacctgaagatcctgctgaccagcgacgaggcctggaagagattcgtgagagtggccgagctgcccagagaggaggccgacgccctgtacgaggccctgaagaacctgaccccctacgtggccatcgaggacaaggacatgcagcagaaggagcagcagttcagagagtggttcctgaagttcccccagatcagatggaagatccaggagagcatcgagagactgagagtgatcgccaacgagatcgagaaggtgcacagaggctgcgtgatcgccaacgtggtgagcggcagcaccggcatcctgagcgtgatcggcgtgatgctggcccccttcaccgccggcctgagcctgagcatcaccgccgccggcgtgggcctgggcatcgccagcgccaccgccggcatcgccagcagcatcgtggagaacacctacaccagaagcgccgagctgaccgccagcagactgaccgccaccagcaccgaccagctggaggccctgagagacatcctgagagacatcacccccaacgtgctgagcttcgccctggacttcgacgaggccaccaagatgatcgccaacgacgtgcacaccctgagaagaagcaaggccaccgtgggcagacccctgatcgcctggagatacgtgcccatcaacgtggtggagaccctgagaaccagaggcgcccccaccagaatcgtgagaaaggtggccagaaacctgggcaaggccaccagcggcgtgctggtggtgctggacgtggtgaacctggtgcaggacagcctggacctgcacaagggcgccaagagcgagagcgccgagagcctgagacagtgggcccaggagctggaggagaacctgaacgagctgacccacatccaccagagcctgaaggccggctag

SEQ ID NO: 219472 - DNA, 384 bp, Artificial Sequence
  derived and/or modified sequence
atgggcagctgggtgcagctgatcaccagcgtgggcgtgcagcagaaccaccccggctggaccgtggccggccagttccaggagaagaagagattcaccgaggaggtgatcgagtacttccagaagaaggtgagccccgtgcacctgaagatcctgctgaccagcgacgaggcctggaagagattcgtgagagtggccgagctgcccagagaggaggccgacgccctgtacgaggccctgaagaacctgaccccctacgtggccatcgaggacaaggacatgcagcagaaggagcagcagttcagagagtggttcctgaaggtgagcagcaaccagatggaggacagcggcgtgcacagaaaggccagctgccactgcaagtag

SEQ ID NO: 219473 - DNA, 198 bp, Artificial Sequence
  derived and/or modified sequence
atgggcagctgggtgcagctgatcaccagcgtgggcgtgcagcagaaccaccccggctggaccgtggccggccagttccaggagaagaagagattcaccgaggaggtgatcgagtacttccagaagaaggtgagccccgtgcacctgaagatcctgctgaccagcgacgaggcctggaagagattcgtgagagtgtag

SEQ ID NO: 219474 - DNA, 183 bp, Artificial Sequence
  derived and/or modified sequence
atgggcagctgggtgcagctgatcaccagcgtgggcgtgcagcagaaccaccccggctggaccgtggccggccagttccaggagaagaagagattcaccgaggaggtgatcgagtacttccagaagaaggtgagccccgtgcacctgaagatcctgctgaccagcgacgaggcctggaagtag

SEQ ID NO: 219475 - DNA, 219 bp, Artificial Sequence
  derived and/or modified sequence
atgggcagctgggtgcagctgatcaccagcgtgggcgtgcagcagaaccaccccggctggaccgtggccggccagttccaggagaagaagagattcaccgaggaggtgatcgagtacttccagaagaaggtgagccccgtgcacctgaagatcctgctgaccagcgacgaggcctggaagagattcgtgagagtggccgagctgcccagagaggagtag

SEQ ID NO: 219476 - DNA, 213 bp, Artificial Sequence
  derived and/or modified sequence
atgggcagctgggtgcagctgatcaccagcgtgggcgtgcagcagaaccaccccggctggaccgtggccggccagttccaggagaagaagagattcaccgaggaggtgatcgagtacttccagaagaaggtgagccccgtgcacctgaagatcctgctgaccagcgacgaggcctggaagagattcgtgagagtggccgagctgcccagatag

SEQ ID NO: 219477 - RNA, 198 nt, Artificial Sequence
  derived and/or modified sequence
auggguucuuggguucaacucaucacuagcguaggcguccagcagaaucaccccggauggacuguggcagggcaguuccaagagaaaaagcgcuucaccgaagaagucaucgaauauuuccagaaaaaagucagcccagugcaccugaaaauucuguuaaccucugaugaggccuggaagagguucgucagggucuag

SEQ ID NO: 219478 - RNA, 183 nt, Artificial Sequence
  derived and/or modified sequence
augggaagcugggugcaguugauuacuucugucggaguccaacagaaucacccuggauggacagucgccgggcaauuucaggagaagaaaagauuuacagaagaaguuauugaguauuuccagaaaaagguaaguccagugcaucugaaaauucuuuugacuuccgaugaagcauggaaauag

SEQ ID NO: 219479 - RNA, 219 nt, Artificial Sequence
  derived and/or modified sequence
augggcucaugggugcaguuaaucacaagcgugggagugcaacaaaaucacccaggauggacuguggcuggacaauuccaagaaaagaagcgauucacagaggagguuauagaguauuuccagaaaaaggugagccccguucaucugaaaauuuugcuuacuucagaugaggccuggaaaagauuugugcgaguggcugagcuuccaagagaggaguag

SEQ ID NO: 219480 - RNA, 213 nt, Artificial Sequence
  derived and/or modified sequence
augggcucgugggugcagcugauaacuucugugggcguccagcagaaucaucccggguggaccguagcuggccaguuucaagaaaaaaagcguuuuaccgaagaagugaucgaauauuuccaaaagaaagugucacccgugcaucugaagauacuccuuaccagcgaugaggcuuggaaacgguuuguccgcguugccgagcuaccuagauag

SEQ ID NO: 219481 - protein, 366 aa, Artificial Sequence
  derived and/or modified sequence
MDSDDEMVEEAVEGHLDDDGLPHGFCTVTYSSTDRFEGNFVHGEKNGRGKFFFFDGSTLEGYYVDDALQGQGVYTYEDGGVLQGTYVDGELNGPAQEYDTDGRLIFKGQYKDNIRHGVCWIYYPDGGSLVGEVNEDGEMTGEKIAYVYPDERTALYGKFIDGEMIEGKLATLMSTEEGRPHFELMPGNSVYHFDKSTSSCISTNALLPDPYESERVYVAESLISSAGEGLFSKVAVGPNTVMSFYNGVRITHQEVDSRDWALNGNTLSLDEETVIDVPEPYNHVSKYCASLGHKANHSFTPNCIYDMFVHPRFGPIKCIRTLRAVEADEELTVAYGYDHSPPGKSGPEAPEWYQVELKAFQATQQK

SEQ ID NO: 219482 - DNA, 1101 bp, Artificial Sequence
  derived and/or modified sequence
atggactcagatgacgaaatggtcgaagaggcagtcgaaggtcaccttgatgacgacggattgccccatgggttctgcaccgtgacatatagttcaacggatcggtttgaagggaattttgtgcacggcgaaaagaacggccgcgggaagttttttttctttgatgggtctaccctcgaaggatattatgttgacgatgccctccagggccaaggagtgtacacttatgaggatggcggcgtcctgcagggtacctatgtggatggcgagctgaatggccccgcacaggagtacgatactgacggacgattaatattcaagggtcagtataaagataatatcagacacggagtatgttggatttattatcccgatggcggatccttggtcggcgaggttaacgaggatggggaaatgacaggcgagaaaatcgcctacgtttatccagatgagcgcaccgcgttgtatgggaaatttatcgacggcgagatgatcgaggggaaactggcgaccctcatgtccacagaggaagggcggcctcatttcgaacttatgccgggtaacagtgtctaccactttgacaagagcacatcgtcctgcatctctactaatgccctgcttccagacccctacgagtcagagagagtgtatgtagcagagtctttaatctctagcgcaggcgaggggctattcagcaaggtggctgtgggtccgaacactgtcatgtctttttacaacggggtcagaattacacaccaagaagtggattccagggattgggcgcttaatggcaataccttgagcttagacgaagaaacagttattgacgtgccggagccgtataatcatgtctctaaatactgtgccagcctgggacataaagccaatcacagtttcacccccaactgcatctacgatatgtttgttcatcccagatttgggcccatcaaatgtatccgcactctacgggccgtggaggccgatgaagaactgacagtcgcctacgggtacgatcattcacctcctggcaaaagcgggccagaagccccggaatggtaccaagtggaactcaaagcctttcaagccacgcagcagaagtag

SEQ ID NO: 219483 - DNA, 1101 bp, Artificial Sequence
  derived and/or modified sequence
atggacagtgatgatgagatggtggaggaggccgtggagggccacctggatgatgatggcctgccccacggcttctgcaccgtgacctacagcagcacagacagatttgagggcaactttgtgcacggggagaagaatggccggggcaagttcttcttctttgatggcagcaccctggagggctactacgtggatgatgccctgcagggccagggcgtgtacacctatgaagatggcggcgtgctgcagggcacctacgtggatggagagctgaatggacctgcccaggagtatgacacagatggccgcctcatcttcaagggccagtacaaggacaacatcagacatggagtgtgctggatctactacccagatggcggcagcctggtgggggaggtgaatgaagatggagagatgaccggggagaagatcgcctacgtgtacccagatgagaggacagccctgtatggcaagttcattgatggagagatgattgagggcaagctggccaccctgatgagcacagaggagggccggccccactttgagctgatgcctggcaacagcgtgtaccactttgacaagagcaccagcagctgcatcagcaccaatgccctgctgcctgacccctatgaaagtgagcgggtgtatgtggccgagagcctcatcagcagcgctggggagggcctcttcagcaaggtggccgtgggccccaacacagtgatgtccttctacaacggggtgcgcatcacccaccaggaggtggacagccgggactgggccctgaatggaaacaccctgagcctggatgaggagaccgtgattgatgtgcctgagccctacaaccacgtgtccaagtactgtgccagcctgggccacaaggccaaccacagcttcacccccaactgcatctatgacatgtttgtgcaccccaggtttggccccatcaagtgcatccgcaccctgcgggctgtggaggctgatgaggagctgactgtggcctacggctatgaccacagccccccaggcaagagcggccctgaggcccctgagtggtaccaggtggagctgaaggccttccaggccacccagcagaagtag

SEQ ID NO: 219484 - DNA, 1101 bp, Artificial Sequence
  derived and/or modified sequence
atggacagcgacgacgagatggtggaggaggccgtggagggccacctcgacgacgacggcctccctcacggcttctgtacagtgacatactccagcactgatcggttcgaaggaaactttgtgcatggcgagaagaacggcaggggcaaattcttttttttcgacggaagcacattggaagggtactatgtagacgatgctctgcagggacaaggcgtgtatacgtatgaggacggtggagtgctccagggaacttacgttgacggagagctgaatggacctgctcaggagtacgacaccgatggacgattgatttttaaaggccagtataaggacaatataaggcatggcgtctgctggatctattacccggatgggggaagtctagtgggagaagtaaacgaagacggcgaaatgaccggcgaaaagatcgcttatgtgtatcctgacgagcggaccgccctgtacggcaagtttattgacggggagatgatcgagggcaaactggccacactgatgagtaccgaggaaggacgcccacatttcgaattgatgcccggaaattctgtctatcacttcgacaagtcaacatcaagctgcatttccacaaacgcgctcctgccagacccctatgagtctgagcgggtgtacgtcgcggagtctctcatttcgtccgcgggtgaagggctgtttagcaaggtcgccgtggggcctaacaccgtgatgtcgttttataatggagtccgcatcactcaccaggaggtcgattctcgcgactgggccttaaatggaaacactttgtctttagatgaggagaccgtcatcgacgttcctgagccctataaccacgtctccaaatactgtgcttctctggggcacaaagcgaatcactccttcacccccaactgcatctacgatatgttcgtacacccccggttcgggcccatcaagtgcattcggacgctgcgcgccgtagaagccgacgaggaactgactgttgcgtatgggtatgatcactctccaccaggtaagagcggaccagaggcccctgaatggtaccaggtggagctgaaggcttttcaggccacacagcaaaaatag

SEQ ID NO: 219485 - DNA, 1101 bp, Artificial Sequence
  derived and/or modified sequence
atggacagcgacgatgaaatggtggaagaagccgtcgaaggccacctggacgacgatgggctcccacatggattttgtaccgtgacctacagcagtaccgacagatttgagggaaactttgtacacggggaaaagaacggccgtgggaaattctttttcttcgatggctcaacactcgagggctattacgtcgacgacgccctgcaggggcagggggtgtatacatacgaggatgggggagtcctgcaaggcacatatgtcgacggagaacttaatggccctgcacaggaatatgataccgacggcaggctaatttttaagggccagtataaagataatatcagacatggcgtgtgttggatttattaccccgatggcggatctttagtgggtgaggttaatgaagacggcgaaatgacaggagaaaagatagcatatgtctaccctgatgagcgcactgccctgtacggaaagttcattgacggtgagatgatcgaaggcaaattagcaacattgatgtcaactgaagagggtcgccctcacttcgagctcatgcctggcaattccgtgtaccactttgataagtctaccagctcttgcatctccacaaacgcacttctgcccgatccttacgagtccgagagagtttatgtcgccgaatccctgatcagttcagccggagaggggctgttcagtaaagttgctgtgggacctaacactgtgatgtccttttacaacggagtgaggatcactcaccaggaagtggactcacgcgactgggcgctgaacggcaacaccctgtcactggatgaggaaacagttattgacgtgcccgagccctacaaccatgtgagcaagtactgtgcatcactggggcacaaggcgaaccacagcttcaccccaaattgtatttacgatatgtttgtgcatccacgatttggaccaatcaaatgtatacgcactctccgcgctgtggaagctgacgaggaattgacggtcgcctacggctatgaccattcccccccaggaaagtctggacccgaagccccagagtggtatcaggttgagctgaaggcttttcaggccacgcagcaaaagtag

SEQ ID NO: 219486 - DNA, 7365 bp, Artificial Sequence
  derived and/or modified sequence
gggaacacggacagtgcacgacggactttcaagttgctcccggcacaacgggaggtcgggagctcggagcccctacgggcggtccaagtgtccgcgagaagcccgcagcgcccaggaccgcgttgagcgctcggggcgcgccaagccgcacctaagcaaaagagaaacgctgacgggccggaggcgggttggctgggacgcggaatacgcgcggccccggagcgcctttcgttttaaggagccttacttctggaaagggacagggaactgtcaatcagcgagggagggagcgcaccggcgctgggtgatgtcagcggatcagctgctcgataacaaagagagggtattacaggagaaagttgcagcagcggcagcggccaaggcggcacaccggagcctccgaggcgaggggcaagtgggcgaagggaggggggacgacggctgctgccgcagcagctgaaggccaaggaattgaaagggctgtagggggaggcagtgcgagccagccccgactgctcctcctcttcctcctcctcctccaaactcgcgagccccagagctcgctcagccgccgggagcacccagagggacgggaggcagccgcgcagccccgagctgggcagtgtccccagccgccatggatagcgacgacgagatggtggaggaggcggtggaagggcacctggacgatgacggattaccgcacgggttctgcacagtcacctactcctccacagacagatttgaggggaactttgttcacggagaaaagaacggacgggggaagttcttcttctttgatggcagcaccctggaggggtattatgtggatgatgccttgcagggccagggagtttacacttacgaagatgggggagttctccagggcacgtatgtagacggagagctgaacggtccagcccaggaatatgacacagatgggagactgatcttcaaggggcagtataaagataacattcgtcatggagtgtgctggatatattacccagatggaggaagccttgtaggagaagtaaatgaagatggggagatgactggagagaagatagcctatgtgtaccctgatgagaggaccgcactttatgggaaatttattgatggagagatgatagaaggcaaactggctacccttatgtccactgaagaagggaggcctcactttgaactgatgcctggaaattcagtgtaccactttgataagtcgacttcatcttgcatttctaccaatgctcttcttccagatccttatgaatcagaaagggtttatgttgctgaatctcttatttccagtgctggagaaggacttttttcaaaggtagctgtgggacctaatactgttatgtctttttataatggagttcgaattacacaccaagaggttgacagcagggactgggcccttaatgggaacaccctctcccttgatgaagaaacggtcattgatgtgcctgagccctataaccacgtatccaagtactgtgcctccttgggacacaaggcaaatcactccttcactccaaactgcatctacgatatgtttgtccacccccgttttgggcccatcaaatgcatccgcaccctgagagcagtggaggccgatgaagagctcaccgttgcctatggctatgaccacagcccccccgggaagagtgggcctgaagcccctgagtggtaccaggtggagctgaaggccttccaggccacccagcaaaagtgaaaggcctggctttggggttcagagacctggaatagaaacttggatctatgcactacgtttatctgacaatgggacaaccagggactgctcatgctgtgacgtcacatcctctcaccatgcgttagcaacgactttctcgcatactaactaggtttgactgtattactcataccagatttaaaattagctagccttgcaacaacgtcctactgagaggtattgtcgagcatttgacataagacagcgtgatgttctttggtggttcaagtctaaatctgtaccacattcggagatgccaaatgattagactgaaacagggaaacggggtttttcagtcatttttagtcagtggtttttccatagtgcttttttcctatggccagtgcaaattgtgttagcacacttgcatatgtgccgtattaagggttgacaattactacatctttattctctaaatgtagtataatttgccttttaacctttgatctgtatcttgcaatagaatggctttggtttttttcttagtaaataggagcccacttctaaagtcatttcacccctcagccctattctctttcttagataccctttacaagagaaaacttccaaatggatttttgcatcaatagcagtgtgtaggtctctctggttctttctatatcatcattttattattatgtcctaatataaagtactggctcatagggccagggtattattatagaatattattctcgcatgtaaacaaagatatctttgctttaagatgtgagaagaaatgaatttactttgtttgcattaagttatggaagagttgtaatatatactttaagaaagaagagaagaaaactagtatctctaagcggtaactatggcaattttgcaatattttcagtagtgctagtaattttttcctccttgagtacacattaaatgtacataacatagcgcggtcaggcttgtggcacagtgcattgaattcaaaagtcaaacagcaaatttgaattctaacagaattcaaaaaaaaatttttttagtcagtactactaaggcagacacactgattactaggtacaaatcaaaccttgatgctaaaactcttcatcattgtaatttcaaagcacttacctgcttcaaaacattgtaaactaagactgaacacctgtatagtttaaaagcaacactatcaatagcatttcagccattttgccagccatgtgtaatcacaactgcagaaataaggagaaaacccctgtttttttagtttagctaattagatctgtaacatcactgggattgctctgaatgaatcctgagagttttgttttttataagcaccctcaccacatgccatagctttgtctcttttagacacctcgatgcagcggctggaaggactggagagcagctgttgtgctgatctgtagctgtcagctgtgattcctgtcacctgagtcagtttggtctggaaagcgaaggccttccaagctgtagcagatagtgagctccagctgatgagagaaggcttcagtggaagaagagtgaggacataggcagaaggaagtttgctatttcttgtcagttgcacattgctttatgaagactacaacaaaagtgcttaatcccaggctgctcatgactttcatttcaggtggcccttgggcacattgacagagttgcccttcccttctttgcaacaccaggcttcctagagcacccggttgcatgctttgcagctaggtggcagtggtttcagggagatccagttggatccctgcttgaaagcttaagccaatggttcacccatgagaggaagttgtcagtgcttccaggaagattgcccaccaaaggaactgaatagtttttagatttaaaggcaccaggatagggtcactcttactctgtagaaagagaccgttctatacactgtgacggatgggccagggcctctggacttgcattctgataggtgctttaatttaaatgtgcccaaagggagtgactgtcttcaggagaaagatggcttgcattaacctcgatcaagtgggttgtgcagccaggtcagggaatacggtcagggagaggatagtgctggtcatgcccccgatgcagctatgctctgaatgatttcattcctgagagtgatagcattctggtcctggctgcagtggggtacaatttacgtcctaagtgggggctactctaattatcccattcaaatggaatttttttcaacattggatagaaggaattgaagagttgtaagtagtgattagtctgctaatcagttcttcagatgagatattgaatggtaacactctgagcttaaaactcagcagtgtgtctgtgacctccacgcaaatcagaggaagcaatgcatccacgctgagcctcaccatgtcttcctcccaactctcttcatactctctgtgtcttccagctcttctttctctggccggctctctttcctcttctctctgcatatgtgagaacgcctgggcatcctgggtaacagcagccccagctgccctctcctgttccctgttccaagtcccctgcactgacctttcttgagtctctctggctctgtgcatgtctttgggactctgctcatctggcttttcctctgtgtgtgcctctctgtttgcttatgtctctggctctgtcttccccacccctcccctcacacacacacatactcccaaatgtaaggctctgtggcaggttggaatcggagtaaggcttgagattcactgagttctgtaggtagggaaagaagtcaagggagtggaggttctataaggaattaacagctgaggacggaagggtttgtttcccgtttgaacctaaacgcaagtggaaaagaatactcagaatgtatttttctactttacatctgctggggaaggaaatgtgtcaggaagccgctgcatctggtcatttcatcgcatcagaatcacagcagacgtggaagattccatgtggtggggaataaagaaataactttatgctctcctgaaaaacagcgggagcctatgtgtgtgtgcgacactgtaatctcaaggagattcactcagagctgtctcagtccaactcctgcatgaccagatcttcccttagcatcttttctgtgatgaaatattatcttgtgttagagttaggaataggaactaacctgtaggagcatgtccccaaatggacatttgaatggactaacaaaaacaactggaaagactgaatttccgacacaaaggaatgatgggatcaaaaagaaagcagtgaggagttcttgagtcttgtagtacctattcttattttaacttgcttcatccttgatctacctgagacactaagaaggaaattagttttccaagagctctttgaacctgtctaggactgtagttaaacctatttgccctatgggggttcttcacactcgaaaaactatttccttatcaccaacgacccacccagaaaggccaatgaggccaaatgtaacaatttttaacatttaaatataactattaaaattgcattaattgtgaacagtgaattaaagggttgtcttctccaggagacagtatgtggcacttttcgtaaatttcatttaatatataaaaatttaaatcactcactgcaacatgcatttaaaatcttccaagaaggtagaggtatcattttctgttttgctttgttttaaaacagttgcctcaagcttctgtcttaagagtagtgacttagaatccagatatcttttgttttagaaaaacaagcaaaactatgttgcaagactgacagttgtaatgtttatttgccacagatcaaaggttcacaaagtatatcaaatttacatctacttggggtaccttgatagattattattgtttttcttttatctttcccttcaggaatttggaaactcgttgtcactttttttaattttaaaaatactaaattgtaatagttttcttttgccaaatgtgtgcgtacatattcaaagcaatgaaactatttcaagccatacaaccacaggggtgggaacccttttcacaaattttaatgtgtttgtatgtaaatagatgtttgtatgaaatattttcatgatagaatgaatatatttaaatgaagttgaattattccagtgctacttaaacacattacaaaaattttggtgagaattatctgagtctattgagatgtaatgcagatcaattttgatttttaaaaatcaaaagcctacaataactctgactctcagcaacttcctcggcgttgttgcacctgacgtggagagagctcgtaggcttccccagtgcctcagccgcttcctggtggaagttaggtgctaatggaggtgtgttcaccttttagtgatatcactgcaggcctttgaggggcctgagagtgaatcagaggcattagagacaccggtgcagttatctggagcacaatttctttgcagggcagcagaatcagaagccagacttggccatgtgaacctcgaaactcggtttcccggccgccatcaaccgccacccttactgcctagtcacacacgtcagggaggctgccctcagtggagttggggttgagaccccagggtgggacttcacagttttgccagcaatctctaccttctgacttctgcctcgcagagaggaaggagaggggagcatctggcaaggggcccatttctcagcacagtacatttcctgtctcagctctggaagactatgcacccaagcaccaaacttccaaccagagagagagacgtcctccgataacaaaaatccttgcttcctctgtctgtgactttacacacagttgttcaaagttgttaaatgtcaagagtcaatcacatccctaggacatacctcccaactctcctgactcttatgttattgaaaaaacaaacaaacaaaaactcctttatgatgatattcaacttgagtggggttttttttccactttggtcctggatataatgaaatgatacatattaggataaattttcactgtgtatagtagcaatacgaacacacatgccaatgtatcaacatatctacttggttacattttggtttatgataattaaccttgattcatgtattgggaagctacagggactacgtaatacctgcttatcacataggaaaattatgtccatgattctgagctcccttcttcaaaagtttcctcctgggtgttctatgttctctctttatcctgaaatacatttattaggttgtgaggtatgttgaagaagtagaagccaggggtatgctttcagcatttattgcaaccaaaagttaaccccatcacggttaacgagcatctttggtctcttgtggaatttgaactaaaactatgagccttattcaatatctataattctatgatttttttaaattatgggaaattaatgaaagatgtttacatgaataatgtttgcccttactgtgttatgaatgagttttttgtagtgtgtctgggtgcatgatgcaagagagtaggaaaaatgtttctgaaacaaaacttgacaaatatttgtaatgaaagtaaatttaaagattgctataattgcgctatagaaacaatgcaagtattaaacaaaatatacaatcatc

SEQ ID NO: 219487 - DNA, 1101 bp, Artificial Sequence
  derived and/or modified sequence
atggacagcgacgacgagatggtggaggaggccgtggagggccacctggacgacgacggcctgccccacggcttctgcaccgtgacctacagcagcaccgacagattcgagggcaacttcgtgcacggcgagaagaacggcagaggcaagttcttcttcttcgacggcagcaccctggagggctactacgtggacgacgccctgcagggccagggcgtgtacacctacgaggacggcggcgtgctgcagggcacctacgtggacggcgagctgaacggccccgcccaggagtacgacaccgacggcagactgatcttcaagggccagtacaaggacaacatcagacacggcgtgtgctggatctactaccccgacggcggcagcctggtgggcgaggtgaacgaggacggcgagatgaccggcgagaagatcgcctacgtgtaccccgacgagagaaccgccctgtacggcaagttcatcgacggcgagatgatcgagggcaagctggccaccctgatgagcaccgaggagggcagaccccacttcgagctgatgcccggcaacagcgtgtaccacttcgacaagagcaccagcagctgcatcagcaccaacgccctgctgcccgacccctacgagagcgagagagtgtacgtggccgagagcctgatcagcagcgccggcgagggcctgttcagcaaggtggccgtgggccccaacaccgtgatgagcttctacaacggcgtgagaatcacccaccaggaggtggacagcagagactgggccctgaacggcaacaccctgagcctggacgaggagaccgtgatcgacgtgcccgagccctacaaccacgtgagcaagtactgcgccagcctgggccacaaggccaaccacagcttcacccccaactgcatctacgacatgttcgtgcaccccagattcggccccatcaagtgcatcagaaccctgagagccgtggaggccgacgaggagctgaccgtggcctacggctacgaccacagcccccccggcaagagcggccccgaggcccccgagtggtaccaggtggagctgaaggccttccaggccacccagcagaagtag

SEQ ID NO: 219488 - protein, 428 aa, Artificial Sequence
  derived and/or modified sequence
MGGLFSRWRTKPSTVEVLESIDKEIQALEEFREKNQRLQKLWVGRLILYSSVLYLFTCLIVYLWYLPDEFTARLAMTLPFFAFPLIIWSIRTVIIFFFSKRTERNNEALDDLKSQRKKILEEVMEKETYKTAKLILERFDPDSKKAKECEPPSAGAAVTARPGQEIRQRTAAQRNLSPTPASPNQGPPPQVPVSPGPPKDSSAPGGPPERTVTPALSSNVLPRHLGSPATSVPGMGLHPPGPPLARPILPRERGALDRIVEYLVGDGPQNRYALICQQCFSHNGMALKEEFEYIAFRCAYCFFLNPARKTRPQAPRLPEFSFEKRQVVEGSSSVGPLPSGSVLSSDNQFNEESLEHDVLDDNTEQTDDKIPATEQTNQVIEKASDSEEPEEKQETENEEASVIETNSTVPGADSIPDPELSGESLTAE

SEQ ID NO: 219489 - protein, 305 aa, Artificial Sequence
  derived and/or modified sequence
MEKETYKTAKLILERFDPDSKKAKECEPPSAGAAVTARPGQEIRQRTAAQRNLSPTPASPNQGPPPQVPVSPGPPKDSSAPGGPPERTVTPALSSNVLPRHLGSPATSVPGMGLHPPGPPLARPILPRERGALDRIVEYLVGDGPQNRYALICQQCFSHNGMALKEEFEYIAFRCAYCFFLNPARKTRPQAPRLPEFSFEKRQVVEGSSSVGPLPSGSVLSSDNQFNEESLEHDVLDDNTEQTDDKIPATEQTNQVIEKASDSEEPEEKQETENEEASVIETNSTVPGADSIPDPELSGESLTAE

SEQ ID NO: 219490 - DNA, 1287 bp, Artificial Sequence
  derived and/or modified sequence
atggggggactgttctcccgctggagaactaagccaagcaccgtggaagtgttagagtcaatcgataaagagattcaggccttagaagaatttcgggagaagaaccagcgcctgcagaaactctgggtggggagactcattctctacagttcggtattgtatctttttacttgtttgattgtgtatctctggtaccttccagacgagttcacagcccgcctcgccatgacacttccttttttcgccttcccgttgatcatatggtccattagaacagtcatcatcttctttttttcaaaacggacagagaggaacaacgaggctctcgatgacttgaaatcacagcgtaagaaaattctcgaagaagtaatggagaaagagacttataagaccgccaagctcatactggagaggtttgatcctgacagtaaaaaggctaaagagtgcgaacctcccagcgccggggccgctgttacggcacgccctggtcaggagatcagacagcggactgccgctcaacggaatttgagcccaacaccggcctctcctaatcaggggccccccccacaggtccccgtcagtccagggccacctaaggactctagtgcacccggtggcccgccagagcggacggttacccctgcactgagttcaaatgtgctccctagacacctgggttccccagctacctctgttcccgggatgggtctccaccctcctggaccccccctggcccgtcccattttgcctcgcgaacgaggagcgctggatagaattgtggaatacttggtgggagacgggccacagaaccgctacgccctgatctgccaacaatgcttctctcacaatggtatggcgctcaaggaagagttcgagtacatagcatttcgctgtgcttactgcttttttctaaatcccgcgcggaaaacccggccccaggccccgcggctgcctgaatttagttttgagaaacgacaagtggtggaagggtcctccagtgtcggccctttaccctcggggagcgttttaagcagcgacaatcagttcaatgaggagtccctggaacacgatgtcctggatgacaacacggaacaaacagacgacaaaatccccgccacagagcaaacgaaccaggtgatagaaaaggcttctgacagtgaggaacctgaggaaaagcaggagacagagaatgaggaagccagtgttattgaaacgaattccaccgtccccggagccgacagcatccccgacccagaactctccggcgagtcactgacggcagaatag

SEQ ID NO: 219491 - DNA, 1287 bp, Artificial Sequence
  derived and/or modified sequence
atgggcggcctcttcagccgctggaggaccaagcccagcacagtggaggtgctggagagcattgacaaggagatccaggccctggaggagttccgggagaagaaccagaggctgcagaagctgtgggtgggccgcctcatcctgtacagctctgtgctgtacctgttcacctgcctgattgtgtacctgtggtacctgcctgatgagttcaccgcccggctggccatgaccctgcccttctttgccttccccctcatcatctggagcatccgcaccgtcatcatcttcttcttcagcaagaggacagagaggaacaatgaggccctggatgacctgaagagccagaggaagaagatcctggaggaggtgatggagaaggagacctacaagacagccaagctgatcctggagagatttgatcctgacagcaagaaggccaaggaatgtgagcccccatctgctggagctgctgtgacagcccggcccggccaggagatccggcagaggacagctgcccagaggaacctgagccccaccccagccagccccaaccagggccccccaccccaggtgcctgtgtccccaggcccccccaaggacagcagcgcccctgggggccccccagagaggacagtgaccccagccctgagcagcaatgtgctgcccaggcacctgggcagccctgccacctctgtgcccggcatgggcctgcaccccccaggcccccccctggcccggcccatcctgccccgggagcggggggccctggacagaattgtggagtacctggtgggagatggcccccagaacagatatgccctgatctgccagcagtgcttcagccacaacggcatggccctgaaggaggagtttgagtacatcgccttccgctgtgcctactgcttcttcctgaacccagccaggaagacccggccccaggccccccggctgcctgagttctcctttgagaagaggcaggtggtggagggcagcagctctgtgggccccctgcccagcggctctgtgctgagcagtgacaaccagttcaatgaggagagcctggagcatgatgtgctggatgacaacacagagcagacagatgacaagatcccagccacagagcagaccaaccaggtgattgagaaggccagtgacagcgaggagcctgaggagaagcaggagacagaaaatgaggaggcctctgtgattgagaccaacagcacagtgcctggagctgacagcatcccagaccctgagctgtctggagagagcctgacagctgagtag

SEQ ID NO: 219492 - DNA, 1287 bp, Artificial Sequence
  derived and/or modified sequence
atgggcggcctgttcagccggtggcggaccaagcccagcaccgtggaggtcctggaaagtatcgataaggaaattcaggcgcttgaagaattccgtgaaaagaaccaacgactccagaaactatgggttgggagactcatcctctatagctcagtcctgtatttgttcacgtgtctgatcgtgtacctctggtacctgcccgatgagtttactgccagactagcaatgacactgcccttcttcgcgttccccctgattatctggagcatcaggaccgttattattttttttttctccaaacgtaccgagaggaataatgaggccctggatgacctcaagagccagagaaagaaaattctagaagaggtcatggagaaagagacttacaaaaccgctaagcttatacttgagcgattcgacccagacagcaagaaagccaaggaatgcgaacctccgagcgccggagccgcagtcaccgccaggccaggtcaggagattagacagaggacagccgcccaaaggaatttaagcccaacgcccgcatcacctaatcaaggccctcccccccaagtaccagtgagccccggccctccgaaggattcgtccgcccctgggggacctcccgaacgcacagtcacaccggccctgtccagtaacgttttaccccgtcatctaggatctccagccactagtgtccccggcatgggcctgcacccacccggaccgcctctcgccagaccaatactgccccgcgagagaggagcgctagatcgcatcgtggagtacctcgtgggggacggcccacagaatcggtatgcgctgatctgtcagcagtgcttcagccataatgggatggccttaaaagaagaatttgagtacatcgcattcaggtgcgcttactgtttttttcttaatcccgcccgaaagaccaggccacaggctccccgcttgccagagtttagtttcgaaaaacggcaagtggtggaaggatcctcgtccgtgggacccctgccttccgggagcgtgctgtcttcagataaccagtttaacgaagaaagcttggaacacgatgttcttgacgataacacggaacagactgatgacaaaatcccagctactgaacagacgaatcaggtgattgaaaaagcaagtgactccgaggagcccgaagagaagcaggaaaccgaaaatgaggaggcatcagtcattgaaaccaacagtaccgtgcccggtgccgattccatccccgaccctgagttgagcggcgagtcattgacagcagaatag

SEQ ID NO: 219493 - DNA, 1287 bp, Artificial Sequence
  derived and/or modified sequence
atgggtggcctgttttctcggtggagaactaagccttcaacggtggaggtattagagtctatagacaaggagattcaggcgctggaggagttccgggagaaaaatcaacgactccagaagctatgggtcggcaggcttatcctatattcatcagtcctgtatcttttcacgtgtctgatcgtttacttgtggtatcttcccgacgagttcaccgccaggcttgctatgaccctgcccttctttgcatttcctctcattatttggtctatccggaccgtcattatcttctttttctcaaaacgaacagagcggaataacgaggcccttgatgatctgaaatcccagaggaaaaaaatccttgaagaggtcatggagaaagagacctacaaaactgcaaaactcattctcgagcgctttgacccagacagcaaaaaggccaaagaatgtgaaccaccgagcgctggggctgctgtgaccgcaaggcctggccaagagatcagacagcgcaccgccgctcaacggaacctgtcccccacgcctgcaagccctaatcagggtccccctcctcaggtgcccgtatcacctgggcctccaaaagatagtagcgcacccggtggaccacctgaaagaacggttaccccagcactctcgagtaacgtcctgcctaggcatcttgggtcgcctgccacatccgtgccaggcatgggactccaccctccagggcctcccctcgctaggcctatcttacctagagaacgcggtgccctggataggatcgtggagtacctcgttggggacgggccacaaaaccgctacgccttgatctgccagcagtgctttagccacaacgggatggctctcaaagaagagttcgagtatatcgcatttaggtgcgcttattgctttttcctgaatcctgctcgcaaaacgcgacctcaggcccctagactgccggagttttcctttgagaagcggcaggtcgttgaagggtcctcgtctgtgggaccactgccctctggttcggtactgagtagcgataatcagttcaacgaagaatccctggaacacgatgttttagatgataacacagagcagacagatgataaaatccctgccaccgaacagacgaatcaagtgatcgagaaggcaagcgattctgaggagcctgaggaaaaacaggaaaccgagaatgaggaggcctcagttatcgagactaactccacagtccctggggcagactctatccctgatcctgagctatcaggcgaatctctgacggccgaatag

SEQ ID NO: 219494 - DNA, 7610 bp, Artificial Sequence
  derived and/or modified sequence
agcggcgcgcgccgaccgcggcgccaattggcgagcggctggagcgcggggtttcatgggaaggagttggcccggcttgtctctctgtcagtggcggctgctgcctgctctggaggcaggctgggcggtggcggccgagactggcgggggtggacgcccgggccgggctgcgcccgcttcttgcagctgtgaattcctttggacaattgatgatatttatcattgtgcccagtttctacaaataaaagatgggtggattattttctcgatggaggacaaaaccttcaactgtagaagttctagaaagtatagataaggaaattcaagcattggaagaatttagggaaaaaaatcagagattacaaaaattatgggttggaagattaattctgtattcctcagttctctatctgtttacatgcttaattgtatatttgtggtatcttcctgatgaatttacagcaagacttgccatgacactcccattttttgcttttccattgatcatctggagcataagaacagtaattattttcttcttttccaagagaacagaaagaaataatgaagcattggatgatttaaaatcccagaggaaaaaaatacttgaagaagtcatggaaaaagaaacttacaagacggctaaattaattcttgaaaggtttgatccggactcaaagaaagcaaaggagtgtgagccgccatctgctggagcagctgtaactgcaagacctggacaagagattcgtcagcgaactgcagctcaaagaaacctttctccaacaccagcaagccctaaccagggccctcctccacaagttccagtatctcctggaccaccaaaggacagttctgcccctggtggacccccagaaaggactgttactccagccctatcatcaaatgtgttaccaagacatcttggatcccctgctacttcagtgcctggaatgggtcttcatcctccaggtccacctttagcaagacctattctcccccgagaacgaggtgctttggatagaattgttgaatatttggttggtgatggtccacaaaacaggtatgcacttatatgtcagcagtgtttttctcataatggcatggctttgaaggaagaatttgaatacattgcttttcgatgtgcctactgttttttcttgaaccctgcaagaaaaaccagacctcaggctccaagacttcctgagtttagttttgagaagaggcaggtggtggaaggttcaagttcagttggtcccttgccatcaggaagtgtgctttcatcagacaaccagtttaatgaagaatctttagaacacgatgttcttgatgataatacagagcagacagatgacaaaataccagctacagaacagacaaaccaagtgattgaaaaagcatctgactcagaggaaccagaggagaaacaagagactgagaatgaggaagcctcagtgattgaaaccaactccacagttcctggagctgattctattcctgatcctgaactaagtggagaatctttgacggcagagtagtaaatgcttccacgtgccttcaactggatatttatagtcttactgatgtcagttattgctttttcggtggcacttactttttttgcccctctaagggtatgcttgtgtatcatttgaattcagattgcctagctatttgaacatctcaaagttatatatactgggtattaaaattaaaagcaagttatatcagtgaagtaagatccttttgaatgtacaaagacccacactattgagacagcttttagatacttttttgtccattctaaaagtaagcaaacatgattgccttcttgttttctgtatgtataacccgtaaatatccattttgacataggaagaactttggttaagagtaagttctctaattgtgtttgttttaaggaatgaaacttggttaagattttgactacttcattattaaaaattgatagaattttagctcctgagatatttacaactgggagaaatgtctatttaggtgtttacattaagcggtatgaaagttgttaccacataggcactggtacgaattctcaataagaatgcagtggaacagttaagtagaactgtaactacgttggcactggtacgaattctcagtgagaatgcaatgaaacagtcaactgcagtgtttctttttgatgtcttttattttacaactgggccaaaggcacattatgtatataattagtttatatttacacactagcatataggaaatatttctgcacttgaccctatttgaattctgagcattatttataagtataaaatgatgatatataagtgaattttgtgctcttgtttgtattttattaaggaaaatgaaaataatctggcatcagtttcattttgctaaatatctagtcttcttcaaacagtatcttggtgggtgacttggctacctgaaaaatcttaggaggaatagctcacaatacaataaatctgtagattctgcttagagcaaattatggtacttttattcagacttgtttcctttctagttaacagaaatagtgacatttagaggttttaatcagaagttaggtttttctgattcaggaacatcgtaggccagccatttgtaatttttaactttgagaaacaaattttgtgagaataggtagtgggttgctggtagttaattggatttaatatttgtattaaggattaactggaaaaaatgtgtctcagtgctaattcttggacctttaatacagtgtgcttatctgttacggcctccttttatctctcttctccaatattaaaaaaaatggaaatcaaattattatgctgaagggaaaaatatacctgtataagaatggtgtgtttggctaatgtttctaagttgcacacagtttattaacaactgaacaaaacatttttatcatttaaaaatctatttttatgatttaatatctcatatgtgacagtttttttttttttttttttttggaactcaatctgttaacagtctgggacatccggtatagtaaccagagtttttgagcctgccgtattgggcttaaatttcaggtctgtagtcttgggcaagtcacctataaactcactgagattattttttcatctgtaaaatgggaagagttatgtttatttttgaagggtattaggataattaaaaataatgtaatgtgcctagcacactacctgaaaacgatggcatttgttcttattaatgtctttaaaatatgcaaggaccataagtttttcctcttgcagatgaggaaagtaaaaaataatacgaacatgtaattcagcttctcagattcaagccaatgttttttgcatcaacttttctatattgtatgtatgtatataaatacatagattaaggaaataggaaactgaaactctgtggaatataaactttttaaaaataatttcatcaggttttttgtatgttactgacccatatggattttagtaacatcttgcttagtcatgttgttataaaacattcaaattctgatatacattgcttgaaaatgagtgagtacctcagagaaatttgatagactcaaacagatagtatgagaaatatctttgaaagaaatatggaggaaggttaaaaggggattagtaaaattaatgcgataggtaacatgtttgtaaccatatagtatccttttagatacaaaagcttattttcattattattataataaacagttaatggttgaaacttagtaaaatgtcctatttctgattattaagactagtataaatgagaaaatccaagctattaagtaccattagctacagtgatcttagcttccttgcttacaattgttcagtgggtcatctaaattcttctatgtcctgagcatgatctacaaacatggtctagcttctgtctctccgtcttcccgccatcattgtgctgtagccatatggaactcctttcagttctctgaccatgccctttcctgcctcagatttcagcttaaattttgcctcctcagagagatgccttcccaaactccccatctgaagctggcctctgccttttactccctatcatgtcactctctgctcaccatccttatcacaatgtgtatttgatttgtttgctagtttactgtcttcacaacataatgtccgtttgtgcaagggtcttatttttcttattcatgtctgtatctcaagggtctagcacaatgcttgatgcatattgtgtgaataaatactttgttgccaaatccagtgaaaactctcagttcttgtttcactgcttggcagtattgacattgaatattctctgagatactttttttcttttggcttttcatatatcacactattattctcttatttctctggcctcttgctctcaacgtcctgtaagtgttggtgttccttaagttctacctagtgtcatcatttcttcattctgcatattctttccctagggtttcttcccaacaccaaaggacttaccatctgtctctctgaatctcagatctccagctttgatctgtttcctttactttagagctatatatttgcctgcctactggcctgtctctcacaatccatatattcaagaatgaacactatactttgcttcaaaccttcagaacattcaaaccgtttatgtttctcatctaatcaaatagagttactctctaagccagaagctgtaaactcatctcttttccctttattcaagctgtcaatttttgtctcctaaacatcttctagttatattctcatttctctgttcacattgcattaataatgatgataaacatttgcattcttattctgtgccaggcaacatgctaactgctgtatatatattattatatttgtactttggcaagaatcctgtgaagatttttatctttggactactagaagagaaagctgagttgtagagagagtatgtatttaagtccgtttgggctgctataacagaataccacagactgggtaacgtgatgaacaaaaatttatttggctcacagttctggaacctgggaaatccaaaggcatgatgctagcatctggtgagggcctttgtgctttgtcatcccatgccagaaggcagaagggtaagagagggcaagagtgagcaagagatggaagttgcaacctcaagctcttttataatgagcattaatccattcatgagggcttcaccctcatgacctaaacatctccattaggctccaccttccaatgcaacagttagcataagttttcaacacatgctttttgtagcattcaaaccatagcaggaagcaactttgcttaaaattgtatacctggtaagtggaaaaagagggatttgaatataggcaaatgacttcagaggatttactcttaatttctgttgtactgccttctaatcttggcctccatcatttcagattaccaaagctgtctcttaactggtttctttgtctccaaccttgtgcacttgctatctattctgtgtgctgcagcctgagtttttaaaaaacagaaaatgaggggccaggtgtggtggtggctcacgcctgtaatcccagcaagttgggaggctgaggcgggcagatcatctggggtcaggagttcgagaccagcctgaccaacgtggagaaacactatctctactaaaaatacaaaattagccaggcgtggtggtgcatgcctgtaatcctagctactcaggagcctgaggcaggagaattgcttgaacacgggaggcagaggttgcagtgagcagagattgcgccattgtactccagcctgggcaacaagagtgaaactccatctcaaaaaaaaaaaagaaagaaagaaaatgaatctgccacgccattgcttagaccctttaatgactcttgagtgttcttgggatgaggtccaaatttactaataaggcctgcaaagccctgtgtaattttgctcctagttatggctggcatctgcaccacaactacagccactgccacctccccctgccacacacacattttaaaagtaacaatagtagtgttttctgtgttttgcatatgcagtcttttctcatctcccagccttcttgagcttttcctctgcctgagatacgctcccactcacatagacattgggggcactaaataaaaatagctgtttaattgaattggaatcgttccacttggaacccaagtttggaaattttgctacttcttgttaagctaggccttttattcttgaagttgctatttctcatacaaactcattttatgcattagacacacagtcactattgttatggagaacatagttgtatcagaagaggtatagctttgggtgtggatgtgcgtgtgtcaggggaaagatattctgattatatgatgattttcataaaatatagtatgctgagtttccgaaaatcctaaatgacttagaaatggtgctatatgtggtttgtttgacccctgcaaatctcatgttgaaatttgatccccattgctggaggtgttttgagcatggagcggatccctcatgaatgtcttggcgttgtccttgcagtaatgagttcttgctctatttttcctcccctggaagctgattgtttaaaagagcctggtatcctccctccctttcttctttgcttcctctctcttgctgtgtgatctctgcacacaccagctcccctttgctttctgccatgagtggtctgaggctctcaccagaagccaagcagaggctggcaccatgcttctagtacagcctgcagaactgtaagccaaataaacttcttctttgttttttttttttgtttgttttgtttttttttcagtaaattacccagcctcaggtattccttaacaacacaaatgggctaagacacagggtcatagggatagcaggcacctgagccaagccagaacttagatctcaactgttaatgcaggatgatttgtattgaaccatgaattttacactgcctctcaatgttggtgtcagcatttaaggttatttaaaaaatacaacctgaaggttacataaagtttcatttaaaaaataagaccttataagtctacttttatttccagtggacagcaactacttaatcgtcttaaaactttcttcttacaatattactttacaatattacctgttggatttattatctgtgtacaaatcagttagttgaagggccaaagaataaaggcattttgtgaattatgaatagctattttgaaatggtcatggagactagctactctagaaaattgggagaatatactgtattaagttactatctggtataacttcaattaattgtgaaaattgtagcagagatctagatatagtttatgaacttctaaagagacattaaagggaattcaagtacttgtgtaaagatgaaccaaggtagagatgattgtgaattggtgatctgctgtatgttacagttatgtaatttgacttgtttcaaaattattaaagttttaagtgtatgcattctactggtcaataagtaaatatattcaggctctgaatgtagacagataaatatataaatatagaaagtacatttgttagaatacaaacaagaataaaaattgagtacagaat

SEQ ID NO: 219495 - DNA, 1830 bp, Artificial Sequence
  derived and/or modified sequence
acttttctccactggcttggttgggaactggcttcttcggagctgtgtagtcttaatttgctttgctgctggctggctgacagctgatgggggactcctcaggacggactcccttccagatgcacccatctccatccttctcaactccccaacctttgtcctccccactcttcgctcgcgcggcggtctgagaccaccaggaccagtttcaggggtttccttctccagcgagacttggcagaacaggctttaaaagcaaaggaggcagcggaagactgtgaattcctttggacaattgatgatatttatcattgtgcccagtttctacaaataaaagatgggtggattattttctcgatggagggttgaaccatatgaaattgccagtattcaactgcttggacttagcaaaatgtcagtttcatatggttaaccctaatgttaacaactcttatggaaactacaatgaactgatattcattaccctcttggattgttgagtatgtaattgacaaaaccttcaactgtagaagttctagaaagtatagataaggaaattcaagcattggaagaatttagggaaaaaaatcagagattacaaaaattatgggttggaagattaattctgtattcctcagttctctatctgtttacatgcttaattgtatatttgtggtatcttcctgatgaatttacagcaagacttgccatgacactcccattttttgcttttccattgatcatctggagcataagaacagtaattattttcttcttttccaagagaacagaaagaaataatgaagcattggatgatttaaaatcccagaggaaaaaaatacttgaagaagtcatggaaaaagaaacttacaagacggctaaattaattcttgaaaggtttgatccggactcaaagaaagcaaaggagtgtgagccgccatctgctggagcagctgtaactgcaagacctggacaagagattcgtcagcgaactgcagctcaaagaaacctttctccaacaccagcaagccctaaccagggccctcctccacaagttccagtatctcctggaccaccaaaggacagttctgcccctggtggacccccagaaaggactgttactccagccctatcatcaaatgtgttaccaagacatcttggatcccctgctacttcagtgcctggaatgggtcttcatcctccaggtccacctttagcaagacctattctcccccgagaacgaggtgctttggatagaattgttgaatatttggttggtgatggtccacaaaacaggtatgcacttatatgtcagcagtgtttttctcataatggcatggctttgaaggaagaatttgaatacattgcttttcgatgtgcctactgttttttcttgaaccctgcaagaaaaaccagacctcaggctccaagacttcctgagtttagttttgagaagaggcaggtggtggaaggttcaagttcagttggtcccttgccatcaggaagtgtgctttcatcagacaaccagtttaatgaagtacagtattgaggcagtctgtcagacagaatatgacaaactatgtgggcctgttttcacttaaacatgtttattgaatctttagaacacgatgttcttgatgataatacagagcagacagatgacaaaataccagctacagaacagacaaaccaagtgattgaaaaagcatctgactcagaggaaccagaggagaaacaagagactgagaatgaggaagcctcagtgattgaaaccaactccacagttcctggagctgattctattcctgatcctgaactaagtggagaatc

SEQ ID NO: 219496 - DNA, 1287 bp, Artificial Sequence
  derived and/or modified sequence
atgggcggcctgttcagcagatggagaaccaagcccagcaccgtggaggtgctggagagcatcgacaaggagatccaggccctggaggagttcagagagaagaaccagagactgcagaagctgtgggtgggcagactgatcctgtacagcagcgtgctgtacctgttcacctgcctgatcgtgtacctgtggtacctgcccgacgagttcaccgccagactggccatgaccctgcccttcttcgccttccccctgatcatctggagcatcagaaccgtgatcatcttcttcttcagcaagagaaccgagagaaacaacgaggccctggacgacctgaagagccagagaaagaagatcctggaggaggtgatggagaaggagacctacaagaccgccaagctgatcctggagagattcgaccccgacagcaagaaggccaaggagtgcgagccccccagcgccggcgccgccgtgaccgccagacccggccaggagatcagacagagaaccgccgcccagagaaacctgagccccacccccgccagccccaaccagggcccccccccccaggtgcccgtgagccccggcccccccaaggacagcagcgcccccggcggcccccccgagagaaccgtgacccccgccctgagcagcaacgtgctgcccagacacctgggcagccccgccaccagcgtgcccggcatgggcctgcacccccccggcccccccctggccagacccatcctgcccagagagagaggcgccctggacagaatcgtggagtacctggtgggcgacggcccccagaacagatacgccctgatctgccagcagtgcttcagccacaacggcatggccctgaaggaggagttcgagtacatcgccttcagatgcgcctactgcttcttcctgaaccccgccagaaagaccagaccccaggcccccagactgcccgagttcagcttcgagaagagacaggtggtggagggcagcagcagcgtgggccccctgcccagcggcagcgtgctgagcagcgacaaccagttcaacgaggagagcctggagcacgacgtgctggacgacaacaccgagcagaccgacgacaagatccccgccaccgagcagaccaaccaggtgatcgagaaggccagcgacagcgaggagcccgaggagaagcaggagaccgagaacgaggaggccagcgtgatcgagaccaacagcaccgtgcccggcgccgacagcatccccgaccccgagctgagcggcgagagcctgaccgccgagtag

SEQ ID NO: 219497 - protein, 306 aa, Artificial Sequence
  derived and/or modified sequence
MSSEKSGLPDSVPHTSPPPYNAPQPPAEPPAPPPQAAPSSHHHHHHHYHQSGTATLPRLGAGGLASSAATAQRGPSSSATLPRPPHHAPPGPAAGAPPPGCATLPRMPPDPYLQETRFEGPLPPPPPAAAAPPPPAPAQTAQAPGFVVPTHAGTVGTLPLGGYVAPGYPLQLQPCTAYVPVYPVGTPYAGGTPGGTGVTSTLPPPPQGPGLALLEPRRPPHDYMPIAVLTTICCFWPTGIIAIFKAVQVRTALARGDMVSAEIASREARNFSFISLAVGIAAMVLCTILTVVIIIAAQHHENYWDP

SEQ ID NO: 219498 - DNA, 921 bp, Artificial Sequence
  derived and/or modified sequence
atgagcagcgagaagagcggcctgcccgacagcgtgccccacaccagcccccccccctacaacgccccccagccccccgccgagccccccgccccccccccccaggccgcccccagcagccaccaccaccaccaccaccactaccaccagagcggcaccgccaccctgcccagactgggcgccggcggcctggccagcagcgccgccaccgcccagagaggccccagcagcagcgccaccctgcccagacccccccaccacgccccccccggccccgccgccggcgcccccccccccggctgcgccaccctgcccagaatgccccccgacccctacctgcaggagaccagattcgagggccccctgcccccccccccccccgccgccgccgccccccccccccccgcccccgcccagaccgcccaggcccccggcttcgtggtgcccacccacgccggcaccgtgggcaccctgcccctgggcggctacgtggcccccggctaccccctgcagctgcagccctgcaccgcctacgtgcccgtgtaccccgtgggcaccccctacgccggcggcacccccggcggcaccggcgtgaccagcaccctgcccccccccccccagggccccggcctggccctgctggagcccagaagacccccccacgactacatgcccatcgccgtgctgaccaccatctgctgcttctggcccaccggcatcatcgccatcttcaaggccgtgcaggtgagaaccgccctggccagaggcgacatggtgagcgccgagatcgccagcagagaggccagaaacttcagcttcatcagcctggccgtgggcatcgccgccatggtgctgtgcaccatcctgaccgtggtgatcatcatcgccgcccagcaccacgagaactactgggacccctag

SEQ ID NO: 219499 - DNA, 921 bp, Artificial Sequence
  derived and/or modified sequence
atgagcagtgaaaaaagcgggctgcctgatagtgtgccccacaccagccccccgccatataatgctccacagcctcctgcagagcccccggctccaccccctcaggcagctccttcctctcatcaccaccaccatcaccactatcaccagtccggtaccgctaccctgcctaggttaggtgccggcgggctggcatcaagcgcggctactgcccagagaggtccctcgtcctctgcaacactgcccagacccccgcaccatgctccaccaggtcctgctgccggtgcacctccccccggctgcgccaccttgcccagaatgcctccagacccttacctgcaggaaaccaggtttgaaggcccgttacctccaccaccgccagcagcggctgcccctccccctccggcacccgcccagaccgctcaggcacctggtttcgtggttcctactcacgccggcaccgttggcactctgcccctgggagggtacgtggcgcctggctaccccctgcagttacagccttgcacagcctatgtccccgtctaccctgtgggaacgccttacgcaggagggactcccgggggtacaggcgttacgagcactctccctcccccccctcaggggccaggcttagccttactggaaccgagacgaccccctcacgactatatgccaatcgccgtgttgaccaccatatgctgcttctggcccacgggtataattgccattttcaaagctgtgcaggttaggactgccctggctcgtggtgatatggtgtctgccgagatcgcctcgcgagaggcacgtaactttagtttcatctctttggcagtgggcatagcggccatggttctgtgtaccatactaacggtcgtgatcatcatcgctgcccaacaccacgaaaattactgggatccttag

SEQ ID NO: 219500 - DNA, 921 bp, Artificial Sequence
  derived and/or modified sequence
atgtcaagtgagaagagtggcttgccagattccgttcctcacacttcccctcctccatataacgcaccccagccccccgctgaaccacccgccccccctccacaggctgcccctagcagtcatcatcaccaccaccatcattaccatcagagtggaactgccacactgccccgcctgggcgcaggcggtttggcgagtagtgcagccacagcccaacgaggtccctcctctagtgctacacttccacgcccaccgcatcacgccccccctggcccagcggcgggagctcccccccccggatgtgcgacactgccgcgtatgccacccgacccatacctgcaggagacgcggtttgagggccccctgcctccaccaccacccgccgcagccgcacctcccccccccgcacccgctcagaccgcacaggcacctgggttcgtcgtgcctacacatgcgggcactgtgggcacgctgcctttggggggctacgttgcccccggctaccctctgcagctgcaaccctgcaccgcctacgtccccgtgtaccccgtgggcacaccttacgcaggagggacacccggcggcacaggcgtcacctccacactgcccccccctcctcaggggccaggtcttgctctgctggagcctcgcagaccaccacacgattacatgcctatcgccgtgttgactactatttgctgtttctggcccactggtattattgctatcttcaaagcagtgcaagtgaggacagctctggcccggggtgacatggtgtccgcggagatagcttccagggaagcaagaaatttttccttcatcagtttggcagttgggatagcagccatggttctctgcacaatcttaactgtagtcataataattgccgcccagcaccatgaaaattattgggatccgtag

SEQ ID NO: 219501 - DNA, 921 bp, Artificial Sequence
  derived and/or modified sequence
atgtctagcgaaaaatcaggtttacctgattccgtccctcatacgagcccaccaccatacaacgctccccagcctccagccgaaccccctgctcccccaccgcaggccgccccatcatctcatcaccatcaccaccaccactaccaccagagtgggacagctaccttaccacgcttaggcgccggtggactggcatccagcgccgcgacagcccagcggggaccaagcagtagcgctactctgcctagaccaccgcaccacgctccccctggacccgccgctggagctcccccgccagggtgcgcaaccctgccgcgaatgccacctgacccgtacctccaggaaacgagatttgagggtccactacccccgcccccgcccgccgccgctgcccccccgccacccgccccagcacaaacagcccaggctccgggctttgtcgtccctactcatgccggaaccgtgggtacactcccattaggtggttatgtggcccctgggtacccattgcaactccagccctgtacagcctatgtacccgtgtaccccgtggggaccccttacgcaggcgggaccccaggaggcactggtgtgaccagcactctgccccccccgccacagggcccagggctagcccttctggaaccccgaaggcctccccatgattacatgcccattgcagtcctaaccacaatctgttgtttttggcccaccggtatcatcgcaatcttcaaagccgtgcaagtgcgcacagccctcgcaaggggcgacatggtcagtgccgagattgccagccgggaggcaaggaatttttcattcatcagtttggccgtgggaatcgcagcaatggtgctgtgcacaatcctcacagtagtcatcataatcgccgcccagcaccacgaaaattattgggacccatag

SEQ ID NO: 219502 - DNA, 921 bp, Artificial Sequence
  derived and/or modified sequence
atgagcagtgaaaagtcaggattgccagattctgtgccacacactagtcccccgccctataacgcgcctcagccacccgcagagccccccgccccacccccccaggccgcgccaagcagtcatcatcatcaccatcatcactatcatcaatcgggaaccgccacgctcccacggttaggggcaggtggcctagcttcgagtgccgctacagctcagcggggccctagcagttctgcgactcttcctcgtccaccccaccacgcacctccaggaccagccgcaggcgcaccccctcctggatgtgccactttacctcgcatgccccccgacccttacctccaggagacccgtttcgagggccccttgcctccccctccacccgcggccgccgcccctcctcctcccgcccccgctcagacggcccaagccccagggtttgttgtgcctactcatgcagggacagtgggtaccctccccctcgggggatacgtggcccccgggtacccgctccagttgcagccctgcacagcctacgtgccagtttatccggtgggtacgccatacgcaggaggaacgcccgggggaaccggtgtgacatctaccctgcccccacctccacaagggccgggcctcgctttgctggagccaagacgcccacctcacgactatatgccgatcgcagtcctgactactatctgctgcttctggcctaccggcataatagctatcttcaaggccgtccaggtgagaaccgctctagcacgtggggatatggtcagcgcagagatcgccagccgagaggctaggaatttttctttcatcagtctggctgtgggaatcgcagcaatggtcctgtgtacgattcttacggtggtgattatcattgctgcacagcaccatgagaactattgggacccttag

SEQ ID NO: 219503 - DNA, 921 bp, Artificial Sequence
  derived and/or modified sequence
atgtcctccgaaaagtcgggcctgcccgacagtgtgccgcacacatcccctccaccctataacgccccacaacccccagcggagccccctgcaccaccccctcaagccgccccttccagtcaccaccaccatcatcaccactatcatcagtccggtaccgcgacgctcccaagactgggcgctggaggtttggcatcttctgctgccactgctcagcggggcccaagcagctccgccactctaccccggcccccacaccacgctcctcctggtccagctgccggggcccctcctccagggtgcgctactctgccacgcatgcctcccgacccatatctgcaggagacaaggttcgaaggacccctgccccctcctccgccagcagctgccgcacccccaccgccagccccagcccagacagctcaggccccaggattcgtggtacccactcatgcaggcactgtgggcaccctcccgttgggcgggtatgtcgcccccggatatcctcttcaattacagccatgcacggcttacgtacccgtgtatcccgtcggcacgccctacgcagggggaactccggggggcacaggggtaacgtccactctgccaccacctccacagggcccagggctggccttgctggaacctcgaagaccaccccatgactacatgccaatagcagtgctgactactatttgctgcttttggccaaccgggattatagccattttcaaggcagttcaggtgcgaaccgccttggctagaggagatatggtgtcggcagagatcgcatctcgcgaagcacggaacttctccttcatctcactagcagtcggaatcgccgccatggtcctctgcaccatcctgactgtcgtgatcatcatagccgctcaacaccacgagaattactgggatccttag

SEQ ID NO: 219504 - DNA, 921 bp, Artificial Sequence
  derived and/or modified sequence
atgagcagcgagaagagtggtttgcctgattcggtgccacacacgagccccccgccgtacaacgcaccccagcctccagctgagccccccgctccaccccctcaggcagcgccctccagtcaccatcaccatcaccaccactatcaccagagtggaacagccactctccctcggctgggcgccggggggttggcctcaagcgccgcaacagcgcagcgtgggcctagttcaagcgccacactgccacgtccaccgcaccacgctccacccggccccgccgcaggcgcgcctcctcctggctgcgccacactcccccgaatgccacccgacccttatctgcaggagaccaggttcgaaggacccttaccaccgcctccgcctgccgctgcagcccctccaccacccgcacctgcccagacggcgcaagcgcccggattcgtggtgccgactcacgccggaaccgttggaactctgcccctaggcggatacgtggcccccggatatccactgcagcttcagccttgtacggcctacgtgccagtctaccctgtgggtacgccctatgcaggtggtacgccaggaggaactggcgttacatccacactgccaccaccgccacagggcccgggcctggccctgctggagccacggcgacccccacacgactacatgcctattgctgttcttaccacaatatgttgcttttggcccaccggaatcatagcaatctttaaggctgtccaggtgagaactgctctggctcggggagatatggtctcagctgagatcgccagcagagaggccaggaatttcagcttcatctcattggccgtcgggattgccgcaatggttctttgtactatccttaccgtcgtgataattatagctgcccaacatcacgagaactactgggatccatag

SEQ ID NO: 219505 - DNA, 921 bp, Artificial Sequence
  derived and/or modified sequence
atgtcttcagaaaaatctggactccccgactccgtgcctcatacctccccaccaccctataacgcaccccagccccctgctgagccccctgcccccccaccacaggccgccccgagctcacaccaccaccaccaccaccactaccatcagtccggaaccgcaactctgcccagactgggagccggtgggttggcaagcagcgccgccaccgctcagaggggtcccagctctagcgccaccctacccaggcccccacatcacgctccccccggccctgcggccggagcaccaccccccggatgcgccacgctgcccaggatgccaccagatccctacctccaggagactaggttcgagggtcccttgcccccaccaccgccagccgcagcagctccgccaccacccgctccggcccagacggcccaggcgccaggattcgtagtgccaactcatgcaggaactgttggaactctaccgctgggaggctacgtcgcaccaggatacccactccagttgcagccatgcactgcctatgtgcctgtctaccccgtcggaacaccttatgccgggggtacacccggaggcaccggcgtcacgtctacactgccacccccgccgcagggcccaggacttgcactcctggagcctagacggccacctcacgattatatgccaatagccgtgttgactaccatttgctgcttctggccaacaggcattattgctatctttaaagctgtacaagtgaggactgccttggctcggggagatatggtcagtgctgagattgcttcacgagaggctcgcaacttctcttttatctccctcgccgttggaatagccgcaatggtgctgtgcactattttaaccgtggtgatcataatagccgcccaacaccatgagaattattgggatccgtag

SEQ ID NO: 219506 - DNA, 921 bp, Artificial Sequence
  derived and/or modified sequence
atgagcagcgagaagagcggcctgcctgattctgtgccccacaccagccccccaccctacaatgccccccagcccccagctgagcccccagcccccccaccccaggccgcccccagcagccaccaccaccaccaccaccactaccaccagagcggcacagccaccctgccccggctgggcgccggcggcctggccagcagcgctgccacagcccagaggggccccagcagcagcgccaccctgccccggcccccccaccacgcccctcctggccctgctgctggggcccctcctcctggctgtgccaccctgcccaggatgcccccagacccctacctgcaggagaccaggtttgagggccccctgcccccacctcctcctgctgctgctgcccctcctcctccagccccagcccagacagcccaggcccctggctttgtggtgcccacccacgccggcaccgtgggcaccctgcccctgggcggctacgtggcccctggctaccccctgcagctgcagccctgcacagcctacgtgcctgtgtaccctgtgggcaccccctatgccggcggcaccccaggcggcaccggggtgaccagcaccctgcccccaccaccccagggccctggcctggccctgctggagcccaggaggcctcctcatgactacatgcccatcgctgtgctgaccaccatctgctgcttctggcccaccggcatcatcgccatcttcaaggctgtgcaggtgaggacagccctggcccggggggacatggtgtctgctgagatcgccagccgggaggccaggaacttctccttcatcagcctggccgtgggcattgctgccatggtgctgtgcaccatcctgactgtggtgatcatcatcgccgcccagcaccacgagaactactgggacccctag

SEQ ID NO: 219507 - DNA, 921 bp, Artificial Sequence
  derived and/or modified sequence
atgagcagcgagaagagcggcctgcccgacagcgtgccccacacctctcctcccccatataatgcaccacagccccctgctgaaccccctgccccccctccccaggctgcacctagctctcaccaccaccatcaccatcactatcatcaaagcggcacagccacgctgcctcgattgggtgcgggcggcctggccagtagtgccgcaacagcacaaagagggccgtcctccagcgctaccctgccccgtcctcctcatcatgctccccccggcccagctgctggcgcccctcctccagggtgcgcaacattgcctaggatgcccccagacccatatttgcaggaaactcgtttcgaaggacctcttcctcctcccccgcccgccgccgccgctccccctcctcccgcccccgctcagaccgcccaggcccccggttttgtggtccccacacacgccggaaccgtcggcactctgcctctcggcggttatgtggctccaggctatccgctccagctccagccctgcactgcctacgtccctgtgtatccggttgggacaccctacgccggcggcacgcctggcggtacaggcgttacaagcaccctgccacctcctccacagggccccggactcgcactgctggagcctagacgcccgccgcacgactacatgcccatagccgtcctgacaaccatttgttgtttctggccaaccggaatcattgccattttcaaggcagtgcaggtgcgaaccgccctggctaggggagatatggtctctgccgagatcgctagtcgggaagcacggaatttcagctttatcagccttgccgttgggattgccgctatggtcctgtgtactattctgaccgtagtgatcatcatcgcggctcagcatcacgagaactactgggacccttag

SEQ ID NO: 219508 - DNA, 921 bp, Artificial Sequence
  derived and/or modified sequence
atgagcagcgagaagagcggcctgcccgacagcgtgccccacaccagtccccctccttataacgcgcctcaaccacctgccgaaccacctgctcctcctcctcaagcggcaccctcatctcaccatcatcaccatcaccactaccatcaaagtggcaccgccaccctgccacgactcggagccggaggtctcgcctcctccgccgccacggctcagcgagggccctcatcctccgcaactctgccaagacctccgcaccatgctcctcctggaccagccgcgggcgcacctccacccggctgtgcgacattaccccggatgccccctgatccgtatctgcaagagacccgcttcgagggacccttaccacctcctcccccagccgcagcagcacctcctccgcctgcgcctgctcagacggctcaggcccctgggttcgtggtgccaacccacgctggcactgttggcacattaccactgggcggatacgtggctccgggctaccccctgcaattacaaccctgcacagcatacgtacccgtatacccagtcgggacaccctacgccggaggtacaccagggggcaccggggtgacatctactctgccacccccaccgcagggccctggtttagccttattggagcccaggcggccccctcatgattatatgcctattgcagtgctgacgaccatctgttgcttctggccaacgggcattatcgccatattcaaagcagtgcaggtgagaacagcactggcccggggcgacatggttagtgccgaaatcgcttcccgggaggccaggaatttctcttttatctccctggccgtgggcatcgcagccatggttttgtgtacgatcctgactgttgttattataatagccgcccagcatcacgagaactactgggacccctag

SEQ ID NO: 219509 - DNA, 921 bp, Artificial Sequence
  derived and/or modified sequence
atgagcagcgagaagagcggcctgcccgacagcgtgccccacaccagcccacctccttataacgccccacagcctccagccgagcccccggcccctcctccacaggcagcccctagcagtcaccatcatcaccaccatcattaccaccagtccggcacggctacactgccccggctcggagcgggagggctggcatcaagcgccgccacggctcagcggggcccgtcctcctcggccaccctgccccgcccccctcaccacgcgcctcccgggccagctgcaggagcacccccccccggctgcgctaccctccctaggatgcccccggacccatacctccaggaaaccaggtttgagggcccccttcctccaccccctcccgccgccgctgcccccccacctcctgctcccgctcagaccgcacaggctcccggcttcgttgtccctacacacgccggcactgtgggaaccctgcctcttggcggatacgtcgcaccaggttatccattgcagctccagccttgtactgcttacgtgccagtatatcccgtgggaacgccttacgcgggcggcacacctggtggaactggtgtaacctcaacactgccacctcccccacagggcccgggattggcactcctggaaccacggaggcctcctcatgactacatgcctatcgccgtgttaaccaccatctgttgtttctggcccacgggcatcattgcaattttcaaggctgtgcaagttcgaacagccctggctcgcggtgatatggtgagcgccgaaatcgccagcagggaagcgcgaaacttcagtttcatttcattggccgttggcattgccgctatggttctgtgcactattctgaccgtggtgattatcatcgcggcacagcatcacgaaaactactgggacccctag

SEQ ID NO: 219510 - DNA, 921 bp, Artificial Sequence
  derived and/or modified sequence
atgagcagcgagaagagcggcctgcccgacagcgtgccccacacctctccacccccatataacgctccgcaaccaccagcagaaccaccagcacctcctccccaggccgccccatcaagtcaccaccaccaccaccatcattaccaccagagtggcacagcaaccctccctagattgggtgcaggcgggttggcctcctctgccgccaccgcgcaaagggggccttcttcgagtgctacacttcccagacccccacaccacgctccccccgggcctgccgcaggcgcgccccctcccggctgtgcgacgcttccacgcatgccacctgacccttatctgcaggagaccagatttgaagggcccctccccccacccccccccgctgccgcggccccgcccccccccgcccccgcacagaccgcccaggccccggggtttgtagtccccacacacgcagggacagtgggaacactccccctggggggttacgttgcacccggctaccctctccaattgcagccatgcacagcatacgtgcccgtgtaccctgttggaactccgtatgccggcggaacccccggtggtaccggggtaacttctaccctccctcccccaccccagggccctggcctcgccctcttagagcctcgccggcctccacatgactacatgcccattgcagtgttgaccacaatatgctgtttctggccgaccggaattatcgctatattcaaagctgtgcaagtgagaaccgcgctggctcggggggacatggtgtccgccgagattgcttcccgggaagctcgtaacttctcattcattagcctggccgtcggaatagccgccatggtcctctgtactatcttgacagtggtgattatcatcgcagcccagcatcatgaaaattactgggatccttag

SEQ ID NO: 219511 - DNA, 921 bp, Artificial Sequence
  derived and/or modified sequence
atgagcagcgagaagagcggcctgcccgacagcgtgccccacacctctccccccccctataacgcgcctcagcccccagcagaacctcccgcaccaccgcctcaagccgcaccctcatctcaccatcaccaccatcaccattatcaccaatctggaaccgccaccctacctagactcggcgccggcggactagcctctagcgccgcaacagcgcagagggggcctagcagctctgctactctgcctaggccgcctcaccacgcacccccggggcctgccgccggcgcccccccaccagggtgcgcaacactgccacgaatgccaccggatccttacctccaagaaacccgcttcgaggggcctctgcctccgcccccccccgccgccgctgctcctcccccccccgcgcctgcccagacagcacaggctcccggattcgttgtgccaacccacgctggtacagttggtacactcccgctgggcgggtatgtggcccccggatacccattacaactccagccgtgcacagcttatgtgccggtctatcccgtgggcactccctatgcaggaggcactcccggcggcactggtgtgaccagtacactgcctccacctccacagggacctggactggcgctcctcgagccccggagacctccccacgactatatgccaattgcagtgctgaccacaatctgctgtttttggcccactggtattatcgctatctttaaagccgtgcaggtcaggaccgctctggcaaggggggacatggtatcggccgagatagccagcagggaagccaggaactttagttttatcagcttggccgtagggatagcagctatggtcttgtgcacgattctgaccgttgtaataataatcgcagctcagcaccacgagaactattgggacccatag

SEQ ID NO: 219512 - DNA, 921 bp, Artificial Sequence
  derived and/or modified sequence
atgagcagcgagaagagcggcctgcccgacagcgtgccccacaccagcccaccgccatataacgccccacagcccccagccgaaccacccgccccaccgcctcaggccgccccatcatcccatcaccatcatcatcaccattatcaccagtcaggcaccgccaccctcccccgccttggggccggcggcctcgcgagttctgcggccacagcccagaggggccccagcagcagcgcgacactgcctaggccaccacaccatgcacctccaggccctgcggccggggcacccccacctggctgcgccaccctgccaagaatgccccccgacccctatctgcaggagacacgattcgaaggaccacttccacccccccccccagctgcagccgcgccccctccgccggcccctgcccagacagcccaggcacccggtttcgtggttccaacacacgccgggaccgtcggcacgttgccactgggcggctatgtggctcccggctaccctctacagttgcagccatgcactgcttatgttcccgtctatcccgttggtactccatacgcgggaggcaccccaggtgggactggagttacatcaaccctaccacctccgcctcaaggccctgggctggctctcctagaaccacggcgcccccctcatgattacatgcccattgcagtgttaaccaccatttgctgcttttggccgacggggatcatcgcaatattcaaagccgttcaggtccgcactgctctggccagaggagacatggtgagtgcagaaattgcaagccgtgaggctcggaacttctcattcattagcctggcagtgggaattgccgcaatggtcctgtgtacaatcctcactgttgtcatcatcatagcagctcaacaccacgagaactactgggatccgtag

SEQ ID NO: 219513 - DNA, 921 bp, Artificial Sequence
  derived and/or modified sequence
atgagcagcgagaagagcggcctgcccgacagcgtgccccacaccagcccccctccctacaacgccccacagccccctgccgagcctcctgctcctcctccacaagcggctccctcgtctcatcaccatcatcatcatcactaccaccagagtggcacagccactttgcctaggttgggcgccggtggccttgcctcttctgccgctactgctcagaggggaccgtccagctctgccactcttcctcgcccaccccaccatgctcctccaggccctgccgccggcgccccaccgcccggatgcgccactctgcccaggatgccacccgacccatacctgcaggagacgcggttcgagggtcctttacctccccccccccccgccgctgccgcaccacccccaccagctcccgctcagacagctcaggcacctggctttgtcgtcccaactcacgccggcactgtcggtaccctgcctttaggtggctatgtggcgcccgggtacccattgcagctgcagccgtgcacggcctacgtaccagtatatccggtggggaccccttatgctggtggaacacccggtgggacgggtgtgacgagcaccctgcctcctcctccgcagggcccaggcctggcgctcctggagcctcggaggcctcctcacgactacatgcctattgccgtactgaccacaatatgttgcttctggcccacaggcatcatcgccatttttaaggcagtacaggtgagaactgccttagccaggggagacatggtgagtgcagaaatcgcatctagagaggcacggaacttttcgttcattagcctggcggtcggtattgcggcaatggttctgtgcacaatactgacagtagtcattatcatagcggcacaacaccatgaaaattactgggatccctag

SEQ ID NO: 219514 - DNA, 1909 bp, Artificial Sequence
  derived and/or modified sequence
cgccgctgccttcatctctccatctctgcgctgctgccggctgcgccatccagcacccagactccagcaccggccgaggacccccactccggctgcagggaccctgtcccagcgagaccgcaggcatgtcatccgaaaagtcaggactcccagactcagtccctcacacttctccgccgccctacaatgcccctcagcctccagccgaacccccagccccaccgccacaggcagccccttcctcacaccatcaccaccaccaccactaccatcagtctggcaccgccaccctcccgcgcttaggggcagggggcctggcctcttccgcggccaccgctcagcgcggtccctcctcctctgccacgctgccgaggcccccccaccacgcccctcccggccctgctgccggggcacccccacccggctgcgctaccttgccccgcatgccacccgacccttacctgcaggagactcgcttcgagggcccacttcccccgccgccgcccgctgccgccgccccgcccccgccggcgccagcccagactgcccaggcccctggcttcgtggtgcccacgcacgcggggactgtgggcacgctgccgctggggggctacgtagcgcccggataccccctgcagctgcagccttgcactgcttacgtgccggtctacccggtgggcacgccatatgcaggcgggaccccggggggaacaggagtgacctccactctccccccgccgccccagggcccagggctggccctactggagccgaggcgcccgccacacgactacatgcccatcgcggtgctgaccaccatctgttgcttctggcctactggcatcattgccatcttcaaggccgtgcaggtgcgcacggccttggcccgcggagacatggtgtcggccgagatcgcttcacgcgaggcccggaacttctccttcatctccctggccgtgggcatcgcggccatggtgctctgtaccatcctcaccgtagtcatcatcatcgccgcgcagcaccacgagaactactgggatccctaaaaacgcccctggtccggccccactctgcgcccctcgatctcccaggctctttctgcagtcataccgcggacccaatgggcgccctgcacacccgtttctggggccgtcagacttggatacatcgtaaactccgcctccacggaacgtctcgccttgcgagcaagctcggaatccagttcctcaggaacccctccaaaacccacacccccagggacgccgctttccgggatcccggccaaacgccggaccctcagtcgctccaggccccctcaccctcaaagtgtagcgcccccaaccgagcaacctcggtttggtccctaaaaccccgcctcctctataagcaccgccccagctctgacaaaaccccgcctccaggtcggcaggctccgccttcttttcttctccgcggggtgattcagtccagtgattgggtttgtggctccaggcctcgcccacagacggacagacccctccctttcttccggcaaaaggaccgagccctggggtagtaaggcccccacactcctgttttttgcaagtacatttttgtccctcctccacccaggtatctgcctattttcttgctaatcccagaacctttccttttgctttttttaaggacatttgggaagttcctggtgtaggacccttctccctgggataagaaacctgcctgtaaacgctctgtaaatactcccttccacccatcccagcccctgggcagccgggcagaagggaatccaggctatggacctcccaagtccccgctccccgctcccctcggcggccccgccttgttctgatctgtgtgtgagtgtgtgtgaacttctgaaagacaatattaaagagacttagttgattta

SEQ ID NO: 219515 - DNA, 921 bp, Artificial Sequence
  derived and/or modified sequence
atgtcgtctgaaaagagtggattaccagacagcgttccccatacttcgcccccaccatacaatgccccacaacctcctgccgagccgcctgccccacctcctcaggccgctccatcatcccatcatcatcaccatcatcactaccatcaatcaggcaccgccacgctccctagactgggggctggcggattggcatcatccgctgccactgcccagaggggcccaagttcatcagccactcttccaaggcctcctcaccacgctcctcccggtcccgctgccggtgcccctcctcccggatgcgccacactgccacggatgccccctgatccttaccttcaggagacacgtttcgaagggcctctgccaccacccccacccgctgcagcagctccccctccccctgctccagcccaaacagctcaggccccaggctttgtggtgcctacccacgctggtacagtcggcactctccccctggggggttatgtagctccagggtacccccttcagctccaaccctgtaccgcttatgtccctgtgtatccagtaggaaccccatatgccggtgggactcctggagggacgggtgtgaccagtactctgcctccgccaccccagggccctggcctggccctcttagaaccgaggcgccctcctcacgactatatgcctatcgccgtcttgaccacaatatgttgcttttggcctacaggcatcattgctatcttcaaagcagttcaggtccgaacagccctggcaaggggagacatggtgagcgcagaaatcgcaagtagagaggcacgtaatttctcatttatcagcttggcggtcggcattgctgcaatggtgctgtgcactatcctgacagtggtgatcataattgctgcccagcaccacgaaaattactgggacccgtag

SEQ ID NO: 219516 - DNA, 921 bp, Artificial Sequence
  derived and/or modified sequence
atgtcatcagagaagtccgggttgccagactctgttccacataccagtccgccaccttataacgctccgcagccccctgccgagccacctgcacctcccccacaagctgccccttcaagccaccaccaccatcatcatcactaccaccagtctggcaccgccactcttcctcgcctgggagcagggggtcttgcatcatctgcggctactgcacagcgtggcccttccagtagcgctacgttgccacgaccccctcaccacgcacctccaggacccgctgctggtgcccctcctccgggttgcgctactcttccgaggatgcccccagatccctacctgcaggaaacacgattcgaggggccactgccgcctccacccccagcggcagctgcgccacccccaccggctcctgctcagaccgcgcaggcccctgggttcgttgtgccgacgcacgccggtacagtgggcaccctgcctttgggcggatatgtggccccaggataccctttgcagctgcaaccgtgcaccgcttacgtgcccgtctacccagtggggaccccttacgcaggagggacccccggaggtactggggtgacgtctactttgccgcctccccctcaggggcctgggttagccctactggaaccaagacgtcctccccacgattacatgcccatagccgttctgaccacaatatgttgcttctggccgacaggaatcatcgccatctttaaagcggtgcaagtgcgcacggcacttgcacgcggtgacatggtctcggccgaaatagccagccgcgaagccaggaatttcagtttcatcagccttgccgtgggcatcgccgctatggtactttgcacaatactaaccgtggtcatcatcattgccgctcaacatcacgaaaattactgggacccctag

SEQ ID NO: 219517 - DNA, 921 bp, Artificial Sequence
  derived and/or modified sequence
atgtcttctgagaagtctgggctacctgatagcgtccctcataccagccccccaccatataatgcgccacagccgccagcagaaccccctgctcccccacctcaagcggcacctagttcgcaccatcatcatcaccaccactaccatcagtcgggtactgccacacttcctcgcctgggggctggcggtctggcctcttctgcagccaccgcacagcgcggaccctcttcctcggccactttaccacggccaccgcatcatgctcccccaggaccagccgcaggggctcccccaccaggctgtgccacactgccacgcatgccacctgacccctacctgcaggagacacggtttgagggcccactgccaccgccacctcctgcagcagctgcacccccaccacccgctcctgctcagactgcacaggcacctggattcgtggtgcccacccacgccggaacggtcgggaccttgcccctggggggatatgtcgctccaggatatcctttacagctgcagccctgcactgcctacgtccctgtctaccctgtcgggactccctatgcaggagggacaccaggcggtaccggagtgacttcaacccttccaccccctccacaaggcccagggctggcactactagagcctcggagacctccacacgactacatgcccatagccgttcttacgacgatctgctgtttttggcccactggcatcattgcaatctttaaagccgtgcaggtgcgaacagccctggcacggggagatatggtgagtgcagagatcgctagccgggaggctagaaatttctcattcatctctctggctgtgggcatcgccgcaatggtgctgtgcaccattctaacggttgtaattatcatcgccgctcagcatcacgagaattattgggacccctag

SEQ ID NO: 219518 - DNA, 921 bp, Artificial Sequence
  derived and/or modified sequence
atgtcctctgagaagagcggcctaccggatagtgtgccccacactagtccccctccatataatgctccccaacctccagcagagccccctgcacctccccctcaggccgctccttcatcccatcaccatcaccaccaccactaccaccagtccggaacagctaccctccccaggctcggggctgggggactcgcatctagtgccgctacagcacagcggggaccttcttcgagtgcaacgttgccacgcccacctcaccacgcccctcccggacccgcagctggggctcctccccctgggtgtgcaaccttgccccgtatgccacctgatccatacctacaggaaacaaggtttgaaggaccactgcccccacctccgcctgccgcagccgcacctccacctcccgctcctgcacaaactgctcaagccccaggattcgtggttcctactcacgctggaactgttggtaccctgccgcttggaggttacgtggcaccaggttacccactccaactgcagccctgtactgcttacgtaccagtgtaccccgtgggaacgccgtatgccggaggaaccccaggcggaaccggtgtgacgagcacactgccaccacctccacagggtccaggcctggcccttctggaacctcgacgaccacctcacgactatatgcctatcgcagtgctgactaccatctgttgcttttggcctactggcatcattgccatttttaaggctgtccaggtgagaaccgcccttgcaagaggtgacatggtgagtgcggagatcgcctcccgggaggcaaggaacttcagctttatatctcttgccgttggcatagctgccatggttctgtgtactatcctcacagttgtgataataatcgctgcccagcaccatgagaactactgggacccttag

SEQ ID NO: 219519 - DNA, 921 bp, Artificial Sequence
  derived and/or modified sequence
atgagtagcgagaagtctggactgccagacagtgtgccgcacacctctcccccaccttataatgctccacagccacccgctgaacccccagcacctccaccacaggctgctccgtcttcacatcatcatcaccatcatcactaccaccaatcaggaaccgccacgctgcccagacttggcgcaggcggactggcatcgagcgctgccactgcccagcgaggaccctcaagctccgccacgctgcccaggccccctcaccatgcccctcccggtccggctgccggtgcgcctcctccgggatgcgccacactgccccgtatgcctcctgatccctacctgcaggaaacgcggttcgaaggacccctgcccccacctccgcctgcagccgctgctccacccccaccagccccagcacagacggcacaggctccgggattcgtggtgcccacgcatgcaggcacagttggcacactgcctctcggcggttacgtcgccccaggatatccgttgcagctacagccctgcacagcatatgtgccggtatacccggtgggcacaccctacgccggtggaactccaggtgggactggagttacatctaccctaccccctcccccacagggtcccggattagccttgcttgagccgaggcgaccccctcatgactatatgcccattgcagtgctgacaacaatatgctgcttctggcccactggtatcattgctatctttaaggccgttcaggtacgtacagcattagctcgcggagatatggttagtgcagaaatcgctagtagagaggcacgcaatttttctttcatctctctggctgtgggcatcgccgctatggtgctctgcacgatcctcactgtcgtcattatcatcgctgctcagcatcacgagaactattgggatccatag

SEQ ID NO: 219520 - DNA, 921 bp, Artificial Sequence
  derived and/or modified sequence
atgagctctgagaaatcggggttacctgatagtgtgcctcacacaagtccccctccctataatgcccctcagccccctgctgagcccccagccccaccgcctcaagcagcccctagctcacatcaccatcaccatcaccattatcatcagagcgggactgctacattgcctagattgggcgctggtggtctcgcttcgtccgcagccaccgctcaacggggaccgtcaagctctgccacgcttcctaggcccccacaccatgcaccccctggtccagcagctggcgcacccccacctggctgtgccacccttcctcgaatgccaccagacccctacctccaggaaacacgtttcgagggacccctgccaccacctcctccagctgccgctgctccccctcccccagcaccagctcagaccgcccaggccccaggcttcgtagttccgacccatgctggaacggtaggaactttacccctaggaggctacgtggcaccaggatacccactgcaattgcagccctgcacggcctatgtcccagtgtacccggtcggtacaccctacgcaggcggtacccccggtgggactggtgtgacctccactttgccacctccgccacagggacctggattggctctgctggagccaagaagaccaccgcacgattacatgcccattgctgtgctgactacaatttgttgcttctggccgacaggtattatcgccatatttaaagcggtgcaggtacggaccgctcttgctaggggagacatggtgtcagctgagattgcctctcgcgaagcgaggaatttttctttcatcagcctcgctgtgggcattgccgctatggtgctatgtacaattttgacggtggtgataatcatagcagcacaacaccatgaaaattattgggatccgtag

SEQ ID NO: 219521 - DNA, 921 bp, Artificial Sequence
  derived and/or modified sequence
atgagctctgagaagagcggactgccggatagcgtcccacacacttctcccccaccgtataacgcaccccaaccacccgctgaacccccagcacccccaccacaagcggctccctcatcacaccaccaccaccaccaccactatcaccagtcaggcactgcaactcttcctagactgggtgcaggaggactggccagtagtgcggcaacagctcaaagaggcccttccagctctgctacactgcctagacctccacatcatgcccctccaggacctgcagcaggtgctcccccacccggttgtgcgacgctgccacgtatgcccccagacccctacctgcaagagactcgcttcgagggaccgctgcctccccctcctcccgctgccgcagctccacccccaccagcccctgcccagaccgcccaggccccaggatttgtggtccccactcacgctggcacagtcggcactctccccctggggggttacgtagctccaggataccccctccagctgcagccgtgtactgcttacgtgcccgtgtaccccgttggaacaccttatgcgggtgggactcctgggggaaccggggtgacctccaccctgccgcctccaccacagggacccggtttggccttgctggagccaaggaggccgccacatgactatatgcccatcgctgttctaactaccatctgctgtttttggccaactggaatcattgccatctttaaagccgtgcaagtgcgaacagccctggccaggggtgatatggtatctgccgagattgccagcagggaggccaggaacttctctttcatcagcctcgcagtcggaatagccgctatggttctatgcaccattttaaccgtcgtcatcatcattgccgcacagcaccacgagaactattgggacccatag

SEQ ID NO: 219522 - DNA, 921 bp, Artificial Sequence
  derived and/or modified sequence
atgtccagtgagaagagtggtttgcctgatagtgtcccccatacctcacccccgccctataacgccccgcagcctccggcagaaccaccagccccaccacctcaggcagccccctcctcccaccaccaccaccaccatcattaccatcagtccggcactgccactctacctaggttgggagccggaggcctggcatcttctgcagccacagctcagcggggcccttcctctagtgccactttgccacgaccgccacatcacgccccgcctggccccgccgctggagcacctccacctggctgtgctactctgccccggatgccgccagacccttatctgcaggagacaagatttgaggggccgctgccgcctccccccccagcggcggcagctccccccccccctgcacccgctcagactgctcaggcccccggatttgttgtacccacgcacgcgggcacggtgggtaccctgccactcggaggctacgtcgcccccggctaccctctccagttgcagccttgtaccgcgtacgtgccagtataccccgtgggcacgccatacgcgggcggaacacctggcggaactggcgtcacaagtaccctcccaccaccccctcagggcccgggactggctctattggagcctaggaggccgccccacgactacatgccaatagccgtgctcaccacgatttgctgcttctggcctacaggaattatcgcaatttttaaagcagttcaagttcggacggcacttgccaggggtgatatggtgagtgccgaaatagctagtagagaagcacgaaacttctctttcatttcactggccgtgggcatcgctgcaatggtcctgtgtaccatattgaccgtggtaatcattatcgctgctcagcatcatgagaactactgggatccttag

SEQ ID NO: 219523 - DNA, 921 bp, Artificial Sequence
  derived and/or modified sequence
atgagcagcgagaagagcggcctgcccgacagcgtgccccacaccagcccccctccgtacaacgctccccagcctcccgctgagccgccagcacctcccccccaagcagcaccctcatcccaccaccatcaccaccatcattatcaccagagcggcaccgctactttgcccagactcggggctggaggcctggcctcgtcagcagcaacagcccaacgagggccttcgtccagtgccaccctcccccggccccctcaccacgcaccacccggcccagccgccggcgccccccccccgggctgcgccaccttgccaaggatgcctcccgatccctacctgcaggaaacacggtttgaaggaccgttaccaccgccccctcctgcggcagccgcacctccacctcctgcacccgcccagacagcccaggcgcctggctttgtggtgccgactcacgcgggcactgtggggactctccctctgggtggctacgtcgcacctgggtaccccctccaattgcaaccatgcaccgcttatgtgcccgtctatcctgtaggaaccccctatgctggcggaacgcctggaggcactggcgtaacctccacactgccccctcccccgcagggtcctgggcttgcgctgctcgaaccgagaaggcccccccatgactacatgcctatcgccgtgcttaccacgatctgctgcttctggcccaccggaatcatcgctatattcaaggccgtccaagtgaggactgcgcttgccagaggcgacatggtgtccgccgagatagcgtctagggaggcaagaaatttttctttcatcagcctggcagttgggattgcagctatggttttatgtaccattctgactgtagttattattatcgcggcccagcaccacgaaaactattgggacccctag

SEQ ID NO: 219524 - DNA, 921 bp, Artificial Sequence
  derived and/or modified sequence
atgagttcagagaagagcgggttgcctgacagtgttccacacacaagtcctcctccatacaatgcaccgcagcctcctgccgaaccacctgcccctccccctcaggctgctcctagctcgcatcaccatcaccaccaccattaccaccagagtgggaccgcaacactcccgcgtctgggcgcaggcggactggcatcatcagcagctacggctcagaggggtccttctagttctgcaactctgccacgaccccctcatcacgcccctcccggacccgctgctggcgcacctccaccaggctgcgctacactcccaagaatgcctccggacccctatcttcaggagacccgtttcgaaggtccattgccacccccacccccagctgccgctgccccacctccacctgccccagcacaaacagcccaggccccagggtttgtggtccccacccatgctggcacggtcggaacactgcctctgggcggttacgtggcccctggctatccgctgcaactgcagccctgtacggcctacgtccctgtctacccggttgggactccttacgctggcggaacccccggaggtactggggtcacaagcactctgccacctccgccacagggtcccggactggcactgctcgaacctcgtcgacccccacacgattatatgcccatcgcagtcctgactacaatctgttgtttctggcccacaggcattattgccatcttcaaggctgtgcaagtcaggacggcgctcgcccgtggcgatatggtgtcagcggagatcgcgagtagagaggccaggaactttagttttatctcgttagctgtcggaatagccgctatggtgctgtgcactattctgacagtggtcatcattatagcagctcagcaccacgagaattattgggatccatag

SEQ ID NO: 219525 - protein, 293 aa, Artificial Sequence
  derived and/or modified sequence
MGSRAELCTLLGGFSFLLLLIPGEGAKGGSLRESQGVCSKQTLVVPLHYNESYSQPVYKPYLTLCAGRRICSTYRTMYRVMWREVRREVQQTHAVCCQGWKKRHPGALTCEAICAKPCLNGGVCVRPDQCECAPGWGGKHCHVDVDECRTSITLCSHHCFNTAGSFTCGCPHDLVLGVDGRTCMEGSPEPPTSASILSVAVREAEKDERALKQEIHELRGRLERLEQWAGQAGAWVRAVLPVPPEELQPEQVAELWGRGDRIESLSDQVLLLEERLGACSCEDNSLGLGVNHR

SEQ ID NO: 219526 - protein, 293 aa, Artificial Sequence [sequence omitted]

SEQ ID NO: 219527 - protein, 258 aa, Artificial Sequence
  derived and/or modified sequence
MGSRAELCTLLGGFSFLLLLIPGEGAKGGSLRESQGVCSKQTLVVPLHYNESYSQPVYKPYLTLCAGRRICSTYRTMYRVMWREVRREVQQTHAVCCQGWKKRHPGALTCEAICAKPCLNGGVCVRPDQCECAPGWGGKHCHVGSFTCGCPHDLVLGVDGRTCMEGSPEPPTSASILSVAVREAEKDERALKQEIHELRGRLERLEQWAGQAGAWVRAVLPVPPEELQPEQVAELWGRGDRIESLSDQVLLLEERLGA

SEQ ID NO: 219528 - protein, 258 aa, Artificial Sequence
  derived and/or modified sequence
MGSRAELCTLLGGFSFLLLLIPGEGAKGGSLRESQGVCSKQTLVVPLHYNESYSQPVYKPYLTLCAGRRICSTYRTMYRVMWREVKREVQQTHAVCCQGWKKRHPGALTCEAICAKPCLNGGVCVRPDQCECAPGWGGKHCHVGSFTCGCPHDLVLGVDGRTCMEGSPEPPTSASILSVAVREAEKDERALKQEIHELRGRLERLEQWAGQAGAWVRAVLPVPPEELQPEQVAELWGRGDRIESLSDQVLLLEERLGA

SEQ ID NO: 219529 - DNA, 882 bp, Artificial Sequence
  derived and/or modified sequence
atgggctctcgtgcagaactttgtacgctgctgggcggctttagcttcttgctactgctaattccaggggagggagcgaagggcggctcccttagagagagccaaggcgtgtgtagcaaacagacccttgtcgtcccattgcattacaacgagtcttactctcagcctgtatataagccttacctaacgctgtgtgcaggacgacgcatttgctccacatacagaactatgtacagggttatgtggagggaagtccggcgtgaggtccagcagacccacgccgtttgctgccagggttggaagaagagacaccccggtgctctgacctgtgaagccatttgtgcgaagccttgcctcaacggtggcgtgtgtgtacggccagaccagtgcgaatgcgcgcctggttggggaggcaagcattgccacgtggacgtagatgagtgtagaacgtcaatcacactatgctcccaccattgttttaatacagcgggctcgttcacctgcgggtgcccacatgacttagtgctgggagtcgatggcaggacatgcatggaagggagccctgagcctcccacatcggcctccattttatcagtggcggtcagagaggccgaaaaggatgaacgcgctttaaaacaggagattcatgaactgagggggcgccttgagagattggaacaatgggcagggcaggccggtgcttgggtgagggcggtgttgcctgttcctcccgaagagctacagcccgagcaggtggctgaactctgggggagaggagatcggatcgaaagcctttctgatcaagtgctgctgcttgaggagagactgggagcgtgctcgtgtgaggacaatagcctcggtttgggcgtcaaccacaggtag

SEQ ID NO: 219530 - DNA, 882 bp, Artificial Sequence
  derived and/or modified sequence
atgggatcacgcgccgaactatgtacgttgttaggtgggttctccttcctgttgttactgatcccaggcgagggtgccaagggggggtctttgcgggagtcccagggtgtgtgtagcaagcagacccttgtagtgcctttacactataatgagagctactcgcagcctgtttataagccatatcttacattatgcgccgggaggcgcatttgctcgacttatcgaaccatgtaccgggtaatgtggagagaagtccgccgggaagtgcagcaaacgcatgccgtgtgttgccaaggctggaagaagcggcaccccggcgcgttgacctgtgaggccatatgcgccaagccttgccttaatgggggggtgtgtgtccgacctgaccagtgcgaatgcgcacccggctggggtggaaagcactgtcatgtagatgtggatgaatgccggacgtcaattactctctgcagccaccattgcttcaatactgccggtagcttcacttgcgggtgtcctcatgaccttgtcctgggtgtggatggcaggacttgcatggaaggttctcctgagccccctacaagtgctagtattctctcagtggccgtaagagaggccgagaaagatgagcgcgccctcaagcaggaaatccacgagctgcgcgggcggctggaaagactggaacagtgggccgggcaggctggcgcatgggttagagctgtgctgccggtgcctccggaagaattgcagccggaacaggttgctgaactgtgggggcgcggagaccgaattgagtctctgtctgatcaggtgttgctgctggaggagcgtctcggcgcttgtagttgtgaggataattctctgggattgggggtgaaccatcgctag

SEQ ID NO: 219531 - DNA, 882 bp, Artificial Sequence
  derived and/or modified sequence
atgggatcccgggctgagctctgcacactcctaggggggttttcatttctgctgctgctgattccgggggagggggccaaagggggctccctgcgggagtctcagggagtgtgcagcaaacagacactcgtggttccactgcactataatgaaagctacagccagccggtctataaaccttacctgactctctgcgcaggtcgccgaatttgcagtacttacagaaccatgtatcgcgtgatgtggagggaggttaagagagaagttcagcagacacacgctgtttgctgccagggatggaagaagaggcacccaggagccctcacgtgcgaagccatatgtgcaaagccatgcctgaatggcggggtctgcgtcaggcccgatcaatgtgaatgcgccccgggctggggcggaaagcattgccacgtggatgtggatgagtgccgcacctccattaccctttgctcccaccactgcttcaatacagccggaagctttacctgcggctgtccccacgacctggtactgggagtggatgggcgaacatgcatggagggatcacctgagcccccaacaagcgcctccatcctttccgtcgctgttcgcgaggccgagaaggacgaaagagcactgaagcaggaaatccacgaactgaggggcaggctcgagcgtctggaacagtgggccggtcaggctggagcatgggtgcgcgcggtcctgcccgtgccacctgaagagctgcagcctgagcaggtggctgagctgtggggccgtggtgaccgcatcgagtccctgtcagaccaagtcctgctgttagaagagcgcctgggagcatgctcctgcgaagacaattcactcggcttgggagtgaaccacagatag

SEQ ID NO: 219532 - DNA, 777 bp, Artificial Sequence
  derived and/or modified sequence
atgggatctcgagctgagttatgtaccttgctggggggtttttctttcctgctgctgttaatcccaggcgaaggagccaagggcggaagtcttagagaaagccagggtgtctgctcaaaacagacactggttgttcccctgcactataacgagagctattctcagccggtttacaaaccctatttaacactgtgtgctggacggcggatttgcagcacctatcggaccatgtatagggtgatgtggcgcgaggtgagacgggaggtccagcagacccacgcagtttgttgccagggatggaaaaagcgccatccaggagctctgacctgcgaagccatctgcgctaagccatgcttgaacggcggagtgtgcgtgcgcccagaccagtgcgagtgcgcgcctggctggggaggcaagcactgtcatgtaggcagtttcacctgtggatgcccgcatgatctcgtactcggagtagatgggcggacatgcatggaaggtagtccagaacccccgaccagcgcctccattctgagtgtggccgtgagagaagctgagaaagacgagagggctttaaaacaggagatacacgagctgaggggacgactcgaaagattagagcagtgggcagggcaggcgggcgcatgggtgagggccgtgcttccagttcctcccgaggaattgcagcctgaacaagttgcagagttgtggggaagaggggatcgcatagagagtttaagcgatcaggtgctcctcctggaagagcgtttaggcgcttag

SEQ ID NO: 219533 - DNA, 882 bp, Artificial Sequence
  derived and/or modified sequence
atgggatctcgggcagagctgtgtaccctgctggggggcttctccttcctcctgttgctgatcccgggggaaggagccaagggtggctccttacgggagtctcagggggtatgctctaagcagacactcgttgttcccctgcactataatgagagctatagccagcctgtctacaagccatatttgaccctctgcgccgggcgccggatctgtagtacatatagaaccatgtacagggtgatgtggcgagaggtgagaagagaggtgcagcagacccacgccgtatgctgtcagggatggaaaaagagacacccaggtgccctcacctgcgaagccatatgtgcgaagccatgcctgaacggcggggtttgcgttcgccccgaccagtgtgagtgcgcccctggatggggtggaaaacattgccacgtcgacgtcgatgaatgcaggactagtatcaccttgtgttcacatcattgcttcaataccgcggggtccttcacatgtgggtgccctcatgacctggtgctgggggttgatggtcggacctgcatggagggaagcccggagccacctaccagtgcttcaatcttaagcgtggccgttcgggaggccgagaaggatgagcgggctctgaaacaggagatccacgagctacgcggtcgattggagaggctggagcagtgggcagggcaggcgggcgcttgggtcagggctgtactgcctgtaccgccagaggagcttcagcctgagcaagtcgccgaactgtggggtcggggggataggatagagtcgctgagtgaccaggtgctcttattagaagagagactgggcgcctgctcctgtgaggataacagtttggggctgggcgtgaatcatcgctag

SEQ ID NO: 219534 - DNA, 882 bp, Artificial Sequence
  derived and/or modified sequence
atgggatcacgtgccgaactgtgcaccctgcttgggggcttctcatttctgcttctactgattccaggagagggagctaaaggaggcagcctgagggaatcacagggagtttgtagcaaacagaccttggttgtgccactccactataatgaatcttatagccagccggtgtacaagccataccttacactgtgtgccggacggagaatatgctcgacctataggactatgtatcgcgtgatgtggcgagaggtacggcgagaggtccaacaaacccatgctgtttgctgccaaggatggaagaagagacaccccggcgccttaacttgtgaggctatctgcgcaaaaccatgccttaatggtggcgtttgtgtacgacccgatcagtgtgaatgcgctcccggatgggggggcaaacattgccatgtggacgtcgatgagtgtagaacatctattaccctgtgtagccaccactgtttcaacacagcaggaagcttcacctgcgggtgccctcacgacctagtgctgggcgtggacgggagaacatgtatggagggctcacccgagcctccaacgagcgcgagcatcctgagcgtggctgttagggaggcagaaaaagacgagagagctctgaagcaggagatacacgaactgagaggccgccttgaacgcctcgaacagtgggcgggtcaagccggcgcatgggtacgagcggtcctgccggtgccgccagaagaattgcagcctgaacaggtcgctgagttatggggccggggtgatcggatcgaaagtctatctgatcaagtgttgctactcgaagagcgtctgggagcatgtagctgcgaggataactcactgggcctgggcgtgaatcatcgctag

SEQ ID NO: 219535 - DNA, 882 bp, Artificial Sequence
  derived and/or modified sequence
atgggatcccgggccgaattgtgcactcttttaggcgggttttcattcctgttacttctaatcccaggcgaaggcgcaaagggaggatcactaagagaatcccagggggtgtgttctaagcagacacttgtcgtacccctgcattacaacgaatcctactctcagccagtgtacaagccttacctgacactctgtgctggaaggcgaatctgcagcacctaccggactatgtacagagtcatgtggcgcgaggtgcggagggaggtacagcaaacccatgcggtgtgctgccagggctggaagaagcgacacccaggagcgcttacgtgtgaagctatatgtgcaaagccatgcttgaatggaggagtgtgcgtcagacctgatcagtgcgaatgcgctcctgggtggggcgggaagcactgtcacgtcgacgtcgatgagtgcaggacctctattaccctgtgctcccaccactgtttcaacacagcagggtccttcacatgcggatgcccacatgacctggtattgggcgtcgatggccggacatgtatggagggatctccagagccaccaacatctgcctccatcctgtcagtggcagtgagagaagccgagaaagacgagcgggcattgaaacaggagatccacgagctgagaggtcgactggagcggctggagcaatgggccggtcaggcaggtgcatgggtgcgcgctgtgcttcctgtgcctcccgaggagctccagcccgagcaggtggccgagctatgggggcgtggggatcgcatcgaatcgttgtcagatcaagtgctgcttctggaggagaggcttggcgcctgtagttgcgaagataatagcctcggcctgggggtcaatcacaggtag

SEQ ID NO: 219536 - DNA, 777 bp, Artificial Sequence
  derived and/or modified sequence
atgggtagccgggcggaactgtgcacacttctgggcggattttcttttctgttactcctcattcccggggaaggcgctaaggggggaagcttgcgcgaatcacagggggtgtgctctaagcaaaccctggtggttcctctgcattataatgaatcctacagccagccagtgtataaaccttacttgaccctgtgtgccggtcggagaatctgttctacctacagaactatgtacagagttatgtggcgggaggtccggagagaagtccagcagacacacgccgtttgttgtcagggttggaaaaagcgccacccgggggccctaacctgcgaagccatttgtgctaagccgtgtctgaatgggggggtgtgtgtgcgtccagaccagtgcgaatgcgccccgggatggggcggtaagcactgtcacgtgggttcctttacctgtggctgccctcatgatctcgtgctcggagtagatgggcggacatgtatggaggggtcgcccgaaccccccacttccgcatctatactgagtgtggcagtgagagaggcagagaaggacgaacgggctcttaaacaagagattcatgagcttagaggcagattagagagacttgagcagtgggccgggcaggcaggagcctgggtaagggccgtgcttcccgtgcctccagaggagctgcaacccgagcaagtcgccgagctgtggggccggggggaccgcatagagtccctgagcgaccaggtgctcctgctggaagaacggctcggtgcttag

SEQ ID NO: 219537 - DNA, 777 bp, Artificial Sequence
  derived and/or modified sequence
atgggaagccgcgctgagttgtgcacgctgttagggggattttccttcctgttgctcctgattcccggcgagggagcgaagggtggcagtctcagagaaagccagggagtttgcagcaaacagaccctggtcgttccactccattacaatgaatcttactcacagcctgtttataaaccatatctcacactgtgcgcggggcgccgaatttgctctacctatcgcacaatgtatcgagtgatgtggagagaggtgagaagggaagttcagcagacacatgccgtttgctgccagggctggaaaaagagacatcccggggcactgacttgcgaggccatctgcgctaagccatgtctcaatggcggtgtttgcgtgcgccctgatcagtgtgagtgtgcgcccggttggggggggaaacactgccacgtgggctccttcacctgtggctgtccccatgacctggtgctcggcgtagatggccgcacttgcatggaaggatcacctgaaccaccgacctccgcttccattctgtctgtcgccgtacgtgaggctgagaaggatgaacgagccctaaagcaggaaatccatgagttgcggggccggctggagcgcctggagcagtgggctggacaagcgggagcttgggtgcgggctgtgctcccagtgccaccggaggaattgcagccagagcaggtggccgagctgtggggccgcggcgatcgcatcgagagcttgagcgaccaggtcctcttgttggaagaacgtctaggagcctag

SEQ ID NO: 219538 - DNA, 777 bp, Artificial Sequence
  derived and/or modified sequence
atggggtcacgggctgagttgtgcaccctgctgggggggttttccttcttgctcctactgataccgggagagggggctaagggagggtccttaagagagtctcaaggagtttgcagcaagcaaactctggttgtccccctccactacaatgagtcctacagccaacccgtgtacaagccttatctcaccctctgcgctggccgcagaatatgtagcacatacagaacgatgtacagagtcatgtggcgggaggtgaagcgggaggtgcaacagacccacgccgtatgttgtcagggatggaaaaagagacacccaggagcactcacatgtgaagccatttgcgcaaaaccgtgcctgaacggtggagtatgtgtccgaccagatcagtgcgaatgtgcccctggatggggagggaagcattgtcacgtgggaagctttacatgcggctgcccccatgacctggtgctgggggtcgacggccggacatgcatggaagggtcccccgagcccccgacgagcgcttccatcctgagcgtggctgtgcgggaggctgagaaggatgagcgagccctcaaacaggagatacacgagctgaggggacgactcgagcgattagagcagtgggccggccaggccggagcatgggtgagagcagtgctgcccgttcccccagaggagctacagcccgagcaggtggcagagctgtggggccgcggagaccggattgagagcctcagcgatcaggtgctactgttggaggagaggttgggggcgtag

SEQ ID NO: 219539 - DNA, 882 bp, Artificial Sequence
  derived and/or modified sequence
atgggcagtcgcgcagagctctgtacccttctgggaggcttcagttttctcctgctcctcataccgggcgagggcgccaagggaggctccctgcgtgaatctcaaggtgtgtgctcaaagcagaccctcgttgtgcctctgcactacaacgagtcatattctcagcccgtatataagccttacttgacgctgtgtgcaggaaggcgcatatgctccacttatagaacaatgtacagagttatgtggcgtgaggtccgccgagaggtacagcagactcatgctgtgtgctgccaggggtggaagaagcgtcaccctggggctctcacatgtgaggccatttgcgcgaagccgtgccttaacgggggagtgtgcgtgagacctgaccagtgtgaatgtgctcccggttgggggggcaagcactgccatgtggacgtagacgaatgccgaacctccatcaccctttgctcccatcactgctttaacactgccggtagcttcacgtgcggatgcccgcacgatttggtgctgggggttgatgggcggacctgcatggaggggtcacctgaacctcctacttcagcctcaatcctttctgttgctgttcgggaggccgaaaaggacgagagagcgcttaaacaggaaattcatgagctccgcggccgcctggagcggctggagcagtgggccggccaggccggcgcatgggtccgtgcggtcctccctgtgcccccagaggaactgcagcctgaacaggtggcagaactttggggcagaggtgatcgcattgagtcactgagcgatcaagtcctgctgttggaagagagactgggagcttgttcatgcgaggacaattctctcggattaggagtcaatcataggtag

SEQ ID NO: 219540 - DNA, 882 bp, Artificial Sequence
  derived and/or modified sequence
atgggttctagggctgaactgtgcacactcttgggcgggttttccttcttgctgctgctcattcctggtgagggcgcaaaggggggatccctccgggagtctcagggcgtgtgcagcaagcaaacactggtggtccccctgcattacaatgaaagttacagccagccagtctacaaaccctacctgaccttatgcgccgggagacggatttgctcaacgtaccgaaccatgtaccgagtcatgtggagggaggtgaggcgtgaggtgcagcaaacgcacgccgtctgttgtcaaggctggaagaagcgacatcccggagccttgacctgcgaggctatatgcgcaaagccatgcctgaatggtggagtgtgtgtgcgcccggaccagtgcgagtgcgcccctggctggggcggcaagcactgccatgttgacgttgacgagtgcagaacatctattaccttgtgttcccatcactgcttcaacaccgccggtagcttcacctgtggctgtcctcatgatctcgttctaggcgttgatggtcgcacatgtatggagggaagtcccgagccacccacctccgcatccatcctcagtgttgcagtacgcgaagctgaaaaagatgaacgagccctgaaacaggagatccatgaacttaggggccgcctggagagactggaacagtgggctggccaagcgggcgcatgggtgcgggccgtgttgcccgtgcctcctgaggaattgcaaccggagcaggtggctgagctctgggggcgcggggatcgaatagagagcctgtccgaccaggtgctccttctcgaggaaagactgggggcctgtagctgtgaagataacagcctggggttgggtgttaaccaccgctag

SEQ ID NO: 219541 - DNA, 882 bp, Artificial Sequence
  derived and/or modified sequence
atgggcagcagggccgagctctgtacacttctggggggcttctcatttttacttctccttatacctggagaaggagccaagggtggatccctgagggagtcacagggcgtttgctcaaagcagacactggtggtgcccctccattataatgagtcctatagccagcccgtgtataagccatacttaacactgtgcgcaggcaggcgcatctgtagcacatatagaacaatgtatcgcgttatgtggagagaggtacgccgcgaggtgcagcagacccatgcagtttgctgccaaggctggaagaagcgccatcccggggcacttacctgtgaagccatctgtgccaagccatgcctgaacggcggggtgtgtgtgcgacctgaccagtgtgaatgtgctcccgggtggggcggcaaacactgccatgtggatgtcgatgagtgccgtacgagcatcacactctgcagccaccactgcttcaacactgccgggtccttcacatgtggctgccctcacgacctggtgttaggagtggatggccggacatgcatggaaggcagcccggaaccacctacctctgcctccatacttagcgtggccgtgagagaagctgaaaaggacgagcgcgcccttaagcaagaaatccacgaactgagaggccggcttgaacgcctagagcagtgggccggtcaggcaggggcatgggtacgagccgtgctacccgttccaccagaggagctccagcccgagcaagtcgcagaactttggggccggggagaccgcatagagtcattatccgaccaggtcctgctgttagaggaacgtttaggggcgtgctcttgtgaggacaacagccttggccttggtgtaaaccatagatag

SEQ ID NO: 219542 - DNA, 882 bp, Artificial Sequence
  derived and/or modified sequence
atgggctcgcgtgcggagttgtgcacccttcttgggggctttagtttcctgctgctgctcatccccggggaaggagcaaagggggggtctctccgggagagccaaggagtgtgtagcaagcaaaccctcgtcgttcccctgcactacaacgaatcttactctcagccggtgtataaaccttaccttaccttatgtgctgggcgcagaatatgttcgacctatagaactatgtacagagtcatgtggcgagaagtgaaacgcgaggtgcaacagacgcatgccgtgtgttgtcagggctggaagaaacgccacccaggcgctcttacttgcgaagcaatttgtgcaaaaccatgcctgaatggcggtgtctgcgtgagaccagatcagtgcgagtgcgcccctgggtgggggggtaaacactgccatgtcgatgtggatgaatgtcgtaccagcattactctgtgttctcatcattgcttcaatactgcaggcagctttacatgcggatgtcctcatgatttagtcctgggagttgacggacggacctgcatggaaggttcccccgagcctcctacttcagcaagcatcctgtcagtagccgtaagggaagctgaaaaggatgaacgcgcacttaaacaggaaattcacgagctgcgcggccggcttgagagactcgaacaatgggctggacaggcaggcgcatgggtgagagctgtcttgcctgtgccaccagaagagctgcagccggagcaggttgcagaactatggggaaggggcgaccgcattgagagcttgtctgaccaggtcctccttttggaggaacggctgggagcatgttcctgcgaggacaactcccttggccttggcgtgaatcatcgttag

SEQ ID NO: 219543 - DNA, 882 bp, Artificial Sequence
  derived and/or modified sequence
atgggatccagagctgagctgtgtacccttctgggtggcttctcatttttgctgcttctcatcccaggcgaaggggccaagggcggaagcctgcgcgagtctcagggcgtgtgcagtaagcagactctggtggtccctctgcactacaacgaaagctacagccaacctgtctacaagccctatctgactctctgcgctggccgtcgcatttgtagcacataccgcacaatgtaccgagttatgtggagagaggtaaggcgcgaggtccagcagacacacgcagtgtgctgtcagggctggaagaagcgtcatcccggcgcccttacctgtgaagccatctgcgccaaaccatgtctgaacgggggtgtctgtgtaaggcctgaccagtgtgagtgtgcaccgggatggggcggaaagcactgtcatgtggacgttgacgagtgccggacctccatcaccctgtgctcccaccactgcttcaacaccgccggatcctttacatgtggctgtccacatgacttggtcctgggcgtggacggtcggacgtgtatggagggctctccagaacccccgactagcgcctctatccttagtgtcgctgtccgtgaggccgagaaagacgagagagcactgaagcaggagatccatgagcttaggggacggcttgaacggcttgaacagtgggctggtcaggctggagcttgggttcgtgctgtactgcccgtacctcccgaagaactccaacccgaacaagtggcagagttgtggggaaggggcgaccgtattgagagcctcagtgaccaggtgctcctgctggaagagagactgggcgcttgctcttgcgaggataactcattaggtctgggcgtcaaccacagatag

SEQ ID NO: 219544 - DNA, 882 bp, Artificial Sequence
  derived and/or modified sequence
atggggagcagagccgaattgtgcacactcctgggaggcttctcttttctcttgcttttgatcccaggagaaggcgccaaaggagggagcttacgagagtcacaaggcgtgtgcagcaaacagactctggtcgttcctctgcactataacgagtcctactcccagcctgtgtacaagccttatctcactctttgtgcaggccggagaatatgttccacctaccggacgatgtatagagtgatgtggagggaagtccggagagaggtgcagcaaacacatgctgtatgctgccaagggtggaagaagcgccatccaggagcccttacatgcgaggctatctgcgctaaaccatgtctcaacggcggcgtgtgcgttagacctgatcagtgcgaatgcgctcctgggtggggcggaaaacattgccatgtcgacgtggatgaatgccgcacttccataacattatgctctcaccactgctttaatactgccggttcttttacatgcggatgtccgcatgatctcgttcttggagtcgacgggcgcacctgtatggagggatcccctgagcccccaacttctgcatctatcctttccgtggctgtcagggaagcagagaaggacgagagggcactgaagcaagaaattcatgagctcagaggccgactggagcggttggagcagtgggctggccaggcgggggcctgggtcagagcagttcttcctgtaccccctgaggaacttcagcctgagcaggtcgccgagctctggggtcgaggagatcgaattgaatctttgagtgatcaggtgcttttgctagaagaacggcttggggcttgcagctgtgaggacaattccctgggactaggagttaatcaccgatag

SEQ ID NO: 219545 - DNA, 882 bp, Artificial Sequence
  derived and/or modified sequence
atggggtctagagccgagctgtgcacattgttgggaggattttcgttcctgctgctgctgattcctggggagggagccaagggggggagtctgagagagagccagggagtgtgctcaaaacagacacttgtggtgccgctccattacaacgagtcatatagtcaaccagtttataagccataccttactctatgtgctggtaggcgaatctgctctacttacaggacaatgtacagagtgatgtggagggaagtccgtcgggaggtacagcagacgcacgctgtctgttgccagggctggaagaagagacatcccggggccctcacatgtgaggcaatttgtgctaaaccatgcctcaacggcggggtgtgtgttcgccctgaccaatgcgaatgcgcacctgggtggggcgggaagcattgccacgtggacgtcgacgaatgcaggaccagcataactttatgttcacaccattgtttcaacactgccggctcatttacttgcggctgtccccatgatttggtgctgggtgtggatgggaggacctgtatggagggctcaccggaacctccgacctctgcctcaattctgtccgtcgccgtaagggaggctgagaaagatgaacgggccctcaagcaggagattcacgagctgaggggtcgactggagagactggagcagtgggcaggccaagctggagcttgggtgagagcagttctgcccgtgccacccgaggaattgcagcccgagcaagtggccgagctatggggccggggagaccgcattgagtccctgtccgatcaagtgctgctgttggaggaacgtttgggcgcgtgcagctgtgaggacaattccctgggcctcggagtgaaccaccgctag

SEQ ID NO: 219546 - DNA, 777 bp, Artificial Sequence
  derived and/or modified sequence
atggggtcccgggcagagctgtgcactctgctgggggggttttcattcctgctactgctcattcccggggaaggcgctaaaggtgggagcctgcgcgaaagtcagggggtgtgctcaaagcagacacttgtcgtgccactgcactacaacgagagctatagccaacctgtttacaagccctacctcacactgtgcgccggaagaagaatctgtagtacataccgcaccatgtaccgggtgatgtggcgcgaagtgaggcgggaagtgcagcagacgcacgctgtgtgttgccagggatggaagaagagacaccccggggcactgacctgtgaagcaatctgcgctaagccctgcctgaacgggggggtctgcgtgcgacccgatcaatgtgaatgtgcacctggatggggcggaaagcactgtcatgtggggtccttcacctgtgggtgtcctcacgacctggtgctgggagtggacggccgcacttgtatggaaggatctcctgaaccccctacgagcgcgagtatcctgagcgtagcagtcagggaggccgaaaaggacgaacgagcactgaagcaggagattcacgaactgcgaggtaggctagagcgactcgaacaatgggctggacaggcgggggcgtgggtaagggccgtgcttccggtccctccggaggaattacagcccgaacaggtggccgaactgtggggtcgcggcgacagaatagaatccctttccgaccaagtgctactactggaggagcggcttggggcctag

SEQ ID NO: 219547 - DNA, 882 bp, Artificial Sequence
  derived and/or modified sequence
atggggagccgggccgagttgtgtacacttctcggaggcttcagtttcctgctgctcctgataccgggcgaaggggccaaaggaggatctttgagagagtctcagggcgtgtgttctaaacagactctcgtggtgcctctgcattacaacgagtcttactcacaacctgtgtacaaaccctatctcacactatgcgcaggcagacgcatttgcagcacctacaggacaatgtaccgcgtgatgtggcgggaagtgcgcagagaggtgcagcagacccacgccgtttgctgccaagggtggaaaaaaaggcatccaggtgcattaacgtgcgaagccatctgcgcaaagccctgccttaatgggggcgtctgtgtgcggcctgaccaatgcgagtgtgcacccgggtggggaggaaaacactgtcatgtcgacgtggatgaatgccgaacaagcatcacactttgcagccaccattgctttaacactgcagggagctttacttgtggatgtccgcatgatctcgtgcttggggtcgatggtcgaacctgtatggaaggcagcccggaaccgccgacttcagcaagtattctctccgtcgcagtgagagaagccgagaaagacgagcgggccctgaagcaagaaattcatgaactgcggggacgactggagcggctggaacaatgggcagggcaggcaggagcgtgggtgagggccgtcttgcccgtccccccagaagagctgcaacctgaacaggttgccgagttatggggtcgcggcgaccgtatagaatccctgagtgaccaagtcttactgctggaagagaggttgggagcctgcagctgcgaagacaattcactgggattgggggttaatcatcggtag

SEQ ID NO: 219548 - DNA, 882 bp, Artificial Sequence
  derived and/or modified sequence
atgggttcccgcgcggaactctgcacccttctcggcggatttagtttccttcttctgctaattccaggggaaggcgctaagggtggatcactcagagaatcacaaggagtctgcagcaagcagacactggttgttcccctccactacaatgaaagttacagtcagccagtgtataaaccatacctcacactgtgtgccgggcggagaatctgctccacttatagaacgatgtatagagtcatgtggcgagaggtgcgcagggaggttcagcagactcatgctgtgtgttgtcagggatggaaaaagagacaccccggagctttgacttgcgaagcaatttgcgcaaagccttgtctgaacgggggagtctgtgttcgccctgaccagtgtgagtgcgctccggggtggggcggaaagcactgccacgtcgacgtggacgagtgtcgaacctcaataaccctatgtagtcatcactgtttcaacacggctggcagttttacctgcgggtgcccccatgatctggtgctgggtgtcgatgggcggacctgtatggaaggtagtcctgaacccccaactagtgcctccatcttgagtgttgccgttagggaggccgaaaaggacgaacgcgcgcttaagcaagaaatccatgaacttcggggtcggcttgaaagactcgaacagtgggctggtcaggccggcgcatgggtccgtgcagtgctgcctgtgccaccggaagaacttcagccagagcaggtggcagagctttggggcagaggtgacaggatagagagcttgtccgaccaagtcttattactggaagagaggttgggcgcctgtagctgtgaggataactccctggggcttggcgtgaaccaccggtag

SEQ ID NO: 219549 - DNA, 882 bp, Artificial Sequence
  derived and/or modified sequence
atgggcagccgggccgagctgtgtacgctgttaggtgggttttccttcttgcttctccttattcctggagagggggcaaagggagggagtctcagagaatctcagggtgtgtgttctaagcagaccctcgtcgtgcctctccattacaacgagagctatagtcagccagtttataaaccctacctgaccctttgtgccggaaggaggatctgctcaacctatcgcacaatgtaccgggtaatgtggagggaggtgagaagggaagtgcaacagacccacgcggtctgttgccagggatggaagaagagacatccgggagccctgacctgcgaagccatttgtgccaagccatgtctgaatggcggcgtctgtgtccgtccagatcagtgcgaatgtgctccaggatggggcgggaagcactgccatgtcgacgttgacgagtgcagaacttccattacactgtgtagccatcactgctttaatacagccggatcttttacatgcggctgccctcacgacctcgtgttgggagttgatggccgcacgtgcatggaggggtcgccggagccacccaccagcgcctctatcttgagcgtagccgtacgtgaggcagaaaaggatgagcgcgcactgaaacaggagattcatgagctgcgtggccgactggaacgcctggaacagtgggctgggcaagcgggcgcctgggtccgtgcggtccttccggtgcctcctgaggaactgcagcccgagcaggtggcagaactgtggggcagaggcgaccgaatcgaaagcctcagcgaccaggtgctgctcctcgaagaaaggctcggcgcttgctcatgtgaagacaactcacttgggctcggcgtaaatcaccggtag

SEQ ID NO: 219550 - DNA, 882 bp, Artificial Sequence
  derived and/or modified sequence
atgggttctagagctgagctgtgtacgcttttaggcgggttctcgtttctgttattactcatcccaggggaaggcgccaaaggcggatccctgcgggagtcccaaggtgtttgcagcaaacagactctggtcgtgccactccactataacgagagctactctcagcctgtgtataaaccatacctcaccttgtgcgctgggcgacggatctgttcaacctacagaaccatgtatcgcgtgatgtggcgcgaggtgagaagggaggtacagcaaactcatgctgtgtgctgtcagggatggaaaaagagacatcctggtgctctgacatgcgaggccatctgcgccaagccatgtttaaacggcggtgtatgtgttaggcctgatcagtgtgagtgcgctcctgggtggggtgggaagcattgccacgtcgacgtagacgagtgccgaacctctataactctttgctctcatcactgtttcaacactgccggatcctttacctgcgggtgcccccacgacctggtgctgggagtagatgggcgcacgtgcatggagggttccccggaacctcccacctcggctagtatactgagcgtggctgtgcgggaagcagagaaagatgagcgtgcacttaagcaagaaatccacgagctgaggggccgcttagagcggctggagcagtgggctggccaagccggagcatgggtgcgcgctgtgcttccagttccacccgaagaactgcaacctgaacaggtggcggaactgtggggtaggggtgataggatcgagagtctgtccgatcaagttctgctcctggaggaaagactcggagcttgtagttgtgaggacaatagcttgggcttgggcgtgaaccaccgttag

SEQ ID NO: 219551 - DNA, 882 bp, Artificial Sequence
  derived and/or modified sequence
atgggctcacgggctgagctatgcacactcctcggggggttttcgttcttgctgctactcatcccaggcgagggggctaagggtggcagcttgcgggagagccagggtgtctgctcgaaacaaactctggtggtgcctctgcattacaacgagtcttacagtcaacctgtctacaaaccctacctgactctgtgcgcagggcgacggatatgctccacctatcgcaccatgtaccgggttatgtggagggaagtgagacgcgaagtgcagcagacacatgcagtttgttgtcaggggtggaagaagcgacatcccggtgccctcacctgtgaagctatctgtgcaaaaccttgtctgaacggcggcgtctgtgtgaggccagaccagtgcgaatgtgcgcctggctggggtggaaaacactgccacgtggacgtggacgagtgtaggacttctatcaccttatgctcccatcactgctttaatactgccgggtcctttacgtgcgggtgtccacacgacctggtcctcggcgtggatggccgaacctgcatggaggggtcccctgagcctccaaccagtgcgagcatcctgtcagtcgccgtccgagaagccgagaaagatgagagggcgttgaagcaggagattcatgagctgcgtggccgactggagagactggaacagtgggctggccaggccggtgcatgggttcgggcggttctcccagtgccacccgaggaactgcagccagagcaggtcgccgagctgtggggccggggtgatcggatagaatctctttcagatcaggtgttattactcgaggagcgcctgggagcatgcagttgcgaggacaattcactgggattgggggttaaccataggtag

SEQ ID NO: 219552 - DNA, 882 bp, Artificial Sequence
  derived and/or modified sequence
atgggcagcagagctgagctgtgcaccctgctgggcggcttctccttcctgctgctgctgatccctggagagggcgccaagggcggcagcctgcgggagagccagggcgtgtgcagcaagcagaccctggtggtgcccctgcactacaatgaaagctacagccagcctgtgtacaagccctacctgaccctgtgtgccggccgccgcatctgcagcacctaccgcaccatgtacagagtgatgtggagggaggtgcggcgggaggtgcagcagacccatgctgtgtgctgccagggctggaagaagaggcaccctggggccctgacctgtgaggccatctgtgccaagccctgcctgaatggaggagtgtgtgtgcggccagaccagtgtgaatgtgcccctggctggggcggcaagcactgccacgtggatgtggatgaatgtaggaccagcatcaccctgtgcagccaccactgcttcaacacagctggcagcttcacctgtggctgcccccatgacctggtgctgggcgtggatggccgcacctgcatggagggcagccctgagccccccaccagcgccagcatcctgtctgtggccgtgcgggaggccgagaaggatgagcgggccctgaagcaggagatccacgagctgcggggccgcctggagcggctggagcagtgggccggccaggccggggcctgggtgcgggctgtgctgcctgtgcccccagaggagctgcagcctgagcaggtggccgagctgtggggccgcggggaccgcatcgagagcctgagtgaccaggtgctgctgctggaggagcggctgggcgcctgcagctgtgaggacaacagcctgggcctgggcgtgaaccacaggtag

SEQ ID NO: 219553 - DNA, 882 bp, Artificial Sequence
  derived and/or modified sequence
atgggcagcagagctgagctgtgcaccctgctgggcggcttctccttcctgctgctgctgatccctggagagggcgccaagggcggcagcctgcgggagagccagggcgtgtgcagcaagcagaccctggtggtgcccctgcactacaatgaaagctacagccagcctgtgtacaagccctacctgaccctgtgtgccggccgccgcatctgcagcacctaccgcaccatgtacagagtgatgtggagggaggtgaagcgggaggtgcagcagacccatgctgtgtgctgccagggctggaagaagaggcaccctggggccctgacctgtgaggccatctgtgccaagccctgcctgaatggaggagtgtgtgtgcggccagaccagtgtgaatgtgcccctggctggggcggcaagcactgccacgtggatgtggatgaatgtaggaccagcatcaccctgtgcagccaccactgcttcaacacagctggcagcttcacctgtggctgcccccatgacctggtgctgggcgtggatggccgcacctgcatggagggcagccctgagccccccaccagcgccagcatcctgtctgtggccgtgcgggaggccgagaaggatgagcgggccctgaagcaggagatccacgagctgcggggccgcctggagcggctggagcagtgggccggccaggccggggcctgggtgcgggctgtgctgcctgtgcccccagaggagctgcagcctgagcaggtggccgagctgtggggccgcggggaccgcatcgagagcctgagtgaccaggtgctgctgctggaggagcggctgggcgcctgcagctgtgaggacaacagcctgggcctgggcgtgaaccacaggtag

SEQ ID NO: 219554 - DNA, 777 bp, Artificial Sequence
  derived and/or modified sequence
atgggcagcagagctgagctgtgcaccctgctgggcggcttctccttcctgctgctgctgatccctggagagggcgccaagggcggcagcctgcgggagagccagggcgtgtgcagcaagcagaccctggtggtgcccctgcactacaatgaaagctacagccagcctgtgtacaagccctacctgaccctgtgtgccggccgccgcatctgcagcacctaccgcaccatgtacagagtgatgtggagggaggtgcggcgggaggtgcagcagacccatgctgtgtgctgccagggctggaagaagaggcaccctggggccctgacctgtgaggccatctgtgccaagccctgcctgaatggaggagtgtgtgtgcggccagaccagtgtgaatgtgcccctggctggggcggcaagcactgccacgtgggcagcttcacctgtggctgcccccatgacctggtgctgggcgtggatggccgcacctgcatggagggcagccctgagccccccaccagcgccagcatcctgtctgtggccgtgcgggaggccgagaaggatgagcgggccctgaagcaggagatccacgagctgcggggccgcctggagcggctggagcagtgggccggccaggccggggcctgggtgcgggctgtgctgcctgtgcccccagaggagctgcagcctgagcaggtggccgagctgtggggccgcggggaccgcatcgagagcctgagtgaccaggtgctgctgctggaggagcggctgggcgcctag

SEQ ID NO: 219555 - DNA, 777 bp, Artificial Sequence
  derived and/or modified sequence
atgggcagcagagctgagctgtgcaccctgctgggcggcttctccttcctgctgctgctgatccctggagagggcgccaagggcggcagcctgcgggagagccagggcgtgtgcagcaagcagaccctggtggtgcccctgcactacaatgaaagctacagccagcctgtgtacaagccctacctgaccctgtgtgccggccgccgcatctgcagcacctaccgcaccatgtacagagtgatgtggagggaggtgaagcgggaggtgcagcagacccatgctgtgtgctgccagggctggaagaagaggcaccctggggccctgacctgtgaggccatctgtgccaagccctgcctgaatggaggagtgtgtgtgcggccagaccagtgtgaatgtgcccctggctggggcggcaagcactgccacgtgggcagcttcacctgtggctgcccccatgacctggtgctgggcgtggatggccgcacctgcatggagggcagccctgagccccccaccagcgccagcatcctgtctgtggccgtgcgggaggccgagaaggatgagcgggccctgaagcaggagatccacgagctgcggggccgcctggagcggctggagcagtgggccggccaggccggggcctgggtgcgggctgtgctgcctgtgcccccagaggagctgcagcctgagcaggtggccgagctgtggggccgcggggaccgcatcgagagcctgagtgaccaggtgctgctgctggaggagcggctgggcgcctag

SEQ ID NO: 219556 - DNA, 882 bp, Artificial Sequence
  derived and/or modified sequence
atgggcagccgggccgagctgtgcaccctgctgggcggcttcagctttctcctacttctgataccgggcgaaggagcgaaggggggctccctgcgggagagtcaaggagtttgctctaagcagacgctggtcgtcccgctacattataatgagagttacagccagcctgtatataagccttatctgacgctgtgcgcgggacggagaatttgtagtacttatagaacaatgtaccgcgtgatgtggcgagaagtgcgccgtgaggtgcaacaaacgcacgctgtgtgctgtcagggatggaagaagcggcatcccggagccctcacctgtgaggcaatttgcgccaaaccatgtctcaatggaggcgtgtgtgtcagaccggatcaatgtgaatgtgcccccgggtggggggggaaacattgccacgtggatgtggacgagtgtcgtacctccatcaccctgtgttcccatcactgtttcaatacagcaggtagtttcacttgcggctgtccacatgatttggtgcttggagtggacggacggacatgcatggaagggagccccgaacctcccaccagcgcatcaatcctctccgtggccgtgagggaggccgagaaggatgaacgggccttgaagcaggaaatccacgagctccgcggccgcttggagcggctggaacaatgggctgggcaggcaggggcctgggtgagggccgtactgcctgtacctccagaagagttacagccagagcaagttgccgagctgtggggacggggcgacagaatcgagagtcttagcgaccaggttctgctgctggaggaacgtctaggggcatgttcctgcgaagacaattctctgggattaggggttaaccacaggtag

SEQ ID NO: 219557 - DNA, 882 bp, Artificial Sequence
  derived and/or modified sequence
atgggcagccgggccgagctgtgcaccctgctgggcggcttcagcttcttgctcctgcttatccccggtgagggcgccaagggcggttctttgagggaaagccaaggggtctgctcaaagcagaccctggtcgtaccccttcactataacgaatcatactctcagcccgtgtacaagccgtacctcaccctttgtgcaggaagaaggatctgtagtacctaccggacgatgtaccgcgtgatgtggcgggaggtgagacgcgaggtgcagcagactcacgccgtctgctgccagggatggaaaaaaaggcatcccggagcattaacgtgcgaagctatctgcgcgaagccctgcctgaacggcggtgtttgtgttcgtccggatcagtgtgaatgtgccccggggtggggaggaaaacattgtcacgtcgacgttgatgaatgtcggaccagtataacgctatgttctcatcactgcttcaacacagccgggagcttcacctgtggttgcccacatgacctggtgctcggtgtggatggtcgtacgtgtatggaaggctctccagaaccacccacctccgccagcatactgtccgtggcagtccgagaagctgagaaggacgaacgagccctcaaacaggagattcatgagctgcgggggcgactcgagagattagaacagtgggccggtcaggccggagcctgggtgcgcgccgtgctgcccgtaccccctgaggaactgcagccggagcaagttgcagaactctggggcagaggcgatcgcatcgaaagcttatccgatcaggtcctcctcctcgaggagcggctgggggcatgtagctgtgaggacaactctctgggtctcggggtcaatcaccggtag

SEQ ID NO: 219558 - DNA, 882 bp, Artificial Sequence
  derived and/or modified sequence
atgggcagccgggccgagctgtgcaccctgctgggcggcttcagcttcttacttttgttgatcccaggtgagggcgccaaaggaggtagtctgcgagaatcccaaggagtctgctcaaagcagaccttggtggtgccactgcattacaacgaatcttattcccaacctgtctacaaaccatacctgacattgtgcgctgggaggcggatctgtagcacttacaggacgatgtacagagtgatgtggcgcgaggtgaaacgggaggtgcagcagactcatgcggtgtgctgccagggatggaagaagcgacaccctggagctttgacatgcgaggccatatgcgcgaagccatgcctgaacggaggggtgtgtgtcaggccggatcagtgcgagtgcgccccaggatggggcgggaaacattgccacgtggacgtggatgagtgtcgtacatcaatcactttgtgctcccatcactgtttcaataccgccggatcatttacctgtggttgtcctcacgacttagttctgggagtggacggccggacctgtatggaagggtcgccagaaccacccaccagcgcatccattctgtccgttgccgtgcgcgaggctgagaaggacgagagggccctgaaacaggaaatccatgagctacgaggtaggctagaacgcctggagcagtgggcaggccaggcaggagcatgggtgagagcggttctccccgtgccacccgaggaactacagccagagcaggtggcagaactgtggggccgcggagaccgcatcgagtccttatcagatcaggtgcttcttttagaagaaaggttgggggcttgttcctgcgaggataacagcctgggtctcggcgtgaatcacaggtag

SEQ ID NO: 219559 - DNA, 777 bp, Artificial Sequence
  derived and/or modified sequence
atgggcagccgggccgagctgtgcaccctgctgggcggcttcagctttttgctcctgttgattcccggcgagggagccaaaggaggttctttgagagagtctcagggcgtgtgctctaagcagacattggtggtccccctgcattataacgagagctacagccagcctgtttacaaaccatatctgacactctgcgctgggcggagaatttgctccacctaccgaaccatgtatcgcgttatgtggcgcgaggtgcgcagagaggtgcagcaaacacacgccgtgtgctgtcagggctggaagaaaagacaccccggcgcactgacctgcgaggctatctgtgctaagccttgtctcaacggcggagtctgtgtcagacctgaccagtgcgaatgcgctcctggatggggcgggaagcattgtcatgtgggctccttcacatgtggatgtcctcacgatttggtgctcggtgtggatgggcgcacttgtatggaagggagcccagagccacccacctcagctagcatcttgtctgtggccgtacgtgaagcagaaaaggacgagagagctttgaaacaggaaatccacgagcttagaggccgcctggagaggctggagcaatgggcggggcaggccggtgcttgggtgcgcgcagtattgcctgtgcctccggaggaactgcagcccgagcaggtagcggagctttggggacggggagaccgtattgaatctctcagcgaccaggtacttctgttagaggaaagactaggcgcgtag

SEQ ID NO: 219560 - DNA, 882 bp, Artificial Sequence
  derived and/or modified sequence
atgggcagccgggccgagctgtgcaccctgctgggcggcttcagctttctgcttctgctgattcctggagaaggggcaaaaggaggctctctccgggagagccagggcgtgtgctcgaaacaaaccctcgttgtccctctgcactacaatgagagttacagtcagccagtatataaaccttatcttacattgtgtgccggtaggcgcatttgctctacataccgtaccatgtatcgcgtcatgtggagggaggtcagaagagaagtccagcagacgcatgctgtgtgctgtcaggggtggaagaagcggcatcccggtgcactgacttgtgaggcaatttgtgccaaaccttgcctgaacggcggggtgtgcgttagacccgatcagtgtgagtgcgccccagggtggggtggaaagcattgtcatgtggatgtcgatgaatgtcggacctccatcaccctgtgctctcatcattgttttaacacagcaggctctttcacctgcggctgtccccatgatctggttctgggcgtggatggacgcacctgcatggagggtagccccgagcctccgacctccgccagcatcctgtcagtcgccgttcgagaagccgaaaaggacgagcgggcactgaagcaagagatccacgaactcaggggcagactagaacgcctggagcagtgggcaggccaagccggcgcttgggtgagggctgtactgcctgtacctccagaagagctccagcccgaacaggtggctgaactgtgggggaggggggatagaatcgagtctctgtctgaccaggtgctgttattggaggagaggctgggggcatgtagttgtgaagataactctctgggtctaggcgttaaccatagatag

SEQ ID NO: 219561 - DNA, 882 bp, Artificial Sequence
  derived and/or modified sequence
atgggcagccgggccgagctgtgcaccctgctgggcggcttcagctttttgctgcttctcatacccggggaaggggccaaaggcggctcactgagagaatctcagggagtatgcagcaagcagactctggtggtgccactccattacaatgaaagctattctcagcctgtttacaaaccctacttaaccctatgtgctggccggcggatttgctccacctaccgaaccatgtaccgggtgatgtggcgcgaggtccggagagaagtccagcaaacacacgctgtctgctgtcagggctggaagaaaaggcatcccggcgcattaacttgtgaagcaatatgcgccaagccatgtctcaatggtggagtgtgtgtgcgaccagaccagtgcgagtgtgcacccggctggggaggcaaacactgccacgtcgacgtggacgaatgcaggaccagtataaccctgtgctcacaccactgtttcaacacagccgggtcattcacatgcgggtgtcctcacgacttggtgctcggagtagacggcaggacttgcatggagggatcaccagaacctcctacgagcgctagtatcctgtcagtagctgtgagggaggctgagaaagacgagagagctctgaaacaggagatccacgaactgcggggacggttggagcgccttgagcagtgggcagggcaggccggcgcttgggtgagggcagttttaccggttcctccagaggagttgcagcccgaacaagtcgctgaactgtgggggcgcggggacaggatcgagagcctcagtgatcaagtgttgttgctcgaggaaagacttggtgcttgctcttgtgaggacaacagtctggggctgggggtgaatcaccgttag

SEQ ID NO: 219562 - DNA, 882 bp, Artificial Sequence
  derived and/or modified sequence
atgggcagccgggccgagctgtgcaccctgctgggcggcttcagctttctattactcctaatcccaggcgaaggtgctaaaggcggctccctcagggaatcacagggcgtctgctcgaagcagaccttggtcgtcccgttgcactataatgaatcatactcccagccagtctataaaccctacctgactttatgcgccggcaggcgaatatgttcgacttacagaacaatgtatcgagtcatgtggagggaagtcaggcgagaggtgcagcagacacacgctgtttgctgtcaaggctggaagaagaggcatcccggggccctgacatgtgaagcaatatgcgccaagccctgtcttaatggtggcgtatgcgtgcgccccgaccagtgtgagtgcgctcccggatggggcggcaagcattgtcacgtggacgtggatgagtgccgaacatcaatcacactatgtagccaccactgttttaacactgcagggtccttcacatgcggatgtccacacgatttagtgcttggcgtcgatggccgcacttgtatggaaggcagccccgaaccccccacatcagcttctatcctcagtgtggctgtccgcgaggccgagaaggacgagagagccctgaagcaggaaatacacgaattgaggggacgccttgagcgcctggagcagtgggccggacaggcgggcgcgtgggtgagagctgttttaccggtcccccctgaggaactgcaacctgaacaagtcgccgagctctggggaagaggcgaccgtatcgaatcactgagcgaccaggtgctccttctagaggaacgcctcggcgcctgtagctgcgaagacaattccctaggtctcggggttaaccaccggtag

SEQ ID NO: 219563 - DNA, 777 bp, Artificial Sequence
  derived and/or modified sequence
atgggcagccgggccgagctgtgcaccctgctgggcggcttcagcttcctactgctgctcataccaggggagggcgctaaaggaggttcactgcgggagtcacagggcgtttgctctaaacaaactctcgtcgtccccttgcattacaatgaatcctactctcagcccgtctataaaccctatctaaccctttgtgctgggcggcgcatttgctctacttatcgcaccatgtaccgtgtgatgtggagagaggtacgccgtgaagtgcagcagacccatgcggtgtgttgtcagggctggaaaaagcggcacccaggcgccctcacctgtgaagctatctgcgccaaaccctgtctcaatggcggtgtatgcgtacgacctgaccaatgtgagtgcgcccctgggtggggagggaagcactgtcatgtaggcagtttcacttgcggttgtcctcatgacctcgtgctgggtgtcgacgggcgaacttgcatggaggggtcccccgaaccccccacaagtgcctctattctgtctgtcgcagtgcgtgaagctgaaaaagatgaacgcgccctaaagcaagagattcacgagctgagaggaaggcttgagcggttggagcagtgggcagggcaggcaggggcttgggtccgagcagttctgcccgtcccgcccgaggagctgcagcctgagcaggttgccgagttgtggggccgaggggatcggatagagtctctcagcgaccaggtgctgctgctggaggagcgcctcggagcatag

SEQ ID NO: 219564 - DNA, 777 bp, Artificial Sequence
  derived and/or modified sequence
atgggcagccgggccgagctgtgcaccctgctgggcggcttcagctttctgctactgttaatacccggcgaaggcgctaaaggcggatctctcagggagtcacagggagtgtgttccaagcaaacactcgttgtccccctgcattataacgaatcctactcccagccagtttacaagccatatctgacactttgcgcaggcagacgaatctgctcaacatataggaccatgtatagagtgatgtggcgagaggtgcgtcgggaagtacagcagacacatgctgtgtgttgtcaggggtggaaaaagaggcatccgggggcacttacatgtgaagcaatatgcgccaaaccttgccttaacggtggtgtttgtgtgagaccggaccagtgtgagtgtgctcctggctgggggggcaaacattgccacgtgggcagcttcacgtgcggctgcccacatgatctggtgctgggggtggacggtcgaacgtgtatggaagggtctccggaaccaccaacttccgcatcaatattgagcgtggccgtgagagaggcagaaaaggatgaacgcgcgcttaagcaggaaatacatgagctgcgcggacgcctagaacggctagaacagtgggccggacaggctggagcctgggtacgggctgttctgccagtgccccctgaagagttacagcccgagcaggtggccgagctgtggggcagaggtgaccgcattgagagcttgtctgatcaggttcttctcctagaggagcgcctgggtgcatag

SEQ ID NO: 219565 - DNA, 777 bp, Artificial Sequence
  derived and/or modified sequence
atgggcagccgggccgagctgtgcaccctgctgggcggcttcagcttcctgctcctactgattcctggtgaaggggctaaagggggctcactgagggagtcccagggggtttgctctaaacaaacccttgtagtacccttgcattacaatgaaagttactcacaaccggtgtataagccctacctcaccctctgtgccgggagacggatatgcagcacatacagaaccatgtatagagtcatgtggcgcgaagtcaagcgtgaggttcaacagacccatgccgtctgttgtcagggttggaaaaagaggcatccaggcgcactcacatgtgaagctatctgcgccaaaccttgtctgaacggaggggtgtgtgtcaggcccgatcagtgcgagtgcgccccgggctggggcggtaaacactgccatgtcggcagcttcacatgcggctgcccccacgacctggtgttaggagtggatggacggacctgcatggagggatcaccagagcctccgacctcggcatcgattttgagcgtagcagtccgcgaggctgaaaaggacgagcgcgccctgaaacaggagattcatgagctacgtgggcggttggagcggttagaacagtgggctggccaggccggagcctgggtgcgcgcagttctgcccgtgccacctgaggagctccagcctgagcaagttgccgagttatgggggcgtggggaccgcattgagagcctcagcgatcaggtgttactgctggaagagcgtctgggcgcatag

SEQ ID NO: 219566 - DNA, 882 bp, Artificial Sequence
  derived and/or modified sequence
atgggcagccgggccgagctgtgcaccctgctgggcggcttcagctttctactcttactgatacctggtgagggagccaaggggggatcactgcgtgagagccagggggtgtgtagcaaacagactctagttgttccactgcattataatgagtcctactctcaacccgtgtacaagccgtacctaactctgtgtgccggccggcgcatatgctctacataccgcaccatgtacagggttatgtggagagaagtccgaagggaggtccagcagactcacgccgtgtgctgtcaaggctggaagaagaggcatcccggcgcattgacatgcgaagcgatttgcgctaagccctgtctgaacggcggagtgtgcgtccgccctgaccaatgcgagtgcgctcccgggtggggcggtaagcactgccacgtcgatgtggatgaatgtaggacttcgattacactctgttcccaccactgctttaatacagccggcagcttcacatgcggatgtcctcacgacttggtcctgggcgtggacggacggacctgcatggagggctctccagagccgcccacatcagcctccatcctgtctgttgccgtgcgtgaggctgagaaagatgagagagccctgaagcaagaaatccacgagctgcgcgggcggctggagcggttggaacagtgggcgggccaggcaggtgcctgggtacgcgcggtgcttccagtgcctcccgaagaactgcagcccgaacaagtggccgaactctgggggagaggcgatcggatcgagagcctgtctgaccaggtacttctgctggaagaaaggcttggtgcctgtagctgcgaagataattcgctgggcctgggagtcaaccatcggtag

SEQ ID NO: 219567 - DNA, 882 bp, Artificial Sequence
  derived and/or modified sequence
atgggcagccgggccgagctgtgcaccctgctgggcggcttcagctttcttcttctgctgatacctggcgaaggcgcaaaaggaggctccctgcgggaaagccagggggtatgcagcaaacagactctagtcgtccctctgcattacaatgagtcatactcacagccagtgtacaagccctacttaaccctatgtgccggccggcgaatatgtagcacctatagaactatgtatcgcgtgatgtggagagaagtccgtcgggaagttcagcagacacacgctgtatgctgccagggctggaaaaaaagacaccctggtgccctgacgtgcgaagccatatgcgcgaagccgtgccttaatggcggagtctgcgtccgccctgaccaatgtgagtgtgcaccgggctggggcggcaagcattgccacgtcgatgtcgatgagtgccgaactagtatcactctctgtagtcaccactgcttcaacaccgcaggctcttttacttgcggttgtccccacgatttggttctgggtgttgacggcagaacttgtatggaagggtctcccgagcccccgactagtgcctcaattctctccgtagccgtccgagaagctgagaaggatgaaagggcccttaagcaggagattcatgagctacgggggcgtctggagaggctggagcagtgggccggccaagcaggtgcatgggttagggccgtgttgcccgtccctcctgaggaactgcagcctgaacaggtagcagaattgtggggacgaggggatcgcattgaatcactgagcgatcaagtactgttgctggaagagcgacttggtgcatgttcctgcgaggataactccctcggtcttggcgtcaaccaccgctag

SEQ ID NO: 219568 - DNA, 882 bp, Artificial Sequence
  derived and/or modified sequence
atgggcagccgggccgagctgtgcaccctgctgggcggcttcagctttctgctcctattgatcccgggcgagggcgccaaaggtggaagtctgcgcgaaagccagggcgtttgtagcaagcaaaccctggtggtgcccctccactacaacgagtcgtactcccagcccgtctacaagccttatctcactctttgcgctgggcgacggatatgttcaacttacaggacgatgtatcgggtaatgtggagagaagtccggagagaggtccaacagacacatgcagtatgttgccaggggtggaaaaaacggcatcccggagccctgacatgtgaagctatctgtgctaagccctgtttaaacggtggagtttgtgtgcggcccgaccagtgtgaatgcgcacccggctggggagggaagcactgccacgtcgatgtggatgaatgcaggacctctattactctctgctctcaccattgctttaacacagctggatccttcacctgtggctgcccacacgacttagttctgggcgtggacggtaggacctgtatggaagggtctcctgagcctccaacaagcgcctcaattcttagcgtggcagttcgggaggctgagaaagacgaaagagccctgaagcaagaaatccacgaactgcgcggacggttggaaagactagagcagtgggctggtcaggccggagcttgggtgagagccgtcctaccagtgcctcccgaggagctacagccagagcaggtggccgagctgtggggtcgtggcgatcgcattgaaagcctgtcagatcaagtcctattgctcgaggagcgtctgggtgcctgcagctgtgaagacaactccctgggtctgggcgtgaaccatagatag

SEQ ID NO: 219569 - DNA, 882 bp, Artificial Sequence
  derived and/or modified sequence
atgggcagccgggccgagctgtgcaccctgctgggcggcttcagctttctgttactcctaatccccggtgagggcgctaaggggggcagcttacgcgagtctcaaggcgtctgctccaagcagaccttggtggtgccactccattacaacgagtcttatagtcagcccgtctataaaccttatttgaccctgtgcgcggggcgcagaatatgcagtacctacagaaccatgtaccgagtcatgtggcgggaggtgaagcgcgaggtgcagcaaacccacgccgtgtgttgccagggatggaagaagcggcatcccggagccctcacctgtgaagctatatgcgccaaaccttgcttaaatggcggagtttgcgtcaggcccgatcagtgcgagtgcgcacccggctggggcggcaaacattgccacgtggacgtggatgaatgtcgcactagcattacactatgttcccaccattgctttaacactgctggtagctttacctgtggatgtccacatgatcttgtcctcggtgtggacggccgcacctgtatggaaggcagcccagagccaccaacatcagcttccatcctgagcgtggctgtgcgtgaggcagagaaggatgagcgggccttgaagcaggagatccacgaactgaggggtcgactggagcgcctggagcagtgggccggtcaggctggcgcctgggtaagagccgtgttgccagtgccaccggaagagttgcagccagagcaggtggcggaactgtggggtagaggcgacaggattgagagtctgagtgatcaagtgctcttactcgaggagcggctgggcgcctgctcatgtgaggataattcacttggcctgggtgtgaaccaccgatag

SEQ ID NO: 219570 - DNA, 882 bp, Artificial Sequence
  derived and/or modified sequence
atgggcagccgggccgagctgtgcaccctgctgggcggcttcagcttcctgctcctgctgatcccaggcgaaggagctaaaggagggagcttgcgtgagagccaaggggtgtgctccaagcagaccctggtagtgccgctccattacaacgagtcttactcacaaccggtttataaaccctacctgacactctgcgcaggaagacgaatctgtagcacttatagaacaatgtatagggtgatgtggcgtgaggtcagaagagaggtgcagcagacacatgcagtgtgttgccaaggatggaaaaagagacatcccggcgccttaacctgtgaagctatctgtgcgaagccatgtctgaacggtggggtgtgcgtgaggcccgaccagtgcgagtgtgcacccggatggggggggaaacactgccacgttgatgtggacgaatgtcggacctcaattaccctgtgttcacatcactgctttaacactgccggttctttcacctgcggctgccctcacgacctggttttgggtgtggacggaaggacttgcatggagggcagtccagagcctcctacaagcgccagcattctctccgtggcagtccgcgaagccgaaaaggacgagcgcgcactgaaacaagaaatccacgaattgagaggccgcctggaaagactggagcagtgggccggccaggccggagcgtgggttagagcagttctacccgttccccccgaggagttgcagcccgagcaggtggctgagttgtggggccgaggcgaccggattgagtctttatcagatcaggtgctgcttttagaggagagattgggcgcatgctcctgcgaggacaactctctgggcctcggtgtgaatcataggtag

SEQ ID NO: 219571 - DNA, 882 bp, Artificial Sequence
  derived and/or modified sequence
atgggcagccgggccgagctgtgcaccctgctgggcggcttcagctttctccttctgctgattcccggcgagggagccaagggcgggtcactgagggaaagccagggagtgtgttcgaagcaaactctggtggtgccactccattacaatgagtcgtatagccagcctgtctataagccctatttgacactgtgcgccggccgcagaatttgttcaacatataggactatgtaccgtgttatgtggcgtgaggtacggagagaagttcagcagacgcacgcggtgtgctgtcaagggtggaagaaacggcacccgggggcactcacatgtgaggctatctgcgctaagccctgcctcaatggtggagtgtgcgtgaggcccgatcagtgtgagtgcgcaccaggttggggtgggaaacactgccatgttgacgtggacgagtgccgtacatcaataacgttgtgcagtcaccactgctttaacactgccggcagttttacctgcggatgcccacatgatctggtcttgggcgttgatggcagaacttgcatggagggaagcccagagcctcccacaagtgcaagtattttgtcagtcgcagtaagagaagcagaaaaggacgagcgggcactcaagcaggaaatccacgagcttagggggaggttagagaggctggaacaatgggctgggcaggcaggggcctgggtgcgggcggtactgcccgtcccacccgaggaactgcagccagaacaagtcgccgaactgtggggtcgcggggatcgaatagagagtctctccgaccaggtgttgctcctcgaagaaagactgggagcctgctcctgcgaggacaatagcctggggctcggcgtgaaccatcgatag

SEQ ID NO: 219572 - DNA, 882 bp, Artificial Sequence
  derived and/or modified sequence
atgggcagccgggccgagctgtgcaccctgctgggcggcttcagcttcttgttacttctgatccccggagagggcgcaaagggaggttctctgcgcgagtcccagggggtgtgctctaaacagacgttggtggtgcctctacactacaacgaatcttacagtcagcctgtgtataaaccgtacctgacgctctgcgcaggcagaagaatttgtagtacgtaccgcaccatgtatcgcgtgatgtggagagaagtcaggagagaggtccagcagacacacgctgtctgttgccaaggatggaaaaaacggcacccaggtgcactgacctgcgaggccatttgtgctaagccatgtctaaacggcggggtctgcgtgagacccgaccagtgcgaatgtgccccagggtggggaggcaaacactgtcacgtcgacgtcgacgagtgccgaaccagtatcacgttgtgctctcaccactgcttcaacaccgccgggagcttcacttgtggttgtcctcacgatcttgttcttggcgtggatggtaggacgtgcatggagggttctcccgaaccaccaacgtcagcatcaatactgtccgtagcagtacgcgaggcagaaaaggacgaacgcgctctgaaacaggaaattcacgaactccgggggcggcttgaacgattggagcagtgggccgggcaagccggcgcctgggtgcgagccgtgcttccagttccaccagaagagctccaacccgaacaagtcgcagaactctgggggagaggtgacagaatagaatcattgtccgaccaagtgctgttgttggaggaacggctcggtgcatgttcatgtgaggataactccctgggcctgggggttaaccatcggtag

SEQ ID NO: 219573 - DNA, 777 bp, Artificial Sequence
  derived and/or modified sequence
atgggcagccgggccgagctgtgcaccctgctgggcggcttcagcttccttttgctgttaatccccggtgagggggcgaagggaggctctctcagggaatcccagggtgtgtgcagcaaacagacactagtagtgcctctgcactataatgagagctacagccaaccagtctataagccttacctgacattgtgtgctggacgcagaatttgttcaacctaccgaactatgtacagggtcatgtggagagaagttcgtagggaagtacagcagacacatgctgtgtgttgccaggggtggaaaaagagacaccctggggcgctgacctgcgaagccatttgtgccaagccttgcctcaacggaggcgtatgcgtgcgcccggatcagtgcgagtgcgcccccgggtggggaggtaaacactgccacgtgggatccttcacatgcggctgcccacatgatctggttctgggcgtcgacggacggacttgtatggagggcagtcctgagccccccacttcagcgagcatcttgagtgtggccgtgcgggaagcagagaaggatgagcgggctctgaagcaggagatccacgaactgaggggccgactggagaggctcgagcagtgggccggccaggcgggcgcttgggtgcgcgcggtgttgccagttccaccggaagaattgcagcccgaacaggtggccgagctgtggggccgcggtgatcgaatcgaaagcttgagcgaccaggtgctcctcttggaggaacgcctgggagcttag

SEQ ID NO: 219574 - DNA, 882 bp, Artificial Sequence
  derived and/or modified sequence
atgggcagccgggccgagctgtgcaccctgctgggcggcttcagcttccttctcttgctcattccaggagagggcgcaaaaggcggaagcctgcgagaatcccagggggtgtgcagcaagcagaccctggtggtccctttgcactacaatgagagctactcacagcccgtctataaaccgtacttgactctatgcgctggccggcgtatttgtagcacatacaggacaatgtatcgcgtgatgtggagggaggtgagaagagaggtgcagcagactcatgccgtgtgctgtcaggggtggaagaagagacaccccggcgccttaacttgcgaagcaatctgcgctaagccatgtctgaacggtggcgtgtgcgtaaggcccgatcagtgcgagtgtgcacctggatgggggggcaaacactgtcatgtcgacgttgacgagtgccgcacctccatcacactctgcagccatcactgctttaacacagctggttcatttacctgtgggtgtcctcacgatttagtcctaggagtggacggcaggacctgcatggaagggagccccgagcctccaacatccgccagtattctgagcgtggcggtgcgcgaagccgagaaagacgaacgcgcactcaagcaggagatccatgagctccggggcaggctggagcggctcgaacaatgggccggtcaggcaggagcttgggtaagagcggtgctgcccgtcccaccggaggaattgcaacccgaacaggtggccgagttgtgggggcgcggggaccggattgagagcttgagcgatcaggtgctcctgctagaggagcgcctgggagcttgtagctgcgaggacaacagtcttggactcggggttaaccaccggtag

SEQ ID NO: 219575 - DNA, 882 bp, Artificial Sequence
  derived and/or modified sequence
atgggcagccgggccgagctgtgcaccctgctgggcggcttcagcttcctactgttattgataccgggagaaggtgctaaagggggttctttgcgggagtcccaaggggtgtgtagcaagcagacattggttgtccccctccactacaatgagagttacagtcagcctgtctacaaaccttacctcaccctgtgcgctgggcggcgtatatgttcaacgtatagaacaatgtatcgcgtgatgtggagagaagttcgcagagaagtccagcaaacccatgctgtgtgctgtcaggggtggaagaaacggcatccaggtgctttgacatgtgaagccatatgtgctaagccgtgcctcaacggcggagtgtgcgttcggccagaccagtgcgagtgtgcccccgggtgggggggcaagcactgccacgtggatgtcgacgagtgtagaacctcaattactttgtgcagtcaccattgtttcaacacagctggctccttcacgtgcggttgtccgcacgacctggttctgggtgtcgacggtcgcacttgcatggaaggaagtcccgagcccccgacctctgcgagtattttgagcgtggcggtcagggaagcagagaaggatgaaagagcccttaagcaagagattcacgagttacgtgggaggcttgagagactggaacagtgggccgggcaggcgggtgcctgggtgcgggctgtgttaccggtgccacctgaggagctccagcccgagcaggtcgccgagttgtggggcaggggcgaccgaatcgagtctctttccgatcaggtgctcctcctcgaagagagattaggggcatgtagttgcgaggacaactcgctcggattaggggtgaatcataggtag

SEQ ID NO: 219576 - DNA, 882 bp, Artificial Sequence
  derived and/or modified sequence
atgggcagccgggccgagctgtgcaccctgctgggcggcttcagcttcttacttttgttgattccgggggaaggtgcaaagggtggaagcctacgggagtcgcagggggtttgtagtaagcaaacattagtggtcccactccactataatgaatcttattctcagccagtctacaagccttacctcactctgtgtgccggtagacggatctgcagtacataccggactatgtaccgagtcatgtggagagaagtccgccgggaggtccagcagactcacgcagtgtgttgccaaggctggaagaagcgccaccccggagcactgacttgtgaagccatctgcgccaaaccgtgccttaatggtggggtatgcgtgaggcccgaccaatgtgagtgtgcaccaggatggggagggaagcactgccacgtggatgtggatgaatgtcggacgtcaattacgctctgttcacatcattgtttcaacacagccggatcattcacctgcggctgccctcatgacctggttctcggtgtggatggtcgcacctgcatggagggaagcccagagcctccaacctcagctagcatcttaagcgtggcagtgcgggaagccgagaaggacgagagagccctcaagcaggaaatccatgaattgcgcggccgattggagcgcctcgagcagtgggccggccaagctggtgcttgggtgcgcgccgtactgccagtgccccccgaggagttacaacccgaacaagttgccgagttgtgggggagaggcgaccgtattgagagcctgtctgatcaggtactgcttctggaagaacgactcggcgcatgttcttgcgaagacaattccctggggctgggagtcaaccatcggtag

SEQ ID NO: 219577 - DNA, 882 bp, Artificial Sequence
  derived and/or modified sequence
atgggcagccgggccgagctgtgcaccctgctgggcggcttcagcttcttactgcttctaatccctggagaaggagcaaaaggggggagcctgagagaatcacagggcgtgtgctccaagcaaacactggtggtgcctttgcactacaatgagagctatagccagcccgtgtataaaccctatctcacgctgtgcgcgggccggcgcatttgctctacctaccgcaccatgtatagagtgatgtggagagaagttcgccgggaggttcaacagacccatgccgtgtgctgccagggatggaaaaagagacacccaggagccttaacctgtgaggccatttgtgctaagccttgtctgaacgggggtgtctgcgttcggcccgaccagtgtgagtgcgccccaggatggggaggtaaacactgccacgtggatgtagatgagtgtagaacatctattacactctgttcccaccactgctttaatacggctggctctttcacctgtgggtgtccacatgatctggtattgggggtggatgggcgcacctgtatggaggggtcccctgagccccccacctctgcatcaatcctaagtgtggcggttcgcgaggccgagaaggacgagcgggccctcaaacaagagatacatgagctgcgcggtcggctggaacgcctggaacagtgggccggacaggccggagcatgggtgcgagcagttttgcccgtccctcccgaggagctccagccagagcaggtggctgaactgtggggccgaggagatcggatcgagtccctcagtgaccaggttctgctgctcgaggaaaggctgggagcatgcagctgcgaagacaactcgctagggctgggggtgaatcatagatag

SEQ ID NO: 219578 - DNA, 882 bp, Artificial Sequence
  derived and/or modified sequence
atgggcagccgggccgagctgtgcaccctgctgggcggcttcagctttctgctattgttgatccccggcgagggcgcaaagggcggctccctcagggagagccagggggtgtgttccaagcagaccctcgtggtccccctgcattataatgagtcctattcccagccagtctacaagccctacctgaccttgtgcgctggcaggcgtatctgctcgacatacaggaccatgtacagagtaatgtggcgagaggtgaggcgggaagtgcagcagacacatgccgtgtgttgccagggatggaaaaaacggcaccctggggcactgacttgtgaagccatctgcgcaaagccttgccttaacggcggcgtttgtgtaaggcctgatcagtgtgagtgcgcgcccggttggggagggaaacattgtcacgtggatgtcgacgaatgccgtaccagtatcactctttgcagccaccattgttttaataccgccggcagcttcacatgtggctgtccacacgacctggtgttgggggttgatggcaggacctgcatggaggggagccccgaaccacctacctcagcgtccatcctgagcgtggccgtgcgggaagccgagaaagatgagagggcactgaagcaggagattcacgaactacgaggtcgcctggaaaggctcgagcagtgggcgggccaggctggggcttgggttagagcggttctgcctgtaccaccagaggagctgcagcccgagcaggtagccgagctttgggggaggggcgatagaatcgagtcgttgtccgatcaggtgctccttttggaggagcgcctgggggcctgctcctgcgaagataattccctcggcctcggcgtcaaccacaggtag

SEQ ID NO: 219579 - DNA, 1269 bp, Artificial Sequence
  derived and/or modified sequence
gcttgaagcctcccaggagaaagaagccagcctgtagggtccagcgtcaaagcgaatcatggggtccagggctgagctgtgcactctcttaggcggattctccttcctcctgctactgataccaggcgagggggccaagggtggatccctcagagagagtcagggagtctgctccaagcagacactggtggtcccgctccactacaacgagtcctacagccaaccagtgtacaagccctacctgaccttgtgcgctgggaggcgcatctgcagcacttacaggaccatgtaccgcgttatgtggcgggaggtgaggcgggaggttcagcagacccatgcagtgtgctgccagggctggaagaagcggcacccgggggcgctcacctgtgaagccatctgcgccaagccttgcctgaacggaggcgtctgcgttaggcctgaccagtgcgagtgcgcccccggctggggagggaagcactgtcatgtggacgtggatgaatgtaggaccagcatcaccctctgctcgcaccattgttttaatacggcaggcagcttcacctgcggctgcccccatgacctagtgctaggcgtggacgggcgcacctgcatggaggggtccccagagcccccaaccagtgccagcatactcagcgtggccgttcgggaggcggaaaaagatgagcgcgctctgaagcaggagattcacgagctgcgagggcgcctggagcggctggagcagtgggccggtcaggctggggcctgggtcagagcggtgctgcccgtgccgcctgaagagctgcagccagaacaggtggctgagctgtggggccggggtgaccggatcgaatctctcagcgaccaggtgctgctgctggaggagaggctaggtgcctgctcctgtgaggacaacagcctgggcctcggcgtcaatcatcgataagaagcctctacagcacccctgccccctaatttatacagaaaccggacccactaatcctctgggattggccgactgtgagctgcagataaggctatcagccaccaaagagcaatgaacaatggaaacttcagagagctgaagaaagggggaggcctgtgttcttggcctgcccctgagtcttctggctgggggcaggttgcctgggcaagaactgcttcttcaattccttaacaaatgcaaccaccaacacccagatctctctctctctttattttcagtttttttgctgttatccagataattaataaaaaccaaccacgcaaaactgg

SEQ ID NO: 219580 - DNA, 1269 bp, Artificial Sequence
  derived and/or modified sequence
gcttgaagcctcccaggagaaagaagccagcctgtagggtccagcgtcaaagcgaatcatggggtccagggctgagctgtgcactctcttaggcggattctccttcctcctgctactgataccaggcgagggggccaagggtggatccctcagagagagtcagggagtctgctccaagcagacactggtggtcccgctccactacaacgagtcctacagccaaccagtgtacaagccctacctgaccttgtgcgctgggaggcgcatctgcagcacttacaggaccatgtaccgcgttatgtggcgggaggtgaggcgggaggttcagcagacccatgcagtgtgctgccagggctggaagaagcggcacccgggggcgctcacctgtgaagccatctgcgccaagccttgcctgaacggaggcgtctgcgttaggcctgaccagtgcgagtgcgcccccggctggggagggaagcactgtcatgtggacgtggatgaatgtaggaccagcatcaccctctgctcgcaccattgttttaatacggcaggcagcttcacctgcggctgcccccatgacctagtgctaggcgtggacgggcgcacctgcatggaggggtccccagagcccccaaccagtgccagcatactcagcgtggccgttcgggaggcagaaaaagatgagcgcgctctgaagcaggagattcacgagctgcgagggcgcctggagcggctggagcagtgggccggtcaggctggggcctgggtcagagcggtgctgcccgtgccgcctgaagagctgcagccagaacaggtggctgagctgtggggccggggtgaccggatcgaatctctcagcgaccaggtgctgctgctggaggagaggctaggtgcctgctcctgtgaggacaacagcctgggcctcggcgtcaatcatcgataagaagcctctacagcacccctgccccctaatttatacagaaaccggacccactaatcctctgggattggccgactgtgagctgcagataaggctatcagccaccaaagagcaatgaacaatggaaacttcagagagctgaagaaagggggaggcctgtgttcttggcctgcccctgagtcttctggctgggggcaggttgcctgggcaagaactgcttcttcaattccttaacaaatgcaaccaccaacacccagatctctctctctctttattttcagtttttttgctgttatccagataattaataaaaaccaaccacgcaaaactgg

SEQ ID NO: 219581 - DNA, 882 bp, Artificial Sequence
  derived and/or modified sequence
atggggtcgcgggcagagttgtgtacactcctgggcggattttctttccttctcttgctgatccccggtgagggcgcaaaaggtggcagcttaagagaatctcaaggcgtgtgctcaaaacagactctggtggtacctctgcattataatgagtcgtactcccagccagtttataagccctacctcacactgtgtgctggtcgtagaatttgtagcacatacagaactatgtatagggtaatgtggcgtgaggtgcgacgggaggtgcaacagacacacgccgtctgctgccagggctggaaaaaaaggcacccaggagctctcacatgtgaagccatctgcgccaagccatgtctgaacggtggagtctgcgtaagacctgaccagtgtgagtgtgcacccggttggggcggtaagcactgccacgtcgacgtagacgagtgccggacctcgataactctgtgttctcaccactgtttcaacacggctggaagtttcacttgcggctgtccccacgatttggttctgggagtcgatggacgcacttgcatggaggggagccctgagccacccacatctgcatctatcctgagtgtggctgtgagggaggcagagaaggacgaacgagcactcaaacaggaaatccacgagctacggggaagattggagcgcttggaacaatgggccggacaggcaggcgcttgggtccgagccgtccttcctgtcccacctgaagagttacagccagaacaggtcgccgagctttggggtcggggtgacaggatagagagtctatcagatcaggtgcttctgctggaggagagattaggcgcatgctcttgtgaagataatagccttggcctaggagtcaatcaccgctag

SEQ ID NO: 219582 - DNA, 882 bp, Artificial Sequence
  derived and/or modified sequence
atgggaagccgggcagagctgtgcaccctcctgggcggtttctcgtttcttctgctcctgatcccaggtgaaggcgctaagggcggttccctgagggagtcccagggcgtgtgcagcaaacaaaccctggtggtcccccttcattataatgagagctatagccagccagtgtacaagccatatctgacactctgtgctggcaggcgaatttgtagtacgtaccgcacaatgtatcgtgtgatgtggcgggaagtgcgacgggaagtgcagcagacccacgctgtctgctgccaaggctggaagaaacgccaccctggagcactgacctgcgaggctatctgtgcaaagccatgtctgaacggaggagtgtgtgtaaggccggaccaatgtgagtgcgcccctgggtggggtgggaaacattgccatgtagatgtcgatgagtgcagaacatccattaccctgtgctcacaccactgcttcaacacggcgggaagtttcacctgcgggtgcccacatgatctcgtgctcggcgtcgatgggagaacatgtatggaaggctctccagaaccacctacctctgcctccattttaagtgtggcggtgagggaggccgagaaggacgagcgtgctctcaaacaggaaatacacgagctgagaggtagacttgaacgtctggagcaatgggccggacaggcaggggcttgggttcgggcagtgctgcctgtcccacctgaagaactgcagccggagcaggtagccgagctttggggtagaggcgatcgcatcgaatctcttagtgaccaggtcctactcttagaggaacgcctcggcgcatgttcttgtgaggataattctctgggattgggagtaaatcatagatag

SEQ ID NO: 219583 - DNA, 882 bp, Artificial Sequence
  derived and/or modified sequence
atgggatcccgggctgagctttgcaccctgctcgggggatttagttttctgctcttgctgatccccggtgagggcgctaaagggggatccctgcgcgaaagccaaggcgtttgcagcaaacagactctggtggtccccctgcactacaacgaatcctactcacagcccgtgtacaaaccatacctcactctgtgtgccggtcggagaatttgttcaacctaccgaacaatgtaccgggtgatgtggagagaagtgaagagggaagtccagcagacgcacgcagtctgctgtcagggctggaagaaaagacaccccggagctttaacctgcgaagccatctgtgctaagccttgcctgaacggaggtgtctgtgtccggcctgaccagtgtgaatgtgcccctggctggggaggcaaacactgtcatgtagacgtagacgaatgccggacgagcataacactctgtagtcatcattgttttaatacagcgggtagcttcacttgtgggtgcccccacgacttagtactgggggtcgatggacgaacctgcatggaaggctctcccgagcctccaactagtgcctccatcttgtcagtggccgtcagggaggctgagaaggatgaaagagcgctgaagcaagagatccacgagctaagaggacggttggaaaggctcgaacagtgggccggacaagcaggcgcatgggttagagccgtgctgccagtgcctcccgaggagctccagccagaacaggtggccgagctgtggggtcgaggcgacagaattgagtctctctctgaccaagtcctgctactggaagagcggctgggcgcttgtagctgtgaggacaatagcctcggcttgggggtgaatcaccgttag

SEQ ID NO: 219584 - DNA, 777 bp, Artificial Sequence
  derived and/or modified sequence
atgggctcaagagctgaattatgtaccctgcttggtggattttcatttctgttactgctaattcctggcgagggtgcgaaaggcggttctcttagggagagccagggagtctgcagcaaacagacgttagtggtccctctgcactacaatgaaagttatagtcagcccgtttacaaaccttacctgacactgtgtgcaggcagacgcatatgtagcacctaccgaactatgtaccgcgtgatgtggcgggaggtaagacgcgaagtgcagcagacccacgcagtctgttgccagggatggaaaaagcgccatcccggtgccctgacgtgtgaggccatttgcgccaagccttgccttaacggcggtgtatgtgtccgcccagatcagtgtgaatgtgcgccaggatggggcggtaagcattgtcacgttgggtcctttacctgtggctgcccacacgacttggtgctgggggtggacggcaggacatgcatggaaggaagccccgagccccctaccagtgcgagtattctgtcagtggccgtgagagaggcagagaaggatgagagagctctgaagcaagagattcatgaactgagagggaggctcgagcgacttgagcaatgggctggccaggccggagcatgggttcgggcagtgctccccgtccctcctgaggagctgcaaccggagcaagtggctgaactttggggaagaggcgaccgaatagagtctttgtcagaccaagtactgctgttagaagaacggctgggtgcatag

SEQ ID NO: 219585 - DNA, 882 bp, Artificial Sequence
  derived and/or modified sequence
atgggatcccgggctgaactgtgcacactgctgggtggtttcagcttcctcctattactgatacccggagaaggagcgaagggcggaagcctgagagagagtcagggggtctgctcaaaacagaccttggtggtacccctgcattataatgagagctactcccaaccagtctacaagccttacttgaccctgtgcgcaggtcgcagaatctgtagtacataccgcacgatgtaccgtgttatgtggagggaggtgaggcgcgaggttcagcagacacatgccgtctgctgtcagggatggaagaagcgtcaccctggcgctctgacttgcgaggccatctgcgccaaaccatgtctgaacggaggcgtctgtgttcgaccggaccaatgcgagtgtgccccagggtggggtggaaaacactgccacgtggatgtcgacgagtgccgcacctccatcaccctttgctctcatcattgcttcaacaccgctggctcctttacctgcggatgtcctcacgacctagtgctcggagttgatggccgaacctgcatggagggatcgccagaaccaccaaccagcgcgtccatcctgtcggtagccgtgcgcgaagccgaaaaagatgaacgggcactgaagcaggagattcatgaactacgcggaagactggagcgcctggagcaatgggctggccaggccggagcttgggtacgcgctgtgctccccgtcccaccagaagagctccaacctgagcaggtcgccgagctctggggacggggagacaggattgagagtctctcagaccaggtgttgctccttgaggaaaggttgggcgcttgctcttgcgaggacaactctcttggcctgggcgtcaaccaccggtag

SEQ ID NO: 219586 - DNA, 882 bp, Artificial Sequence
  derived and/or modified sequence
atgggctctagagccgagttgtgtaccctgctggggggattcagtttcctgctcctgctcattccgggagaaggtgctaaaggcggatccctgagagagtcccagggcgtctgctctaagcaaacgctcgtggtcccactgcactacaacgagagttacagtcagcctgtgtataagccctatttgacactgtgtgcagggcgtcggatatgtagtacctaccgaacaatgtacagggttatgtggcgggaagtgcgcagggaagtgcaacagacgcacgctgtctgctgtcagggttggaagaaacgccaccccggagcccttacttgcgaggcaatttgcgccaagccctgcctaaatggcggtgtgtgcgtcaggcctgatcagtgcgaatgcgctccgggatggggaggcaaacattgtcacgtggacgtggatgagtgtcgaacctctatcaccctatgctctcaccactgttttaacactgccggaagcttcacgtgtggctgcccccacgacttggtactgggggtggatggcagaacatgtatggaaggatcaccggagccccctacaagcgctagtatcttatctgttgctgttcgggaagcggagaaggatgagcgagcgctgaagcaggagattcatgagttgcggggacggctagaacggctggagcagtgggccggacaggccggtgcctgggtgcgggcagtgctgcccgtgcctcctgaggaacttcagccagaacaagtggccgagttgtggggaaggggtgatcgcatcgaatcactttctgatcaggtgctgctgctcgaggagagattgggagcctgtagctgcgaagacaacagtttaggcctgggtgtgaatcataggtag

SEQ ID NO: 219587 - DNA, 882 bp, Artificial Sequence
  derived and/or modified sequence
atgggatcccgggctgagctttgcactctgttagggggattctcattcctgttgctgctaattccgggtgagggggctaagggtggatctttaagggagtctcagggagtgtgcagcaagcaaactctggtggtgccattgcattataacgagtcgtactctcagcccgtgtataaaccctacctcaccttatgcgctggtcgcagaatctgctccacttatagaactatgtaccgtgtgatgtggcgagaggtgaggcgggaagtgcaacagacacatgcggtgtgctgccaaggctggaaaaaaagacacccgggtgctctgacttgcgaggccatctgtgcaaagccctgccttaatgggggagtgtgcgtgcgtcctgaccaatgcgagtgtgccccaggctgggggggaaagcactgtcacgtagatgtggatgagtgccgaaccagtatcacactgtgtagccaccactgtttcaacaccgcaggaagttttacctgtggctgtccccacgatctagtgcttggagtggatggcagaacctgcatggaaggtagcccagagccacccactagcgccagtattctttccgtggctgtcagggaagccgaaaaggacgagagagctcttaagcaagaaattcatgagctgcgcggacgactggagcgacttgagcagtgggcgggacaggctggcgcatgggttagagcagtgctgccggtacctcccgaggaactccagccagagcaggtcgccgagttgtggggacggggagacagaatcgagtcgctgtccgatcaggtgctattattggaagaaagactcggcgcatgtagctgcgaagataatagcttgggactgggagtgaaccaccggtag

SEQ ID NO: 219588 - DNA, 777 bp, Artificial Sequence
  derived and/or modified sequence
atggggtcgagagccgaactgtgcaccctgttagggggattctcatttctgctcttgcttattcctggggagggcgcaaaaggtgggtctctgcgggagagccaaggggtgtgctctaagcagacactagttgttcctctgcactataatgaaagttactcacagcccgtctataagccctacctgacactttgtgctggacgccgtatttgcagtacatacagaactatgtatcgagtgatgtggagggaagtcaggagggaggtccaacagacgcatgccgtatgctgccagggctggaagaagaggcaccctggggctctaacatgtgaggccatctgtgctaagccatgccttaacggcggtgtgtgtgtgaggccagatcaatgtgagtgtgccccaggatgggggggtaagcactgtcacgtcgggagctttacatgtggttgccctcatgacctagtcttgggagtagatgggaggacctgcatggagggatctcctgaaccaccaacaagtgcctcaatactttctgtggccgtgagggaagccgagaaggatgaacgggcactgaagcaagagatccacgaactgcgaggcaggctggaacggttagaacagtgggcagggcaggccggagcgtgggtacgagccgtcttgccagtcccacctgaagaacttcagccagaacaggtggctgaattgtggggacggggagatcggattgagagcctgtctgatcaggtgctgctactcgaggaaagactgggcgcttag

SEQ ID NO: 219589 - DNA, 777 bp, Artificial Sequence
  derived and/or modified sequence
atgggtagccgcgctgaactgtgcacacttcttggaggtttctcctttcttttgttactcatccctggcgaaggagcgaaagggggttcgctgagagagtcacagggtgtctgttcaaagcagaccctggtggtccctttacactataacgagtcttactctcagcctgtgtacaaaccctacctgacactgtgtgctggccgaagaatctgttccacatacagaactatgtaccgggtgatgtggagggaagtgagaagggaagtgcaacaaacgcacgccgtgtgctgtcaaggttggaagaaacgccatcccggagccctgacatgcgaggccatatgcgctaaaccctgtctgaatggcggagtgtgtgtgcgtcccgaccagtgtgaatgcgcaccaggctgggggggtaagcactgtcacgtcggatcttttacctgcggctgcccgcacgacctcgtattgggagtggatggcagaacctgtatggaggggtcacctgaaccacccacctctgctagcattctctcggtggctgtgcgcgaagccgagaaggatgagcgagcactgaaacaggaaatccacgagctgcgaggacgcttggagcgcctggagcagtgggcaggccaagctggggcttgggtgagagctgtgcttcccgtgccgcctgaggagttgcagccagaacaggttgccgaattatggggtcgcggagacagaatagaaagcctttctgatcaagtgctgctccttgaggagagactgggcgcttag

SEQ ID NO: 219590 - DNA, 777 bp, Artificial Sequence
  derived and/or modified sequence
atgggctctcgcgctgaactgtgcacacttcttgggggttttagcttcctgctgctgttgatacctggggaaggtgctaaggggggatccctacgcgaatcgcagggagtgtgctccaagcaaactctggtagtgccactgcactataatgagtcttattctcagcccgtgtacaagccctatctgacactttgcgcaggacgcagaatctgtagcacttaccgcaccatgtatcgcgtcatgtggcgggaggtaaagcgggaggtgcaacagacccacgccgtgtgttgtcagggctggaagaagcgacacccaggggcactgacatgtgaagcaatatgcgcaaaaccgtgcttgaatgggggtgtttgcgtccggccagaccagtgcgaatgcgctccgggttggggaggcaaacattgccatgttggcagcttcacctgcgggtgtcctcacgatctggtgttgggagttgacggcaggacctgcatggagggaagtcctgagccacctacatctgcgtcaatcttgtctgttgctgttagagaagctgagaaagatgaacgtgcacttaagcaggaaatccacgagctgcgcggtcggctcgagcgccttgagcaatgggctgggcaggctggagcctgggtgcgggcagtgctccccgtcccaccagaggagctgcaaccagagcaggttgcagagctttggggcagaggggaccgcatcgagagtctctccgatcaggtcctcctactggaagaacgattaggggcatag

SEQ ID NO: 219591 - DNA, 882 bp, Artificial Sequence
  derived and/or modified sequence
atggggtctcgggctgagttatgcactctcctagggggttttagttttctgcttctgctaattcctggggagggcgcaaagggagggtctctgcgcgaatctcagggggtgtgctctaaacaaactctggtcgtgcctctgcactataatgaatcatactctcaacccgtctataagccctacctcaccctgtgcgctgggagaagaatctgcagcacttatcggaccatgtacagggttatgtggcgggaagtgagacgcgaagtgcaacagacacatgctgtgtgctgtcaaggctggaagaagcggcaccctggtgccctcacctgtgaggccatttgtgccaaaccctgcctgaatggtggggtgtgtgtgaggcctgatcagtgtgagtgtgcccctgggtgggggggtaagcactgccacgttgatgtggatgagtgtcggacttctattaccctctgttcccatcactgctttaacaccgccggaagcttcacttgcggatgtccccacgatctagtgctgggcgtcgacggcagaacatgtatggaaggctctccggagccccctacctcagcatctatcctctccgtggcagtgcgcgaggccgaaaaagacgagagagctctcaagcaggagattcacgagctccggggtcgactggaacggcttgaacagtgggcagggcaggcgggagcgtgggtgagagccgtgctgcctgtgccacccgaagagctgcagcccgaacaggtcgccgagctgtggggacggggagaccgcatcgaaagtctatccgaccaggtcttactcctggaggaaagactgggagcatgttcttgtgaggataattccttaggactgggtgtgaaccaccggtag

SEQ ID NO: 219592 - DNA, 882 bp, Artificial Sequence
  derived and/or modified sequence
atgggcagcagggccgagttgtgcaccctactcggcggattcagctttctgctgctgttaatcccaggagagggcgctaaagggggtagtctccgtgagagtcagggggtttgtagtaaacagacactggtagttccgctccattataatgagtcatatagtcaacccgtatataaaccatatctgaccctatgcgccggtaggagaatctgcagcacctatcggactatgtaccgcgtaatgtggagagaggtacgcagggaggttcagcagacccatgccgtttgttgtcagggatggaagaaacgacacccaggcgcactcacctgcgaagctatttgcgccaagccatgcctgaatggtggggtgtgtgtacgaccggatcaatgtgagtgtgctcctggctggggagggaagcattgtcacgtggacgtcgacgagtgccggacatctattaccttgtgcagtcatcattgcttcaatacagccggttcattcacttgtggctgtccacacgatctagtactcggagtcgacggtagaacctgtatggagggcagccccgagcctcccactagcgcttccatcctttcagtcgcagtccgcgaagctgagaaagatgaaagagcgttgaaacaggaaatccacgagctcagaggcagactggagaggttggaacagtgggcaggccaggctggtgcctgggtgagggcggtccttcccgtgcctcccgaagagttgcagcccgaacaggtggctgagctctgggggaggggcgacagaatcgaaagcttatctgatcaagtcctgttactcgaggagcgcctcggtgcgtgcagctgcgaggataattcactgggtctcggcgtaaaccacaggtag

SEQ ID NO: 219593 - DNA, 882 bp, Artificial Sequence
  derived and/or modified sequence
atgggctcgcgagcagaattatgtacgttgctgggcggattctcctttctattgctgttgattcctggggagggagccaaagggggatcactgcgggaatctcagggggtctgcagcaagcagaccctggttgtgccactgcattacaacgagagctacagccagccagtctacaagccctacctgacgctctgcgcaggacggagaatttgttcaacctaccgcactatgtacagggtgatgtggcgggaagtaagacgtgaggtgcagcagacgcacgctgtgtgttgtcaggggtggaagaaaaggcaccccggagctctgacatgcgaggctatatgtgctaagccctgcctgaacggaggagtgtgtgtccgtcccgaccagtgcgaatgtgctccgggttgggggggtaagcattgtcatgtggacgtcgatgaatgccggacatcaatcacgctttgttcacaccattgctttaacactgccggttcatttacctgcggctgtccccatgaccttgtgctcggagtggatggacgtacatgtatggaggggtctcctgagcccccaacttctgcaagtattctgagcgtcgcagtcagagaggcagaaaaagacgagagggcattgaaacaggaaatacacgaattgagaggccgacttgaaagacttgagcagtgggccggacaggcaggggcttgggtgcgggcagtgctgccagtgccgccagaggagcttcaacccgaacaggtggccgagctgtggggcaggggcgaccgaatagagagtctgagcgaccaggttttgttactggaagaaagactcggcgcttgtagctgcgaggacaacagtctggggctgggagtgaatcatcgttag

SEQ ID NO: 219594 - DNA, 882 bp, Artificial Sequence
  derived and/or modified sequence
atgggttctcgggcagagctgtgcacgttgcttgggggattcagcttcctcctgctccttatccctggcgagggcgctaagggtggctcactgagggaaagtcagggcgtctgctctaagcagaccctggtggtgccgcttcattacaatgaatcgtatagtcagccagtttacaagccttacttaactctgtgcgccggtagaaggatctgtagcacctatagaaccatgtatagagtcatgtggcgagaggttaaaagagaagtacagcagacccatgcagtttgttgccaggggtggaagaaacggcaccccggagctctcacgtgcgaggccatctgtgccaagccgtgcttaaacgggggagtgtgcgtgagaccagaccaatgcgaatgcgctcctgggtggggcggtaagcattgtcatgttgatgtggacgagtgtaggacaagtatcactctgtgtagccaccattgttttaatacagctggatcattcacgtgcggctgtccacacgaccttgtgctaggcgtcgatggcagaacctgtatggaaggttctcccgagccaccaacatcagcgtcaatcctcagcgtcgccgtgagggaagccgaaaaagacgagcgggcattaaagcaagagattcatgagctgagaggccgtttggagaggctcgaacagtgggccggacaagccggtgcgtgggttagggccgtgctgcccgtcccgccagaggagttgcagcccgagcaagtggccgaactgtggggaaggggggatcgcatagaatccctaagtgatcaggttctgcttctggaggagaggttgggagcgtgcagttgcgaggataattctctgggcctgggggtgaaccatcgctag

SEQ ID NO: 219595 - DNA, 882 bp, Artificial Sequence
  derived and/or modified sequence
atggggagccgtgcggaactgtgtacccttctcggcggattttcatttttacttcttttgattccgggtgaaggcgctaagggcggttcgttgcgggagtcacaaggagtctgcagcaagcagacactagtggtgcctctgcactacaacgaatcatactctcagcccgtgtataaaccatacctgacattatgtgccggacgcaggatatgttccacctaccgtactatgtacagagtgatgtggagggaagtcagaagagaggtacagcagacccatgccgtgtgctgtcaaggttggaaaaaacgccatcctggagccctgacatgcgaggccatctgcgcaaagccctgcttgaatggaggagtgtgtgtgagaccggaccagtgtgagtgcgcacctggctgggggggaaaacactgtcacgttgacgtggacgaatgtcgtacgagcattacgctctgctcccatcattgtttcaataccgctggttcgttcacttgcgggtgcccccatgatcttgtgctgggcgttgacggcagaacctgtatggaggggagtccggaacctcccacatcagcctccattctctccgtagccgtgagagaagcggaaaaggacgagagggctctgaagcaggaaattcacgagctaaggggcagactcgaaaggctcgagcagtgggccggtcaggctggcgcttgggtccgagcagttctccccgtgcctcccgaagaactgcagccagagcaggtcgcagaattgtggggacggggtgatcggatcgagtcgctctccgatcaggttctcctattggaggagcgtctgggagcctgttcatgcgaggataactccttgggacttggagtaaatcataggtag

SEQ ID NO: 219596 - DNA, 882 bp, Artificial Sequence
  derived and/or modified sequence
atggggtcccgggctgaactgtgtactttattggggggtttttcattcctcctgctcttgatccccggagagggggcaaaaggtggctctcttcgggagagtcagggtgtctgcagtaagcagacactcgtcgttccactacattataatgagagttattcccagccagtgtacaaaccctacctgacgttatgcgccggtcgccgaatttgttccacatatcggacgatgtacagagtgatgtggagagaggtgagaagagaggtgcagcagacacacgccgtttgttgccagggatggaagaagcgacatcccggagcgttaacatgtgaggccatctgcgccaaaccctgcttgaacggaggtgtgtgtgtcagacccgatcaatgtgagtgcgctccagggtggggaggcaagcactgccatgtcgatgtggatgagtgtagaacaagcatcacactgtgttctcaccactgttttaataccgctggaagtttcacctgtggttgtcctcacgacttggtcctgggcgtggatggcagaacttgcatggagggtagcccagaaccgccaacttcagcatctattttaagcgtggccgtgcgggaggctgagaaggatgagcgggcacttaaacaggagattcacgaactgcggggaaggctggaaaggctggagcagtgggctggccaggccggagcttgggtgcgagccgtgttgcctgtgcccccagaagagcttcagcctgagcaggtcgccgaactttggggcaggggagacaggattgagtccttgtctgaccaggtgctactgctggaggaacgtctgggggcatgcagttgtgaagacaattcactgggtctcggagtgaatcatcgatag

SEQ ID NO: 219597 - DNA, 882 bp, Artificial Sequence
  derived and/or modified sequence
atgggttcccgggctgaactgtgcacactgctgggtggatttagcttcttacttctgctcattcccggagagggggcaaaaggcggtagcttgcgggagtcacagggagtctgctccaaacagacgctagtcgtgcctttgcactacaatgaatcttacagccaaccagtctacaaaccgtatctcaccctttgcgcagggaggcgaatctgcagcacctaccggactatgtaccgcgtgatgtggcgcgaggtgagacgagaagtgcagcagacgcatgccgtctgttgtcagggatggaagaagagacacccaggtgcattaacttgtgaagccatctgtgctaaaccttgtctgaatgggggtgtgtgtgtgagacctgatcagtgtgagtgcgcgcctggttggggcggtaagcactgccatgttgatgtagatgagtgtcggacatctatcaccctatgctctcaccattgctttaacaccgctgggtctttcacatgtggctgcccccatgatctagtgctgggggtggatggcagaacctgtatggagggctcacccgaacccccaacttctgcatctattctgagcgtggccgtaagagaggccgagaaggatgaacgggcattgaagcaagaaatccatgagctccggggaagactagagcggttagagcagtgggctggtcaggcgggtgcatgggtccgtgcagtgctgcccgtccctcctgaagaattacagcccgagcaggtagccgaactatggggcaggggagaccgcattgaaagtctgtctgaccaggtcctgttactcgaagaacgcctgggggcttgctcctgtgaggacaattctctgggccttggcgtgaaccatcggtag

SEQ ID NO: 219598 - DNA, 777 bp, Artificial Sequence
  derived and/or modified sequence
atgggatcgagagccgagctttgcaccctgttggggggttttagctttctactcctgctgatccctggagagggcgctaaggggggaagtttgcgggaaagccagggagtttgcagtaaacaaaccttggtggtgccccttcactacaacgagagctattcccagcccgtgtataaaccttacctgaccctttgcgctggacgtaggatttgttcaacttataggaccatgtacagggtgatgtggagggaagtaaggcgggaagtccaacagacgcacgccgtttgttgtcaagggtggaaaaaacgccacccaggcgctctgacctgcgaggccatctgcgcgaagccatgcctgaacgggggtgtgtgcgtgaggcctgaccagtgcgagtgtgccccaggatggggcggtaagcattgtcacgttggctcttttacttgcggatgcccgcacgacttggttctcggggtggacggtcgtacctgcatggaggggagtcctgagcctccgacatcggcctctatactgagtgtggctgtgagagaggccgagaaagacgaacgcgcactgaagcaggagatccatgagctaaggggcaggctggaacgcttggaacaatgggccggacaggccggtgcttgggtcagggcagttctgcctgtgcctcctgaggagttgcagccagagcaggtcgctgagttgtgggggcgtggcgaccgcatcgagtctttatccgaccaggtcctcctgctagaagaacggctgggcgcatag

SEQ ID NO: 219599 - DNA, 882 bp, Artificial Sequence
  derived and/or modified sequence
atgggatcccgggctgagttgtgtacactcctcggaggcttttcctttctgctcctcttgattcccggtgaaggggctaagggcggatctcttagagagtctcagggcgtgtgcagtaagcagaccctcgtggtgccactccactataacgagtcttatagccagcccgtgtacaaaccatatctaaccctctgtgccggacgaaggatctgcagcacttaccgcactatgtaccgagtcatgtggcgtgaggtgcgtcgggaggtccaacaaacgcacgccgtttgttgtcaaggatggaagaaacggcatcccggagcacttacctgcgaggcgatttgtgcaaagccttgtttaaatggtggagtctgcgtccggccagaccagtgtgagtgtgcgccaggttggggcggtaagcactgccatgtagacgtcgatgaatgtcggacaagtattactctgtgctcacaccactgttttaatacagccggttcatttacctgcggatgcccccacgacctggtactgggagtagacggcagaacctgcatggagggttccccagaacctcccacatcggcaagcattctcagcgtcgcagtgagagaggcagagaaagacgagagagctctgaagcaggagattcatgagctcaggggaagactggaaaggttggaacaatgggctgggcaggctggtgcttgggtccgagcagttctccccgtgcccccagaagaactgcagcccgagcaggtggccgagctgtggggcagaggagataggatagaaagcctgtcagatcaagtcctgctgctggaagaacggctcggggcatgttcatgtgaggataattccctggggctgggggtgaaccaccgctag

SEQ ID NO: 219600 - DNA, 882 bp, Artificial Sequence
  derived and/or modified sequence
atgggatccagggctgagctatgtacccttttgggtggtttcagctttctgctcctgttgattccaggcgaaggtgcgaagggcggttctctgcgcgaaagccagggcgtgtgctctaaacaaaccctagttgtccccctccactacaacgagtcttactcccagccagtctacaaaccatacctaacgctttgtgccggtaggaggatctgtagcacctacaggactatgtatcgcgttatgtggcgggaagttcgacgtgaggtccagcagactcacgctgtgtgctgtcaggggtggaagaaacgacacccgggagccctgacctgcgaggcaatctgcgctaaaccatgtctcaacggaggtgtgtgcgtaagaccagaccagtgtgaatgcgctccaggctgggggggtaaacactgtcatgttgacgtagacgaatgcaggaccagtataactttatgcagccatcactgcttcaacacagcgggttcttttacatgcgggtgtccgcatgacttggttcttggggtggacggccgtacctgcatggagggatcccccgagccccctactagcgcaagtatcctctctgtggcagtgagagaagcggagaaggatgagcgggcactgaaacaagagattcacgaactacgtgggagactggagcggttggagcagtgggcgggtcaagctggcgcttgggtacgagcggtcctgcctgtgcctccagaagagctgcagcctgaacaggtcgctgaactctggggtcgcggagaccgaattgaatctctgtcagaccaggtgctgctcctcgaggaacgcctaggtgcttgctcctgcgaggataatagcctcgggctgggtgtcaatcataggtag

SEQ ID NO: 219601 - DNA, 882 bp, Artificial Sequence
  derived and/or modified sequence
atggggtccagagcagagctttgcacattgctgggcggttttagtttcctgttgctgctcattcctggagaaggcgcaaaaggtggcagcctgagggaaagtcaaggggtctgttccaagcagaccctcgtggtgccactccactacaacgagtcctactcccaacccgtgtataagccttacctgaccctgtgcgccggaagaaggatctgcagcacatatcgaacgatgtatagggtgatgtggagggaagtgaggagagaggttcaacagacacatgcagtctgctgtcagggctggaaaaagcggcaccccggtgctctgacctgcgaggcgatctgtgccaagccatgtcttaacggaggggtttgtgttcgccctgatcagtgtgagtgtgctcccggatggggtggcaagcactgccatgttgatgtggacgaatgcagaacaagcataactctgtgttctcaccattgtttcaacacagcgggatcattcacctgtgggtgtccccacgatcttgtgctaggtgtagatggacgaacttgtatggaaggcagtcctgagcccccaacttcagcttccattctgagcgttgcagtgcgggaggccgaaaaggacgagcgcgctttaaagcaagagattcacgaattacgtggcaggctggagcggcttgagcaatgggcaggtcaggctggcgcttgggtcagggctgtcctgccggtgccccctgaagagctgcagccagaacaggtggccgagctgtggggccgtggagatcggatcgaaagcctgtccgatcaggtgctgctcttggaggaaaggctgggggcttgttcatgcgaggacaactctctcggtttgggtgtaaatcaccgatag

SEQ ID NO: 219602 - DNA, 882 bp, Artificial Sequence
  derived and/or modified sequence
atgggctcccgagctgaactttgtacattgttgggaggattctcctttctgttgttgttgatccccggtgagggggcaaagggcggatctctgcgggagagccagggggtgtgctcaaaacaaaccttggtcgtgccattgcattataatgagtcttacagccagccagtgtacaagccttatttgacgctatgtgcaggtcgccgtatctgcagcacgtatcggacgatgtatagagtgatgtggcgagaagttagaagagaagttcagcagacccacgccgtctgctgccagggctggaagaagaggcatccaggagccctgacctgtgaggccatatgcgcaaaaccttgtctgaatggaggcgtttgcgtcagacccgatcagtgcgaatgtgcacctggttggggcggaaagcactgtcacgtggacgtggatgaatgtcgcacaagcataactctgtgctcacatcactgcttcaacacagctggcagttttacatgcggctgcccccacgacctagtgctgggggttgacggccgtacttgcatggaaggaagccccgagccgcctacaagcgcctcaatacttagcgtggctgtgcgggaggctgagaaagatgaacgcgctctgaaacaagagattcacgaactgaggggtaggttggaacggctcgaacagtgggccggacaagctggggcatgggtgcgcgctgtgttgcctgtgcctccggaggaactccagccggagcaggtagctgagctgtggggcaggggggacagaattgaatcactcagcgatcaagtgctcctgcttgaagaaaggttgggcgcttgctcatgcgaagacaattcccttgggctgggtgtgaatcatagatag

SEQ ID NO: 219603 - DNA, 882 bp, Artificial Sequence
  derived and/or modified sequence
atgggatccagggccgagttgtgcactttactgggaggattttcatttctgctgctcttgatccccggtgagggagctaaagggggttctctccgggagtctcagggtgtgtgttccaaacagacccttgtcgttccgctgcactacaatgaatcatatagtcagcccgtgtataaaccctatttgacactgtgcgccggtaggcgcatttgtagcacttacaggaccatgtatagagttatgtggcgcgaggtgcgccgtgaggtccaacagacacacgccgtgtgttgtcagggatggaaaaagagacacccaggagcactcacatgtgaagccatatgcgccaagccgtgtctcaacggcggtgtgtgtgtgaggcctgaccagtgcgagtgtgccccaggctgggggggtaaacactgtcacgtggatgtggatgaatgtaggacgagcatcaccctgtgttctcaccactgtttcaacactgctggaagtttcacctgcgggtgcccccatgatctggtgctgggcgtggacggacggacatgcatggaaggctctcccgaaccgccaacaagcgcctcaatcctgtcagtggctgtgcgggaggccgaaaaagacgagagggctttgaagcaagagatacacgagttgagggggcgtctagagcgccttgaacagtgggcaggccaggcgggtgcttgggtgagggccgtgctcccagtccctcccgaggaacttcaacccgaacaggtggccgagctgtgggggagaggagatcggatagagtcactgtccgaccaggtgctactgcttgaggagcggttgggtgcgtgctcatgcgaggataactccctcggcctgggtgtcaatcataggtag

SEQ ID NO: 219604 - DNA, 882 bp, Artificial Sequence
  derived and/or modified sequence
atgggcagcagagccgagctgtgcaccctgctgggcggcttcagcttcctgctgctgctgatccccggcgagggcgccaagggcggcagcctgagagagagccagggcgtgtgcagcaagcagaccctggtggtgcccctgcactacaacgagagctacagccagcccgtgtacaagccctacctgaccctgtgcgccggcagaagaatctgcagcacctacagaaccatgtacagagtgatgtggagagaggtgagaagagaggtgcagcagacccacgccgtgtgctgccagggctggaagaagagacaccccggcgccctgacctgcgaggccatctgcgccaagccctgcctgaacggcggcgtgtgcgtgagacccgaccagtgcgagtgcgcccccggctggggcggcaagcactgccacgtggacgtggacgagtgcagaaccagcatcaccctgtgcagccaccactgcttcaacaccgccggcagcttcacctgcggctgcccccacgacctggtgctgggcgtggacggcagaacctgcatggagggcagccccgagccccccaccagcgccagcatcctgagcgtggccgtgagagaggccgagaaggacgagagagccctgaagcaggagatccacgagctgagaggcagactggagagactggagcagtgggccggccaggccggcgcctgggtgagagccgtgctgcccgtgccccccgaggagctgcagcccgagcaggtggccgagctgtggggcagaggcgacagaatcgagagcctgagcgaccaggtgctgctgctggaggagagactgggcgcctgcagctgcgaggacaacagcctgggcctgggcgtgaaccacagatag

SEQ ID NO: 219605 - DNA, 882 bp, Artificial Sequence
  derived and/or modified sequence
atgggcagcagagccgagctgtgcaccctgctgggcggcttcagcttcctgctgctgctgatccccggcgagggcgccaagggcggcagcctgagagagagccagggcgtgtgcagcaagcagaccctggtggtgcccctgcactacaacgagagctacagccagcccgtgtacaagccctacctgaccctgtgcgccggcagaagaatctgcagcacctacagaaccatgtacagagtgatgtggagagaggtgaagagagaggtgcagcagacccacgccgtgtgctgccagggctggaagaagagacaccccggcgccctgacctgcgaggccatctgcgccaagccctgcctgaacggcggcgtgtgcgtgagacccgaccagtgcgagtgcgcccccggctggggcggcaagcactgccacgtggacgtggacgagtgcagaaccagcatcaccctgtgcagccaccactgcttcaacaccgccggcagcttcacctgcggctgcccccacgacctggtgctgggcgtggacggcagaacctgcatggagggcagccccgagccccccaccagcgccagcatcctgagcgtggccgtgagagaggccgagaaggacgagagagccctgaagcaggagatccacgagctgagaggcagactggagagactggagcagtgggccggccaggccggcgcctgggtgagagccgtgctgcccgtgccccccgaggagctgcagcccgagcaggtggccgagctgtggggcagaggcgacagaatcgagagcctgagcgaccaggtgctgctgctggaggagagactgggcgcctgcagctgcgaggacaacagcctgggcctgggcgtgaaccacagatag

SEQ ID NO: 219606 - DNA, 777 bp, Artificial Sequence
  derived and/or modified sequence
atgggcagcagagccgagctgtgcaccctgctgggcggcttcagcttcctgctgctgctgatccccggcgagggcgccaagggcggcagcctgagagagagccagggcgtgtgcagcaagcagaccctggtggtgcccctgcactacaacgagagctacagccagcccgtgtacaagccctacctgaccctgtgcgccggcagaagaatctgcagcacctacagaaccatgtacagagtgatgtggagagaggtgagaagagaggtgcagcagacccacgccgtgtgctgccagggctggaagaagagacaccccggcgccctgacctgcgaggccatctgcgccaagccctgcctgaacggcggcgtgtgcgtgagacccgaccagtgcgagtgcgcccccggctggggcggcaagcactgccacgtgggcagcttcacctgcggctgcccccacgacctggtgctgggcgtggacggcagaacctgcatggagggcagccccgagccccccaccagcgccagcatcctgagcgtggccgtgagagaggccgagaaggacgagagagccctgaagcaggagatccacgagctgagaggcagactggagagactggagcagtgggccggccaggccggcgcctgggtgagagccgtgctgcccgtgccccccgaggagctgcagcccgagcaggtggccgagctgtggggcagaggcgacagaatcgagagcctgagcgaccaggtgctgctgctggaggagagactgggcgcctag

SEQ ID NO: 219607 - DNA, 777 bp, Artificial Sequence
  derived and/or modified sequence
atgggcagcagagccgagctgtgcaccctgctgggcggcttcagcttcctgctgctgctgatccccggcgagggcgccaagggcggcagcctgagagagagccagggcgtgtgcagcaagcagaccctggtggtgcccctgcactacaacgagagctacagccagcccgtgtacaagccctacctgaccctgtgcgccggcagaagaatctgcagcacctacagaaccatgtacagagtgatgtggagagaggtgaagagagaggtgcagcagacccacgccgtgtgctgccagggctggaagaagagacaccccggcgccctgacctgcgaggccatctgcgccaagccctgcctgaacggcggcgtgtgcgtgagacccgaccagtgcgagtgcgcccccggctggggcggcaagcactgccacgtgggcagcttcacctgcggctgcccccacgacctggtgctgggcgtggacggcagaacctgcatggagggcagccccgagccccccaccagcgccagcatcctgagcgtggccgtgagagaggccgagaaggacgagagagccctgaagcaggagatccacgagctgagaggcagactggagagactggagcagtgggccggccaggccggcgcctgggtgagagccgtgctgcccgtgccccccgaggagctgcagcccgagcaggtggccgagctgtggggcagaggcgacagaatcgagagcctgagcgaccaggtgctgctgctggaggagagactgggcgcctag

SEQ ID NO: 219608 - DNA, 1310 bp, Artificial Sequence
  derived and/or modified sequence
ccaggcccacccaccagtctgagctgcttctgctgaggctggtctgcttgaagcctcccaggagaaagaagccagcctgtagggtccagcgtcaaagcgaatcatggggtccagggctgagctgtgcactctcttaggcggattctccttcctcctgctactgataccaggcgagggggccaagggtggatccctcagagagagtcagggagtctgctccaagcagacactggtggtcccgctccactacaacgagtcctacagccaaccagtgtacaagccctacctgaccttgtgcgctgggaggcgcatctgcagcacttacaggaccatgtaccgcgttatgtggcgggaggtgaggcgggaggttcagcagacccatgcagtgtgctgccagggctggaagaagcggcacccgggggcgctcacctgtgaagccatctgcgccaagccttgcctgaacggaggcgtctgcgttaggcctgaccagtgcgagtgcgcccccggctggggagggaagcactgtcatgtggacgtggatgaatgtaggaccagcatcaccctctgctcgcaccattgttttaatacggcaggcagcttcacctgcggctgcccccatgacctagtgctaggcgtggacgggcgcacctgcatggaggggtccccagagcccccaaccagtgccagcatactcagcgtggccgttcgggaggcggaaaaagatgagcgcgctctgaagcaggagattcacgagctgcgagggcgcctggagcggctggagcagtgggccggtcaggctggggcctgggtcagagcggtgctgcccgtgccgcctgaagagctgcagccagaacaggtggctgagctgtggggccggggtgaccggatcgaatctctcagcgaccaggtgctgctgctggaggagaggctaggtgcctgctcctgtgaggacaacagcctgggcctcggcgtcaatcatcgataagaagcctctacagcacccctgccccctaatttatacagaaaccggacccactaatcctctgggattggccgactgtgagctgcagataaggctatcagccaccaaagagcaatgaacaatggaaacttcagagagctgaagaaagggggaggcctgtgttcttggcctgcccctgagtcttctggctgggggcaggttgcctgggcaagaactgcttcttcaattccttaacaaatgcaaccaccaacacccagatctctctctctctttattttcagtttttttgctgttatccagataattaataaaaaccaaccacgcaaaa

SEQ ID NO: 219609 - DNA, 1312 bp, Artificial Sequence
  derived and/or modified sequence
gctgcttctgctgaggctggtctgcttgaagcctcccaggagaaagaagccaggtgggaatggagagagagaggaagcctgtagggtccagcgtcaaagcgaatcatggggtccagggctgagctgtgcactctcttaggcggattctccttcctcctgctactgataccaggcgagggggccaagggtggatccctcagagagagtcagggagtctgctccaagcagacactggtggtcccgctccactacaacgagtcctacagccaaccagtgtacaagccctacctgaccttgtgcgctgggaggcgcatctgcagcacttacaggaccatgtaccgcgttatgtggcgggaggtgaggcgggaggttcagcagacccatgcagtgtgctgccagggctggaagaagcggcacccgggggcgctcacctgtgaagccatctgcgccaagccttgcctgaacggaggcgtctgcgttaggcctgaccagtgcgagtgcgcccccggctggggagggaagcactgtcatgtggacgtggatgaatgtaggaccagcatcaccctctgctcgcaccattgttttaatacggcaggcagcttcacctgcggctgcccccatgacctagtgctaggcgtggacgggcgcacctgcatggaggggtccccagagcccccaaccagtgccagcatactcagcgtggccgttcgggaggcggaaaaagatgagcgcgctctgaagcaggagattcacgagctgcgagggcgcctggagcggctggagcagtgggccggtcaggctggggcctgggtcagagcggtgctgcccgtgccgcctgaagagctgcagccagaacaggtggctgagctgtggggccggggtgaccggatcgaatctctcagcgaccaggtgctgctgctggaggagaggctaggtgcctgctcctgtgaggacaacagcctgggcctcggcgtcaatcatcgataagaagcctctacagcacccctgccccctaatttatacagaaaccggacccactaatcctctgggattggccgactgtgagctgcagataaggctatcagccaccaaagagcaatgaacaatggaaacttcagagagctgaagaaagggggaggcctgtgttcttggcctgcccctgagtcttctggctgggggcaggttgcctgggcaagaactgcttcttcaattccttaacaaatgcaaccaccaacacccagatctctctctctctttattttcagtttttttgctgttatccagataattaataaaaaccaaccacgcaaaa

SEQ ID NO: 219610 - DNA, 1312 bp, Artificial Sequence
  derived and/or modified sequence
gctgcttctgctgaggctggtctgcttgaagcctcccaggagaaagaagccaggtgggaatggagagagagaggaagcctgtagggtccagcgtcaaagcgaatcatggggtccagggctgagctgtgcactctcttaggcggattctccttcctcctgctactgataccaggcgagggggccaagggtggatccctcagagagagtcagggagtctgctccaagcagacactggtggtcccgctccactacaacgagtcctacagccaaccagtgtacaagccctacctgaccttgtgcgctgggaggcgcatctgcagcacttacaggaccatgtaccgcgttatgtggcgggaggtgaagcgggaggttcagcagacccatgcagtgtgctgccagggctggaagaagcggcacccgggggcgctcacctgtgaagccatctgcgccaagccttgcctgaacggaggcgtctgcgttaggcctgaccagtgcgagtgcgcccccggctggggagggaagcactgtcatgtggacgtggatgaatgtaggaccagcatcaccctctgctcgcaccattgttttaatacggcaggcagcttcacctgcggctgcccccatgacctagtgctaggcgtggacgggcgcacctgcatggaggggtccccagagcccccaaccagtgccagcatactcagcgtggccgttcgggaggcggaaaaagatgagcgcgctctgaagcaggagattcacgagctgcgagggcgcctggagcggctggagcagtgggccggtcaggctggggcctgggtcagagcggtgctgcccgtgccgcctgaagagctgcagccagaacaggtggctgagctgtggggccggggtgaccggatcgaatctctcagcgaccaggtgctgctgctggaggagaggctaggtgcctgctcctgtgaggacaacagcctgggcctcggcgtcaatcatcgataagaagcctctacagcacccctgccccctaatttatacagaaaccggacccactaatcctctgggattggccgactgtgagctgcagataaggctatcagccaccaaagagcaatgaacaatggaaacttcagagagctgaagaaagggggaggcctgtgttcttggcctgcccctgagtcttctggctgggggcaggttgcctgggcaagaactgcttcttcaattccttaacaaatgcaaccaccaacacccagatctctctctctctttattttcagtttttttgctgttatccagataattaataaaaaccaaccacgcaaaa

SEQ ID NO: 219611 - DNA, 825 bp, Artificial Sequence
  derived and/or modified sequence
gggaatggagagagagaggaagcctgtagggtccagcgtcaaagcgaatcatggggtccagggctgagctgtgcactctcttaggcggattctccttcctcctgctactgataccaggcgagggggccaagggtggatccctcagagagagtcagggagtctgctccaagcagacactggtggtcccgctccactacaacgagtcctacagccaaccagtgtacaagccctacctgaccttgtgcgctgggaggcgcatctgcagcacttacaggaccatgtaccgcgttatgtggcgggaggtgaggcgggaggttcagcagacccatgcagtgtgctgccagggctggaagaagcggcacccgggggcgctcacctgtgaagccatctgcgccaagccttgcctgaacggaggcgtctgcgttaggcctgaccagtgcgagtgcgcccccggctggggagggaagcactgtcatgtgggcagcttcacctgcggctgcccccatgacctagtgctaggcgtggacgggcgcacctgcatggaggggtccccagagcccccaaccagtgccagcatactcagcgtggccgttcgggaggcggaaaaagatgagcgcgctctgaagcaggagattcacgagctgcgagggcgcctggagcggctggagcagtgggccggtcaggctggggcctgggtcagagcggtgctgcccgtgccgcctgaagagctgcagccagaacaggtggctgagctgtggggccggggtgaccggatcgaatctctcagcgaccaggtgctgctgctggaggagaggctaggtgcct

SEQ ID NO: 219612 - DNA, 1312 bp, Artificial Sequence
  derived and/or modified sequence
gctgcttctgctgaggctggtctgcttgaagcctcccaggagaaagaagccaggtgggaatggagagagagaggaagcctgtagggtccagcgtcaaagcgaatcatggggtccagggctgagctgtgcactctcttaggcggattctccttcctcctgctactgataccaggcgagggggccaagggtggatccctcagagagagtcagggagtctgctccaagcagacactggtggtcccgctccactacaacgagtcctacagccaaccagtgtacaagccctacctgaccttgtgcgctgggaggcgcatctgcagcacttacaggaccatgtaccgcgttatgtggcgggaggtgaggcgggaggttcagcagacccatgcagtgtgctgccagggctggaagaagcggcacccgggggcgctcacctgtgaagccatctgcgccaagccttgcctgaacggaggcgtctgcgttaggcctgaccagtgcgagtgcgcccccggctggggagggaagcactgtcatgtggacgtggatgaatgtaggaccagcatcaccctctgctcgcaccattgttttaatacggcaggcagcttcacctgcggctgcccccatgacctagtgctaggcgtggacgggcgcacctgcatggaggggtccccagagcccccaaccagtgccagcatactcagcgtggccgttcgggaggcggaaaaagatgagcgcgctctgaagcaggagattcacgagctgcgagggcgcctggagcggctggagcagtgggccggtcaggctggggcctgggtcagagcggtgctgcccgtgccgcctgaagagctgcagccagaacaggtggctgagctgtggggccggggtgaccggatcgaatctctcagcgaccaggtgctgctgctggaggagaggctaggtgcctgctcctgtgaggacaacagcctgggcctcggcgtcaatcatcgataagaagcctctacagcacccctgccccctaatttatacagaaaccggacccactaatcctctgggattggccgactgtgagctgcagataaggctatcagccaccaaagagcaatgaacaatggaaacttcagagagctgaagaaacggggaggcctgtgttcttggcctgcccctgagtcttctggctgggggcaggttgcctgggcaagaactgcttcttcaattccttaacaaatgcaaccaccaacacccagatctctctctctctttattttcagtttttttgctgttatccagataattaataaaaaccaaccacgcaaaa

SEQ ID NO: 219613 - DNA, 825 bp, Artificial Sequence
  derived and/or modified sequence
gggaatggagagagagaggaagcctgtagggtccagcgtcaaagcgaatcatggggtccagggctgagctgtgcactctcttaggcggattctccttcctcctgctactgataccaggcgagggggccaagggtggatccctcagagagagtcagggagtctgctccaagcagacactggtggtcccgctccactacaacgagtcctacagccaaccagtgtacaagccctacctgaccttgtgcgctgggaggcgcatctgcagcacttacaggaccatgtaccgcgttatgtggcgggaggtgaagcgggaggttcagcagacccatgcagtgtgctgccagggctggaagaagcggcacccgggggcgctcacctgtgaagccatctgcgccaagccttgcctgaacggaggcgtctgcgttaggcctgaccagtgcgagtgcgcccccggctggggagggaagcactgtcatgtgggcagcttcacctgcggctgcccccatgacctagtgctaggcgtggacgggcgcacctgcatggaggggtccccagagcccccaaccagtgccagcatactcagcgtggccgttcgggaggcggaaaaagatgagcgcgctctgaagcaggagattcacgagctgcgagggcgcctggagcggctggagcagtgggccggtcaggctggggcctgggtcagagcggtgctgcccgtgccgcctgaagagctgcagccagaacaggtggctgagctgtggggccggggtgaccggatcgaatctctcagcgaccaggtgctgctgctggaggagaggctaggtgcct

SEQ ID NO: 219614 - DNA, 1309 bp, Artificial Sequence
  derived and/or modified sequence
gctgcttctgctgaggctggtctgcttgaagcctcccaggagaaagaagccaggtgggaatggagagagagaggaagcctgtagggtccagcgtcaaagcgaatcatggggtccagggctgagctgtgcactctcttaggcggattctccttcctcctgctactgataccaggcgagggggccaagggtggatccctcagagagagtcagggagtctgctccaagcagacactggtggtcccgctccactacaacgagtcctacagccaaccagtgtacaagccctacctgaccttgtgcgctgggaggcgcatctgcagcacttacaggaccatgtaccgcgttatgtggcgggaggtgaggcgggaggttcagcagacccatgcagtgtgctgccagggctggaagaagcggcacccgggggcgctcacctgtgaagccatctgcgccaagccttgcctgaacggaggcgtctgcgttaggcctgaccagtgcgagtgcgcccccggctggggagggaagcactgtcatgtggacgtggatgaatgtaggaccagcatcaccctctgctcgcaccattgttttaatacggcaggcagcttcacctgcggctgcccccatgacctagtgctaggcgtggacgggcgcacctgcatggaggggtccccagagcccccaaccagtgccagcatactcagcgtggccgttcgggaggcggaaaaagatgagcgcgctctgaagcaggagattcacgagctgcgagggcgcctggagcggctggagcagtgggccggtcaggctggggcctgggtcagagcggtgctgcccgtgccgcctgaagagctgcagccagaacaggtggctgagctgtggggccggggtgaccggatcgaatctctcagcgaccaggtgctgctgctggaggagaggctaggtgcctgctcctgtgaggacaacagcctgggcctcggcgtcaatcatcgataagaagcctctacagcacccctgccccctaatttatacagaaaccggacccactaatcctctgggattggccgactgtgagctgcagataaggctatcagccaccaaagagcaatgaacaatggaaacttcagagagctgaagaaagggggaggcctgtgttcttggcctgcccctgagtcttctggctgggggcaggttgcctgggcaagaactgcttcaattccttaacaaatgcaaccaccaacacccagatctctctctctctttattttcagtttttttgctgttatccagataattaataaaaaccaaccacgcaaaa

SEQ ID NO: 219615 - DNA, 1310 bp, Artificial Sequence
  derived and/or modified sequence
ccaggcccacccaccagtctgagctgcttctgctgaggctggtctgcttgaagcctcccaggagaaagaagccagcctgtagggtccagcgtcaaagcgaatcatggggtccagggctgagctgtgcactctcttaggcggattctccttcctcctgctactgataccaggcgagggggccaagggtggatccctcagagagagtcagggagtctgctccaagcagacactggtggtcccgctccactacaacgagtcctacagccaaccagtgtacaagccctacctgaccttgtgcgctgggaggcgcatctgcagcacttacaggaccatgtaccgcgttatgtggcgggaggtgaggcgggaggttcagcagacccatgcagtgtgctgccagggctggaagaagcggcacccgggggcgctcacctgtgaagccatctgcgccaagccttgcctgaacggaggcgtctgcgttaggcctgaccagtgcgagtgcgcccccggctggggagggaagcactgtcatgtggacgtggatgaatgtaggaccagcatcaccctctgctcgcaccattgttttaatacggcaggcagcttcacctgcggctgcccccatgacctagtgctaggcgtggacgggcgcacctgcatggaggggtccccagagcccccaaccagtgccagcatactcagcgtggccgttcgggaggcggaaaaagatgagcgcgctctgaagcaggagattcacgagctgcgagggcgcctggagcggctggagcagtgggccggtcaggctggggcctgggtcagagcggtgctgcccgtgccgcctgaagagctgcagccagaacaggtggctgagctgtggggccggggtgaccggatcgaatctctcagcgaccaggtgctgctgctggaggagaggctaggtgcctgctcctgtgaggacaacagcctgggcctcggcgtcaatcatcgataagaagcctctacagcacccctgccccctaatttatacagaaaccggacccactaatcctctgggattggccgactgtgagctgcagataaggctatcagccaccaaagagcaatgaacaatggaaacttcagagagctgaagaaacggggaggcctgtgttcttggcctgcccctgagtcttctggctgggggcaggttgcctgggcaagaactgcttcttcaattccttaacaaatgcaaccaccaacacccagatctctctctctctttattttcagtttttttgctgttatccagataattaataaaaaccaaccacgcaaaa

SEQ ID NO: 219616 - DNA, 1310 bp, Artificial Sequence
  derived and/or modified sequence
ccaggcccacccaccagtctgagctgcttctgctgaggctggtctgcttgaagcctcccaggagaaagaagccagcctgtagggtccagcgtcaaagcgaatcatggggtccagggctgagctgtgcactctcttaggcggattctccttcctcctgctactgataccaggcgagggggccaagggtggatccctcagagagagtcagggagtctgctccaagcagacactggtggtcccgctccactacaacgagtcctacagccaaccagtgtacaagccctacctgaccttgtgcgctgggaggcgcatctgcagcacttacaggaccatgtaccgcgttatgtggcgggaggtgaagcgggaggttcagcagacccatgcagtgtgctgccagggctggaagaagcggcacccgggggcgctcacctgtgaagccatctgcgccaagccttgcctgaacggaggcgtctgcgttaggcctgaccagtgcgagtgcgcccccggctggggagggaagcactgtcatgtggacgtggatgaatgtaggaccagcatcaccctctgctcgcaccattgttttaatacggcaggcagcttcacctgcggctgcccccatgacctagtgctaggcgtggacgggcgcacctgcatggaggggtccccagagcccccaaccagtgccagcatactcagcgtggccgttcgggaggcggaaaaagatgagcgcgctctgaagcaggagattcacgagctgcgagggcgcctggagcggctggagcagtgggccggtcaggctggggcctgggtcagagcggtgctgcccgtgccgcctgaagagctgcagccagaacaggtggctgagctgtggggccggggtgaccggatcgaatctctcagcgaccaggtgctgctgctggaggagaggctaggtgcctgctcctgtgaggacaacagcctgggcctcggcgtcaatcatcgataagaagcctctacagcacccctgccccctaatttatacagaaaccggacccactaatcctctgggattggccgactgtgagctgcagataaggctatcagccaccaaagagcaatgaacaatggaaacttcagagagctgaagaaagggggaggcctgtgttcttggcctgcccctgagtcttctggctgggggcaggttgcctgggcaagaactgcttcttcaattccttaacaaatgcaaccaccaacacccagatctctctctctctttattttcagtttttttgctgttatccagataattaataaaaaccaaccacgcaaaa

SEQ ID NO: 219617 - DNA, 1277 bp, Artificial Sequence
  derived and/or modified sequence
tgctgaggctggtctgcttgaagcctcccaggagaaagaagccagcctgtagggtccagcgtcaaagcgaatcatggggtccagggctgagctgtgcactctcttaggcggattctccttcctcctgctactgataccaggcgagggggccaagggtggatccctcagagagagtcagggagtctgctccaagcagacactggtggtcccgctccactacaacgagtcctacagccaaccagtgtacaagccctacctgaccttgtgcgctgggaggcgcatctgcagcacttacaggaccatgtaccgcgttatgtggcgggaggtgaggcgggaggttcagcagacccatgcagtgtgctgccagggctggaagaagcggcacccgggggcgctcacctgtgaagccatctgcgccaagccttgcctgaacggaggcgtctgcgttaggcctgaccagtgcgagtgcgcccccggctggggagggaagcactgtcatgtggacgtggatgaatgtaggaccagcatcaccctctgctcgcaccattgttttaatacggcaggcagcttcacctgcggctgcccccatgacctagtgctaggcgtggacgggcgcacctgcatggaggggtccccagagcccccaaccagtgccagcatactcagcgtggccgttcgggaggcggaaaaagatgagcgcgctctgaagcaggagattcacgagctgcgagggcgcctggagcggctggagcagtgggccggtcaggctggggcctgggtcagagcggtgctgcccgtgccgcctgaagagctgcagccagaacaggtggctgagctgtggggccggggtgaccggatcgaatctctcagcgaccaggtgctgctgctggaggagaggctaggtgcctgctcctgtgaggacaacagcctgggcctcggcgtcaatcatcgataagaagcctctacagcacccctgccccctaatttatacagaaaccggacccactaatcctctgggattggccgactgtgagctgcagataaggctatcagccaccaaagagcaatgaacaatggaaacttcagagagctgaagaaagggggaggcctgtgttcttggcctgcccctgagtcttctggctgggggcaggttgcctgggcaagaactgcttcaattccttaacaaatgcaaccaccaacacccagatctctctctctctttattttcagtttttttgctgttatccagataattaataaaaaccaaccacgcaaaa

SEQ ID NO: 219618 - DNA, 1312 bp, Artificial Sequence
  derived and/or modified sequence
gctgcttctgctgaggctggtctgcttgaagcctcccaggagaaagaagccaggtgggaatggagagagagaggaagcctgtagggtccagcgtcaaagcgaatcatggggtccagggctgagctgtgcactctcttaggcggattctccttcctcctgctactgataccaggcgagggggccaagggtggatccctcagagagagtcagggagtctgctccaagcagacactggtggtcccgctccactacaacgagtcctacagccaaccagtgtacaagccctacctgaccttgtgcgctgggaggcgcatctgcagcacttacaggaccatgtaccgcgttatgtggcgggaggtgaggcgggaggttcagcagacccatgcagtgtgctgccagggctggaagaagcggcacccgggggcgctcacctgtgaagccatctgcgccaagccttgcctgaacggaggcgtctgcgttaggcctgaccagtgcgagtgcgcccccggctggggagggaagcactgtcatgtggacgtggatgaatgtaggaccagcatcaccctctgctcgcaccattgttttaatacggcaggcagcttcacctgcggctgcccccatgacctagtgctaggcgtggacgggcgcacctgcatggaggggtccccagagcccccaaccagtgccagcatactcagcgtggccgttcgggaggcagaaaaagatgagcgcgctctgaagcaggagattcacgagctgcgagggcgcctggagcggctggagcagtgggccggtcaggctggggcctgggtcagagcggtgctgcccgtgccgcctgaagagctgcagccagaacaggtggctgagctgtggggccggggtgaccggatcgaatctctcagcgaccaggtgctgctgctggaggagaggctaggtgcctgctcctgtgaggacaacagcctgggcctcggcgtcaatcatcgataagaagcctctacagcacccctgccccctaatttatacagaaaccggacccactaatcctctgggattggccgactgtgagctgcagataaggctatcagccaccaaagagcaatgaacaatggaaacttcagagagctgaagaaagggggaggcctgtgttcttggcctgcccctgagtcttctggctgggggcaggttgcctgggcaagaactgcttcttcaattccttaacaaatgcaaccaccaacacccagatctctctctctctttattttcagtttttttgctgttatccagataattaataaaaaccaaccacgcaaaa

SEQ ID NO: 219619 - DNA, 1310 bp, Artificial Sequence
  derived and/or modified sequence
ccaggcccacccaccagtctgagctgcttctgctgaggctggtctgcttgaagcctcccaggagaaagaagccagcctgtagggtccagcgtcaaagcgaatcatggggtccagggctgagctgtgcactctcttaggcggattctccttcctcctgctactgataccaggcgagggggccaagggtggatccctcagagagagtcagggagtctgctccaagcagacactggtggtcccgctccactacaacgagtcctacagccaaccagtgtacaagccctacctgaccttgtgcgctgggaggcgcatctgcagcacttacaggaccatgtaccgcgttatgtggcgggaggtgaggcgggaggttcagcagacccatgcagtgtgctgccagggctggaagaagcggcacccgggggcgctcacctgtgaagccatctgcgccaagccttgcctgaacggaggcgtctgcgttaggcctgaccagtgcgagtgcgcccccggctggggagggaagcactgtcatgtggacgtggatgaatgtaggaccagcatcaccctctgctcgcaccattgttttaatacggcaggcagcttcacctgcggctgcccccatgacctagtgctaggcgtggacgggcgcacctgcatggaggggtccccagagcccccaaccagtgccagcatactcagcgtggccgttcgggaggcagaaaaagatgagcgcgctctgaagcaggagattcacgagctgcgagggcgcctggagcggctggagcagtgggccggtcaggctggggcctgggtcagagcggtgctgcccgtgccgcctgaagagctgcagccagaacaggtggctgagctgtggggccggggtgaccggatcgaatctctcagcgaccaggtgctgctgctggaggagaggctaggtgcctgctcctgtgaggacaacagcctgggcctcggcgtcaatcatcgataagaagcctctacagcacccctgccccctaatttatacagaaaccggacccactaatcctctgggattggccgactgtgagctgcagataaggctatcagccaccaaagagcaatgaacaatggaaacttcagagagctgaagaaagggggaggcctgtgttcttggcctgcccctgagtcttctggctgggggcaggttgcctgggcaagaactgcttcttcaattccttaacaaatgcaaccaccaacacccagatctctctctctctttattttcagtttttttgctgttatccagataattaataaaaaccaaccacgcaaaa

SEQ ID NO: 219620 - DNA, 2721 bp, Artificial Sequence
  derived and/or modified sequence
atggccaacgagacccagaaggtgggcgccatccacttccccttccccttcaccccctacagcatccaggaggacttcatggccgagctgtacagagtgctggaggccggcaagatcggcatcttcgagagccccaccggcaccggcaagagcctgagcctgatctgcggcgccctgagctggctgagagacttcgagcagaagaagagagaggaggaggccagactgctggagaccggcaccggccccctgcacgacgagaaggacgagagcctgtgcctgagcagcagctgcgagggcgccgccggcacccccagacccgccggcgagcccgcctgggtgacccagttcgtgcagaagaaggaggagagagacctggtggacagactgaaggccgagcaggccagaagaaagcagagagaggagagactgcagcagctgcagcacagagtgcagctgaagtacgccgccaagagactgagacaggaggaggaggagagagagaacctgctgagactgagcagagagatgctggagaccggccccgaggccgagagactggagcagctggagagcggcgaggaggagctggtgctggccgagtacgagagcgacgaggagaagaaggtggccagcagagtggacgaggacgaggacgacctggaggaggagcacatcaccaagatctactactgcagcagaacccacagccagctggcccagttcgtgcacgaggtgaagaagagccccttcggcaaggacgtgagactggtgagcctgggcagcagacagaacctgtgcgtgaacgaggacgtgaagagcctgggcagcgtgcagctgatcaacgacagatgcgtggacatgcagagaagcagacacgagaagaagaagggcgccgaggaggagaagcccaagagaagaagacaggagaagcaggccgcctgccccttctacaaccacgagcagatgggcctgctgagagacgaggccctggccgaggtgaaggacatggagcagctgctggccctgggcaaggaggccagagcctgcccctactacggcagcagactggccatccccgccgcccagctggtggtgctgccctaccagatgctgctgcacgccgccaccagacaggccgccggcatcagactgcaggaccaggtggtgatcatcgacgaggcccacaacctgatcgacaccatcaccggcatgcacagcgtggaggtgagcggcagccagctgtgccaggcccacagccagctgctgcagtacgtggagagatacggcaagagactgaaggccaagaacctgatgtacctgaagcagatcctgtacctgctggagaagttcgtggccgtgctgggcggcaacatcaagcagaaccccaacacccagagcctgagccagaccggcaccgagctgaagaccatcaacgacttcctgttccagagccagatcgacaacatcaacctgttcaaggtgcagagatactgcgagaagagcatgatcagcagaaagctgttcggcttcaccgagagatacggcgccgtgttcagcagcagagagcagcccaagctggccggcttccagcagttcctgcagagcctgcagcccagaaccaccgaggccctggccgcccccgccgacgagagccaggccagcaccctgagacccgccagccccctgatgcacatccagggcttcctggccgccctgaccaccgccaaccaggacggcagagtgatcctgagcagacagggcagcctgagccagagcaccctgaagttcctgctgctgaaccccgccgtgcacttcgcccaggtggtgaaggagtgcagagccgtggtgatcgccggcggcaccatgcagcccgtgagcgacttcagacagcagctgctggcctgcgccggcgtggaggccgagagagtggtggagttcagctgcggccacgtgatcccccccgacaacatcctgcccctggtgatctgcagcggcatcagcaaccagcccctggagttcaccttccagaagagagagctgccccagatgatggacgaggtgggcagaatcctgtgcaacctgtgcggcgtggtgcccggcggcgtggtgtgcttcttccccagctacgagtacctgagacaggtgcacgcccactgggagaagggcggcctgctgggcagactggccgccagaaagaagatcttccaggagcccaagagcgcccaccaggtggagcaggtgctgctggcctacagcagatgcatccaggcctgcggccaggagagaggccaggtgaccggcgccctgctgctgagcgtggtgggcggcaagatgagcgagggcatcaacttcagcgacaacctgggcagatgcgtggtgatggtgggcatgcccttccccaacatcagaagcgccgagctgcaggagaagatggcctacctggaccagaccctgcccagagcccccggccaggccccccccggcaaggccctggtggagaacctgtgcatgaaggccgtgaaccagagcatcggcagagccatcagacaccagaaggacttcgccagcgtggtgctgctggaccagagatacgccagaccccccgtgctggccaagctgcccgcctggatcagagccagagtggaggtgaaggccaccttcggccccgccatcgccgccgtgcagaagttccacagagagaagagcgccagcagctag

SEQ ID NO: 219621 - DNA, 3717 bp, Artificial Sequence
  derived and/or modified sequence
gttgttccggctgcctttcactgaggggacccgccagtttctaactcagtggcgtttgccctgattcccggggcctggctttcagcgtagcaattctgccggcgaagaaggaagacttcatggcagagctgtaccgggttttggaggctggcaagattgggatatttgagagtccaactggcactgggaagtccttaagtcttatttgtggggccctctcttggctccgtgactttgaacagaagaagcgtgaagaagaggcacgactccttgaaactggaactggccccttacatgatgagaaagatgaatccctgtgtctgtcttcttcctgcgaaggggctgcaggcaccccgaggcctgctggagaaccggcctgggttactcagtttgtgcagaagaaagaagagagggacctggtggaccgactaaaggcggagcaggccaggaggaagcagcgagaagaacgcctgcagcagctgcagcacagggtgcagctcaagtatgcagccaagcgcctgaggcaggaagaagaagaaagagagaatctcctccgcctcagcagggagatgctagagacaggcccggaggctgagcggctggagcagctggagtctggggaggaggagctggtcctcgccgaatacgagagtgatgaggagaaaaaggtggcgagcagagtggatgaggatgaggatgacctggaggaagaacacataactaagatttattactgtagtcggacacactcccagctggcccagtttgtgcatgaggtgaagaagagcccctttggcaaggatgttcggctggtctcccttggctcccggcagaacctttgtgtaaatgaagacgtgaaaagcctaggttctgtgcagcttatcaacgaccgctgtgtggacatgcagagaagcaggcacgagaagaagaaaggagctgaggaggagaagccaaagaggaggaggcaggagaagcaggcagcctgccccttctacaaccacgagcagatgggccttctccgggatgaggccctggcagaggtgaaggacatggagcagctgctggcccttgggaaggaggcccgggcctgtccctattacgggagccgccttgccatccctgcagcccagctggtggtgctgccctatcagatgctgctgcatgcggccactcggcaggccgcgggcatccggctgcaggaccaggtggtgatcatcgacgaggcgcacaacctgatcgacaccatcacgggcatgcacagcgtggaggtcagcggctcccagctctgccaggcccattcccagctgctgcagtacgtggagcgatacgggaagcgtttgaaggccaagaacctgatgtacctgaagcagatcctgtatttgctggagaaattcgtggctgtgctaggggggaacattaagcaaaatcccaatacacagagtctgtcacagacagggacggagctgaagaccatcaacgactttctcttccagagccagatcgacaacatcaacctgttcaaggtgcagcgatactgtgagaagagcatgatcagcagaaagctctttggattcactgaacggtacggagcagtgttctcatcccgggagcagcccaaactggctgggtttcagcaattcctgcagagcctgcagcccaggacgactgaagctcttgcagcccctgcagacgagagtcaggccagcaccctgcgaccagcttctccactgatgcacatccaaggcttcctggcagctctcactacggccaaccaggacggcagggtcatcctgagccgccaaggcagcctcagtcagagcaccctgaagtttttgctcctgaatccagctgtgcactttgcccaagtggtgaaggaatgccgggcagtggtcattgcggggggtaccatgcagccggtgtctgacttccggcagcagctgctggcctgtgccggggtggaagctgagcgcgtggtggagttttcctgtggtcacgtgatccctccagacaacatcctgcccctcgtcatctgcagcgggatctccaaccagccgctggaattcacgttccagaaaagagagctgcctcagatgatggacgaggtgggtcgcattctctgtaacctgtgcggtgtggttcctggaggggtggtctgtttcttcccctcctacgagtacctgcgccaggtccatgcccactgggagaagggtggcctgctgggccgtctggctgccaggaagaagatattccaggaacctaagagcgcacaccaggtggagcaggtgctgctggcatattccaggtgcatccaggcctgtggccaggagagaggccaggtgacaggggccctgctcctctctgtggttggaggaaagatgagtgaagggatcaacttctctgacaacctaggccggtgtgtggtgatggtgggcatgcccttccccaacatcaggtctgcagagctgcaggagaagatggcctacttggatcaaaccctccccagagcccccggccaggcacccccagggaaggctctggtggagaacctgtgcatgaaggccgtcaaccagtccataggcagggccatcaggcaccagaaggattttgccagcgtagtgctcctggaccagcgatatgcccggccccctgtcctggccaagctgccggcctggatccgagcccgtgtggaggtcaaagctacctttggccccgccattgctgctgtgcagaagtttcaccgggagaagtcggcctcttcctgatgggcaaccacaccactgcctggcgccgtgcccttcctttgtcctgcccgctggagacagtgtttgtcgtgggcgtggtctgcggggatcctgttacaaaggtgaaacccaggaggagagtgtggagtccagagtgctgccaggacccaggcacaggcgttagctcccgtaggagaaaatgggggaatcctgaatgaacagtgggtcctggctgtccttggggcgttccagggcagctcccctcctggaatagaatctttctttccatcctgcatggctgagagccaggcttccttcctggtctccgcaggaggctgtggcagctgtggcatccactgtggcatctccgtcctgcccaccttcttaagaggcgagatggagcaggcccatctgcctctgccctttctagccaaggttatagctgccctggactgctcactctctggtctcaatttaaaatgatccatggccacagggctcctgcccaggggcttgtcaccttcccctcctccttcctgagtcactccttcagtagaaggccctgctccctatcctgtcccacagccctgcctggatttgtatccttggcttcgtgccagttcctccaagtctatggcacctccctccctctcaaccacttgagcaaactccaagacaccttctaccccaacaccagcaattatgccaagggccgttaggctctcaacatgactatagagaccccgtgtcatcacggagacctttgttcctgtgggaaaatatccctcccacctgcaacagctgcccctgctgactgcgcctgtcttctccctctgaccccagagaaaggggctgtggtcagctgggatcttctgccaccatcagggacaaacgggggcaggaggaaagtcactgatgcccagatgtttgcatcctgcacagctataggtccttaaataaaagtgtgctgttggtt

SEQ ID NO: 219622 - DNA, 4115 bp, Artificial Sequence
  derived and/or modified sequence
tgcgcagcggcgggggttgttccggctgcctttcactgaggggacccgccagtttctaactcagtggcgtttgccctgattcccggggcctggctttcagcgtagcaattctgccggcgaagaaggtgagcgcagtgctgtgtggcagcagagctccttaggacgaggagcagcgggacgaggaagggcagactggtgaaatcgcaaactgggcgtctgttccggcgccggacccctatttgcaaaggtccatggctaatgaaacacagaaggttggtgccatccattttccttttcccttcacaccctattccatccaggaagacttcatggcagagctgtaccgggttttggaggctggcaagattgggatatttgagagtccaactggcactgggaagtccttaagtcttatttgtggggccctctcttggctccgtgactttgaacagaagaagcgtgaagaagaggcacgactccttgaaactggaactggccccttacatgatgagaaagatgaatccctgtgtctgtcttcttcctgcgaaggggctgcaggcaccccgaggcctgctggagaaccggcctgggttactcagtttgtgcagaagaaagaagagagggacctggtggaccgactaaaggcggagcaggccaggaggaagcagcgagaagaacgcctgcagcagctgcagcacagggtgcagctcaagtatgcagccaagcgcctgaggcaggaagaagaagaaagagagaatctcctccgcctcagcagggagatgctagagacaggcccggaggctgagcggctggagcagctggagtctggggaggaggagctggtcctcgccgaatacgagagtgatgaggagaaaaaggtggcgagcagggcgccttctgatgccacctccagccgccatccaccagacgccagcttccccgctgccctgaacttcctccagcgcaccaggccttcctctgtcctgtctgaggatttgctcatgcaacgtgctgtggccaaacaccctgccctcctcccttggcagatgtcttcctctcctttaaggcctggctcagagtggatgaggatgaggatgacctggaggaagaacacataactaagatttattactgtagtcggacacactcccagctggcccagtttgtgcatgaggtgaagaagagcccctttggcaaggatgttcggctggtctcccttggctcccggcagaacctttgtgtaaatgaagacgtgaaaagcctaggttctgtgcagcttatcaacgaccgctgtgtggacatgcagagaagcaggcacgagaagaagaaaggagctgaggaggagaagccaaagaggaggaggcaggagaagcaggcagcctgccccttctacaaccacgagcagatgggccttctccgggatgaggccctggcagaggtgaaggacatggagcagctgctggcccttgggaaggaggcccgggcctgtccctattacgggagccgccttgccatccctgcagcccagctggtggtgctgccctatcagatgctgctgcatgcggccactcggcaggccgcgggcatccggctgcaggaccaggtggtgatcatcgacgaggcgcacaacctgatcgacaccatcacgggcatgcacagcgtggaggtcagcggctcccagctctgccaggcccattcccagctgctgcagtacgtggagcgatacgggaagcgtttgaaggccaagaacctgatgtacctgaagcagatcctgtatttgctggagaaattcgtggctgtgctaggggggaacattaagcaaaatcccaatacacagagtctgtcacagacagggacggagctgaagaccatcaacgactttctcttccagagccagatcgacaacatcaacctgttcaaggtgcagcgatactgtgagaagagcatgatcagcagaaagctctttggattcactgaacggtacggagcagtgttctcatcccgggagcagcccaaactggctgggtttcagcaattcctgcagagcctgcagcccaggacgactgaagctcttgcagcccctgcagacgagagtcaggccagcaccctgcgaccagcttctccactgatgcacatccaaggcttcctggcagctctcactacggccaaccaggacggcagggtcatcctgagccgccaaggcagcctcagtcagagcaccctgaagtttttgctcctgaatccagctgtgcactttgcccaagtggtgaaggaatgccgggcagtggtcattgcggggggtaccatgcagccggtgtctgacttccggcagcagctgctggcctgtgccggggtggaagctgagcgcgtggtggagttttcctgtggtcacgtgatccctccagacaacatcctgcccctcgtcatctgcagcgggatctccaaccagccgctggaattcacgttccagaaaagagagctgcctcagatgatggacgaggtgggtcgcattctctgtaacctgtgcggtgtggttcctggaggggtggtctgtttcttcccctcctacgagtacctgcgccaggtccatgcccactgggagaagggtggcctgctgggccgtctggctgccaggaagaagatattccaggaacctaagagcgcacaccaggtggagcaggtgctgctggcatattccaggtgcatccaggcctgtggccaggagagaggccaggtgacaggggccctgctcctctctgtggttggaggaaagatgagtgaagggatcaacttctctgacaacctaggccggtgtgtggtgatggtgggcatgcccttccccaacatcaggtctgcagagctgcaggagaagatggcctacttggatcaaaccctccccagagcccccggccaggcacccccagggaaggctctggtggagaacctgtgcatgaaggccgtcaaccagtccataggcagggccatcaggcaccagaaggattttgccagcgtagtgctcctggaccagcgatatgcccggccccctgtcctggccaagctgccggcctggatccgagcccgtgtggaggtcaaagctacctttggccccgccattgctgctgtgcagaagtttcaccgggagaagtcggcctcttcctgatgggcaaccacaccactgcctggcgccgtgcccttcctttgtcctgcccgctggagacagtgtttgtcgtgggcgtggtctgcggggatcctgttacaaaggtgaaacccaggaggagagtgtggagtccagagtgctgccaggacccaggcacaggcgttagctcccgtaggagaaaatgggggaatcctgaatgaacagtgggtcctggctgtccttggggcgttccagggcagctcccctcctggaatagaatctttctttccatcctgcatggctgagagccaggcttccttcctggtctccgcaggaggctgtggcagctgtggcatccactgtggcatctccgtcctgcccaccttcttaagaggcgagatggagcaggcccatctgcctctgccctttctagccaaggttatagctgccctggactgctcactctctggtctcaatttaaaatgatccatggccacagggctcctgcccaggggcttgtcaccttcccctcctccttcctgagtcactccttcagtagaaggccctgctccctatcctgtcccacagccctgcctggatttgtatccttggcttcgtgccagttcctccaagtctatggcacctccctccctctcaaccacttgagcaaactccaagacaccttctaccccaacaccagcaattatgccaagggccgttaggctctcaacatgactatagagaccccgtgtcatcacggagacctttgttcctgtgggaaaatatccctcccacctgcaacagctgcccctgctgactgcgcctgtcttctccctctgaccccagagaaaggggctgtggtcagctgggatcttctgccaccatcagggacaaacgggggcaggaggaaagtcactgatgcccagatgtttgcatcctgcacagctataggtccttaaataaaagtgtgctgttggtt

SEQ ID NO: 219623 - DNA, 2721 bp, Artificial Sequence
  derived and/or modified sequence
atggccaatgagacgcaaaaggttggagccatccactttcccttcccttttactccctattcaattcaggaggacttcatggctgagctgtaccgggtgttggaggcaggaaagatcggaatatttgagtctccaaccggcacagggaaatcgttgtcactgatatgcggcgctctcagttggctgcgtgactttgaacagaagaagcgtgaggaggaggctaggctgctggagacgggcactggccccttgcatgatgaaaaggatgagtctctctgcctgagcagctcttgcgaaggagcagccggtactccaaggcctgcaggtgagcctgcgtgggtgacccagttcgtgcagaaaaaggaggagcgtgatcttgtcgatagactgaaagcagaacaggcgagacgcaagcagagggaggagcgtctgcagcagcttcagcatcgggtccagctgaaatacgcagcaaagcggctgcgacaagaagaggaggagcgggaaaatttactgaggttgtcacgcgaaatgctggaaacgggtccggaggccgagcgattggagcaactggagtccggcgaggaagaattagtgctggccgagtacgagtccgacgaagagaagaaagtggcatctcgtgtcgacgaagatgaggacgacctcgaagaagagcatataactaaaatctactactgtagcaggacgcactcccagctcgcccagtttgtgcacgaggtcaagaaatcgccctttggaaaagacgttagactggtcagcctgggaagtcgccaaaatctgtgtgtaaatgaagatgttaagtccctcggatctgttcaattgataaacgataggtgcgttgacatgcagcggtcacggcatgagaagaaaaagggagccgaggaagaaaaacccaaacgccgaagacaagagaaacaggccgcgtgccccttctataatcatgagcagatgggtcttctgagggatgaggctttggcagaggtcaaagacatggagcagctgctagccctgggtaaggaggctcgggcatgcccctactacgggagtagattggctattcccgctgctcagctggtcgtgttaccctaccagatgctgctgcacgccgctaccaggcaggccgctggaattcgccttcaggatcaggtggtgattatagatgaggcccataatctgattgataccatcacggggatgcacagcgtggaagtgtctggaagtcagctgtgtcaggcccattcccagctgctgcagtacgtcgaacgctacgggaaacggttaaaagctaagaatctgatgtatttgaagcagatcctctacctcctggaaaagttcgtagccgttctgggaggcaatataaagcagaacccaaatacgcagtcactgagccaaaccggtaccgagctcaagacgattaatgatttcctgttccagagccaaattgacaacatcaacctctttaaagttcaacgctattgtgagaagagcatgatcagccgtaaactatttggtttcacagaaaggtacggggcagtcttttctagtcgagaacagccaaagcttgctggtttccagcaatttctccagagcttgcagccaagaaccacagaagccctggcggcccccgctgacgagagccaggcctctaccttacggccagcctctccgctgatgcacatccagggcttcttggccgccctcaccaccgccaaccaagatgggcgggtcattctgtcccgccaggggtctctgtcccagtcaacactcaaattcctgcttctaaatcctgctgtgcacttcgctcaggtcgttaaagagtgtcgggctgtcgtgattgcaggtggaactatgcaacccgtttccgactttcgccagcagctgctggcctgcgcaggcgtggaggctgagagggtggtcgagttttcatgcgggcatgtgattcctccggataatatccttcccctggtcatatgcagcggcatcagtaatcagcccctcgaatttactttccagaagagggagcttcctcaaatgatggatgaggtaggaaggatcctatgcaatctgtgtggggtggtgcccggtggagtggtttgttttttcccttcttacgaatacctgcggcaggtgcacgcccactgggagaagggcggcttactcgggagactcgctgccagaaagaaaattttccaagagcccaagtctgcccatcaggtagaacaggtcttactggcctacagtcggtgtattcaggcttgtgggcaggaaagagggcaagtaacaggtgccctcctcctcagcgtcgtggggggaaagatgtccgagggtatcaacttctccgataacctgggtcggtgcgtggtcatggtcggcatgcctttcccaaacattcgctccgcagagttgcaagagaagatggcttatctggaccagacacttcccagggctcctggtcaggctcccccaggcaaggcactcgtagaaaacctttgtatgaaagcggtcaatcagtcaatcgggagagccatccgtcaccagaaggattttgccagcgtagtactactcgaccagcgatacgcccggcccccggtgcttgccaagctccctgcgtggatccgtgccagagttgaggtcaaggccacattcggacctgccattgctgctgtgcaaaagtttcatcgggaaaaatccgcttccagctag

SEQ ID NO: 219624 - DNA, 2721 bp, Artificial Sequence
  derived and/or modified sequence
atggccaatgagacccagaaggtgggcgccatccacttccccttccccttcaccccctacagcatccaggaggacttcatggccgagctgtacagagtgctggaggccggcaagattggcatctttgagagccccaccggcaccgggaagagcctgagcctcatctgtggggccctgtcctggctgcgggactttgagcagaagaagcgggaggaggaggcccggctgctggagactggaacaggccccctgcatgatgagaaggatgagagcctgtgcctgagcagcagctgtgagggcgccgccggcacccccaggcctgctggggagcccgcctgggtgacccagtttgtgcagaagaaggaggagcgggacctggtggaccggctgaaggccgagcaggcccggaggaagcagcgggaggagcggctgcagcagctgcagcaccgggtgcagctgaagtatgctgccaagaggctgcggcaggaggaggaggagcgggagaacctgctgcggctgagccgggagatgctggagaccggccctgaggccgagcggctggagcagctggagagcggggaggaggagctggtgctggccgagtatgaaagtgatgaggagaagaaggtggccagccgggtggatgaagatgaagatgacctggaggaggagcacatcaccaagatctactactgcagcaggacccacagccagctggcccagtttgtgcatgaggtgaagaagagcccctttgggaaggatgtgcggctggtgtccctgggcagccggcagaacctgtgtgtgaatgaagatgtgaagagcctgggctctgtgcagctgatcaatgacagatgtgtggacatgcagaggagcagacatgagaagaagaagggagctgaggaggagaagcccaagagaagacggcaggagaagcaggccgcctgccccttctacaaccacgagcagatgggcctgctgagagatgaggccctggccgaggtgaaggacatggagcagctgctggccctgggcaaggaggcccgggcctgcccctactacggcagccggctggccatcccagctgcccagctggtggtgctgccctaccagatgctgctgcatgctgccacccggcaggccgccggcatccggctgcaggaccaggtggtgatcattgatgaggcccacaacctgattgacaccatcaccggcatgcacagcgtggaggtgtctggcagccagctgtgccaggcccacagccagctgctgcagtatgtggagagatatggcaagaggctgaaggccaagaacctgatgtacctgaagcagatcctgtacctgctggagaagtttgtggccgtgctgggcggcaacatcaagcagaaccccaacacccagagcctgagccagacaggaacagagctgaagaccatcaatgacttcctgttccagagccagattgacaacatcaacctcttcaaggtgcagcgctactgtgagaagtccatgatcagcaggaagctgtttggcttcacagaaagatatggagctgtgttcagcagccgggagcagcccaagctggccggcttccagcagttcctgcagagcctgcagcccaggaccacagaggccctggccgccccagcagatgagagccaggccagcaccctgcggcctgccagccccctgatgcacatccagggcttcctggccgccctgaccacagccaaccaggacggccgggtcatcctgagccggcagggcagcctgagccagagcaccctgaagttcctgctgctgaacccagctgtgcactttgcccaggtggtgaaggagtgcagagctgtggtgattgctgggggcaccatgcagcctgtgtctgacttccggcagcagctgctggcctgtgccggcgtggaggccgagcgggtggtggagttcagctgtggccacgtgatccccccagacaacatcctgcccctggtgatctgcagcggcatcagcaaccagcccctggagttcaccttccagaagcgggagctgccccagatgatggatgaggtgggccgcatcctgtgcaacctgtgtggggtggtgcctgggggcgtggtgtgcttcttccccagctatgagtacctgcggcaggtgcacgcccactgggagaagggcggcctgctgggccgcctggccgccaggaagaagatcttccaggagcccaagagcgcccaccaggtggagcaggtgctgctggcctacagccgctgcatccaggcctgtggccaggagcggggccaggtgactggagccctgctgctgtctgtggtgggcggcaagatgtctgagggcatcaacttcagtgacaacctgggccgctgtgtggtgatggtgggcatgcccttccccaacatccgctctgctgagctgcaggagaagatggcctacctggaccagaccctgccccgggcccctggccaggcccctcctgggaaggccctggtggagaacctgtgcatgaaggctgtgaaccagagcatcggccgggccatccgccaccagaaggactttgcctctgtggtgctgctggaccagagatatgcccggccccctgtgctggccaagctgcctgcctggatccgggcccgggtggaggtgaaggccaccttcggccctgccatcgctgctgtgcagaagttccaccgggagaagagcgccagcagctag

SEQ ID NO: 219625 - DNA, 2721 bp, Artificial Sequence
  derived and/or modified sequence
atggccaacgagacccagaaggtgggcgccatccacttccccttcccattcacaccgtacagcattcaggaggattttatggctgaattgtatagagtgttggaagccggtaaaattgggattttcgaatcacctaccgggaccggaaagagtctttcactgatttgcggggccctgtcttggctaagagacttcgaacaaaagaagcgtgaggaagaggccaggctgttggagaccgggactggaccactacatgatgagaaggatgaatctctttgtctgtcaagcagctgtgagggagccgccggaacccctaggcccgctggggagcctgcatgggtgactcagttcgtgcagaaaaaggaggagcgagatttggtggatcggctgaaggccgagcaggctagacggaagcaacgtgaagagaggctgcagcagctgcaacatcgcgtgcagttaaagtacgccgcaaagcgactgagacaggaagaagaggagcgcgagaacctactgcgactcagcagggagatgctcgaaacagggccggaagcggaacggctcgagcagctggaaagtggagaagaagaactcgtgttagctgaatatgagagcgacgaggaaaagaaggtggctagccgagtggatgaagacgaggacgacctggaggaagaacacatcaccaagatctattactgctctcggacccacagccaactagcccaattcgtgcacgaggttaaaaaatccccctttgggaaggatgtccgacttgtttctctcggttcaagacagaacttatgcgtgaacgaggatgtgaagagtttgggatctgtccaactgatcaacgaccgctgtgtagacatgcagagatcaagacacgagaaaaaaaagggagccgaggaggagaagccgaagcggcggcggcaggagaagcaggcagcttgcccattctacaatcatgagcagatgggcctccttcgagatgaggccctggccgaagtaaaagacatggagcagttactagcactgggtaaagaggcccgggcgtgcccttactatggcagtagactggctatacctgctgcccagctggtagtcctgccctatcagatgctgcttcacgcagcaactcggcaggctgcaggtatccgactccaggatcaggtggtcatcattgacgaggcgcataatcttatagacacaattaccggcatgcactcggtagaagtttctggatcacagctgtgccaggcccattcccagcttctccagtacgttgaacgctacggtaagagactaaaggccaagaacttgatgtatctaaaacagattctctatttgctggaaaagttcgtcgcagtcctgggcggcaatattaagcagaatcccaatacccaatcactgagccaaacaggaaccgaactaaaaaccattaacgactttctgttccaaagccagatcgacaacataaatctgttcaaggtgcaacggtattgcgagaaaagcatgatcagccgaaaactgtttggtttcacagagaggtatggggctgtcttttcatccagggagcagcctaagctcgcgggcttccagcaattcctgcagtctcttcaacctaggaccacagaggctctggcagctccagccgatgaatcccaggccagtactctccggcctgcatctcctctgatgcacattcaaggttttctggccgccctgactactgccaaccaggatggcagagtcattctaagcagacagggaagcctctcacagagcactctaaaatttctgctcctcaatccggccgtgcacttcgcccaggtggttaaggaatgtcgggcagtggttatagcggggggtaccatgcagcccgtctccgacttcagacaacagctgctagcatgcgcaggggtagaagccgagagagtggtggaattcagctgtggccatgtgatcccaccggacaacattctgcctctggtgatatgttctggtatcagtaatcagcccctggaatttactttccaaaagagggaacttccccaaatgatggatgaagtcggccgtattctgtgcaatctctgtggcgtggttccgggaggggttgtttgtttctttccttcatatgaatatctgcggcaggtacacgcacattgggagaaaggaggactgctgggaaggttggctgcgcgcaagaaaatttttcaagaacccaagtccgcccatcaggttgagcaggtgttgctcgcctacagccgatgcatccaagcctgtggccaggagaggggtcaggtgaccggcgccctgctgctctccgtggtgggaggcaaaatgtcagaagggatcaatttctcagataacctggggagatgtgtagtaatggtaggcatgccttttcctaatatcaggtctgcagaacttcaggagaaaatggcctacctcgatcaaactcttccacgggcgcccggccaggcgcctccaggaaaagcgctcgtcgagaatctctgtatgaaggctgtgaaccagagcatcggccgggcgataaggcaccaaaaggatttcgctagcgtggtgctgctggatcaacggtacgccaggcctcctgtgcttgctaagctccccgcttggattcgggcccgggtcgaagtcaaggccacttttggtccagctatagccgccgtgcagaagttccacagggaaaagtccgccagtagttag

SEQ ID NO: 219626 - DNA, 2721 bp, Artificial Sequence
  derived and/or modified sequence
atggccaacgagacccaaaaggtgggggcaatccacttccctttcccatttactccttattctattcaagaagacttcatggctgagctgtaccgggtgctagaggccggaaaaatcggtatctttgaaagcccaacgggcacaggtaagagtctgtcccttatatgtggtgccctctcttggttaagggacttcgagcagaaaaagcgtgaagaagaagccagacttctggagacgggaactggtccccttcacgacgaaaaagatgagagtctgtgcctctccagttcctgtgagggcgcagctggcacacctaggccagctggagaaccagcctgggtgacccaatttgtgcagaagaaggaggagcgcgaccttgtagaccggctcaaagccgaacaggctcggcgtaagcagagagaggaaaggttgcagcagctgcagcaccgcgtgcagctcaagtacgcggcaaagaggctgcgacaggaagaagaggagagggagaacctcctccgcctgtcgagagaaatgctcgagaccggcccagaggctgaaaggttggaacagctggagagtggagaagaggagcttgtcctggctgaatatgaatctgatgaggaaaagaaagtggcatcaagagtcgatgaagatgaggatgatttggaggaagaacacattactaaaatttattattgttcccggacccatagccagttggcccagtttgtacacgaagtgaaaaagtcgccatttggaaaagatgtgcgcttggtcagcctcggctcgaggcagaacctctgcgtgaatgaagacgtgaagagtctgggtagtgtccagttaatcaacgatcggtgtgtcgacatgcagagatcacggcatgagaagaaaaaaggggctgaagaggagaagccaaagcgccgacggcaggagaaacaggcagcatgccctttctataatcacgaacagatgggactgctgagggacgaggcacttgctgaggtcaaagacatggaacagctactggcgttaggaaaggaagcaagagcttgcccttactatggttcccgcctggcaatacccgctgctcagctggttgttcttccataccagatgctccttcacgctgcaactcgccaagcagccggaatccgactgcaggatcaagttgttatcattgatgaggcccacaacctgatagatactatcactggaatgcactcagtggaagtgagtggctcacaactctgccaggcccacagccagctcctacaatatgtcgaaagatacggcaagcgactgaaggctaaaaacctgatgtatctgaagcagatactctacctcctggagaagttcgtagctgtcctaggtgggaacatcaagcagaatccaaacacacagtcactatcccaaaccgggacagaactgaagaccataaatgatttcctctttcagagccagatagataacataaacctgtttaaagtgcagcgttattgcgagaaatccatgatttctcgcaaattgtttggctttacggagagatacggcgctgtattcagtagtcgcgaacaacctaaactggcgggtttccaacagtttctgcagtcactgcagccgaggacgacagaggctctagcggctcctgcagacgagtcacaagctagcacactcaggccagcgtcacctctgatgcacatccaggggttcctcgccgctttaacgacggcgaatcaggacggcagggtcattttaagccgccagggctctcttagccagagcacacttaaatttctgctgctgaaccctgctgttcattttgctcaggttgtgaaggagtgccgtgcggttgtcatcgctggcggaaccatgcagcctgtatctgacttcaggcagcagctcctcgcttgcgctggggttgaagcagaacgcgtcgttgaattttcttgtggacatgtcatccctccggataacattctacctctcgtcatatgctcgggtatctcaaaccagccactagagtttaccttccaaaagcgtgaacttcctcagatgatggacgaagtggggaggattctctgcaacctgtgtggagttgtacccggaggagtggtatgcttcttccccagctacgaatatctgcgtcaggtacacgctcattgggaaaaggggggtctattgggtcggctggccgcacgcaaaaaaattttccaggagccaaaatccgcccaccaggtagaacaagtcctactggcttactctcgatgcatccaggcgtgtgggcaggagagaggacaagtgactggcgcactcttactatccgtggtgggcggaaaaatgtcggaaggtataaatttttccgataaccttggtaggtgtgttgtaatggtgggcatgcctttccccaacataaggagcgccgaattacaagaaaagatggcatacttggaccaaaccctaccccgagccccaggccaggccccaccaggaaaggccctggtggaaaacctgtgcatgaaagcagtgaaccagtccatcggaagggctattcgccatcagaaggatttcgcctccgtggtactgctggaccagcgctacgcgcgaccgcctgttctagctaaacttccagcctggatccgggcacgtgtggaggtgaaggccaccttcggtcctgccatcgccgctgtgcagaagtttcatagagagaaatccgcatccagctag

SEQ ID NO: 219627 - DNA, 2643 bp, Artificial Sequence
  derived and/or modified sequence
atggccgagctgtacagagtgctggaggccggcaagatcggcatcttcgagagccccaccggcaccggcaagagcctgagcctgatctgcggcgccctgagctggctgagagacttcgagcagaagaagagagaggaggaggccagactgctggagaccggcaccggccccctgcacgacgagaaggacgagagcctgtgcctgagcagcagctgcgagggcgccgccggcacccccagacccgccggcgagcccgcctgggtgacccagttcgtgcagaagaaggaggagagagacctggtggacagactgaaggccgagcaggccagaagaaagcagagagaggagagactgcagcagctgcagcacagagtgcagctgaagtacgccgccaagagactgagacaggaggaggaggagagagagaacctgctgagactgagcagagagatgctggagaccggccccgaggccgagagactggagcagctggagagcggcgaggaggagctggtgctggccgagtacgagagcgacgaggagaagaaggtggccagcagagtggacgaggacgaggacgacctggaggaggagcacatcaccaagatctactactgcagcagaacccacagccagctggcccagttcgtgcacgaggtgaagaagagccccttcggcaaggacgtgagactggtgagcctgggcagcagacagaacctgtgcgtgaacgaggacgtgaagagcctgggcagcgtgcagctgatcaacgacagatgcgtggacatgcagagaagcagacacgagaagaagaagggcgccgaggaggagaagcccaagagaagaagacaggagaagcaggccgcctgccccttctacaaccacgagcagatgggcctgctgagagacgaggccctggccgaggtgaaggacatggagcagctgctggccctgggcaaggaggccagagcctgcccctactacggcagcagactggccatccccgccgcccagctggtggtgctgccctaccagatgctgctgcacgccgccaccagacaggccgccggcatcagactgcaggaccaggtggtgatcatcgacgaggcccacaacctgatcgacaccatcaccggcatgcacagcgtggaggtgagcggcagccagctgtgccaggcccacagccagctgctgcagtacgtggagagatacggcaagagactgaaggccaagaacctgatgtacctgaagcagatcctgtacctgctggagaagttcgtggccgtgctgggcggcaacatcaagcagaaccccaacacccagagcctgagccagaccggcaccgagctgaagaccatcaacgacttcctgttccagagccagatcgacaacatcaacctgttcaaggtgcagagatactgcgagaagagcatgatcagcagaaagctgttcggcttcaccgagagatacggcgccgtgttcagcagcagagagcagcccaagctggccggcttccagcagttcctgcagagcctgcagcccagaaccaccgaggccctggccgcccccgccgacgagagccaggccagcaccctgagacccgccagccccctgatgcacatccagggcttcctggccgccctgaccaccgccaaccaggacggcagagtgatcctgagcagacagggcagcctgagccagagcaccctgaagttcctgctgctgaaccccgccgtgcacttcgcccaggtggtgaaggagtgcagagccgtggtgatcgccggcggcaccatgcagcccgtgagcgacttcagacagcagctgctggcctgcgccggcgtggaggccgagagagtggtggagttcagctgcggccacgtgatcccccccgacaacatcctgcccctggtgatctgcagcggcatcagcaaccagcccctggagttcaccttccagaagagagagctgccccagatgatggacgaggtgggcagaatcctgtgcaacctgtgcggcgtggtgcccggcggcgtggtgtgcttcttccccagctacgagtacctgagacaggtgcacgcccactgggagaagggcggcctgctgggcagactggccgccagaaagaagatcttccaggagcccaagagcgcccaccaggtggagcaggtgctgctggcctacagcagatgcatccaggcctgcggccaggagagaggccaggtgaccggcgccctgctgctgagcgtggtgggcggcaagatgagcgagggcatcaacttcagcgacaacctgggcagatgcgtggtgatggtgggcatgcccttccccaacatcagaagcgccgagctgcaggagaagatggcctacctggaccagaccctgcccagagcccccggccaggccccccccggcaaggccctggtggagaacctgtgcatgaaggccgtgaaccagagcatcggcagagccatcagacaccagaaggacttcgccagcgtggtgctgctggaccagagatacgccagaccccccgtgctggccaagctgcccgcctggatcagagccagagtggaggtgaaggccaccttcggccccgccatcgccgccgtgcagaagttccacagagagaagagcgccagcagctag

SEQ ID NO: 219628 - DNA, 2643 bp, Artificial Sequence
  derived and/or modified sequence
atggccgagctttaccgagtgctggaggccgggaagattggcatatttgagagccctacggggactggaaaatctctgagtcttatctgtggagcactgtcgtggctacgggatttcgagcagaagaaaagagaggaagaggctcgtctgctggaaaccggcacaggtcctctccacgacgagaaagacgagtcgttgtgcctctcatcatcttgtgagggggctgccggtacacctcgccccgccggcgaaccagcttgggttacgcagttcgtacaaaagaaagaagagcgggatctggtggacagactgaaagctgagcaggctaggagaaaacaacgggaggagcgcctgcagcagctgcaacatagggtccagctgaaatatgccgcaaagaggctgcgacaggaggaagaagagcgggagaatttactccggctcagccgagaaatgctagagacaggacctgaggccgaaagactggagcagctcgagagcggcgaagaggagctagtcttggccgagtacgaatccgatgaagaaaaaaaggtggccagtcgtgtcgacgaagatgaagatgatctcgaggaagagcacatcaccaaaatttattactgctcccggacccactcccagctggctcaatttgtccacgaggtgaaaaaaagcccattcgggaaggatgtgcgccttgtgtccctcggatccaggcagaacctctgcgtgaatgaggatgtcaagtccttgggaagcgttcagctgattaacgaccgctgcgtcgatatgcagaggtcaaggcatgagaagaagaagggcgccgaggaggaaaaaccgaagcggcgccgccaagaaaaacaagctgcatgcccattctacaatcatgaacagatgggcctacttcgggatgaagccctggccgaggtgaaagacatggagcagctcctggccctgggaaaggaggctagggcctgcccctattatggttccaggcttgctataccggcggctcagcttgtggtactgccctatcagatgttgctgcatgcagccactcgtcaggctgctggtattcggcttcaggatcaggtcgtgatcatagatgaggctcacaacttgatagataccatcactggtatgcacagcgtggaagtgagcggttcccagttatgtcaggctcacagtcaactgttgcaatatgtggagagatatggcaaacggctgaaggctaaaaatctgatgtacctgaaacaaattctctatttgctggagaagtttgtcgctgttctcgggggcaatattaaacagaaccccaacacacagagcttgagtcagaccggaacagagctcaagactataaatgactttctgtttcagtctcaaattgacaacataaatttgtttaaggttcaacggtattgcgaaaaaagcatgatttccagaaaattattcggatttacagagaggtatggcgcggtgtttagcagccgagaacaacccaagctggccgggttccagcaattcctgcaaagcctgcagcctagaacaacggaagcactggcagcaccggctgacgaaagtcaggcgtctactctgaggcctgcctcccctctgatgcatatccagggcttcctggccgccttgaccaccgccaatcaagacggtcgggtcattctgtctagacaggggtccctgagccagtcaaccctgaaattcctgcttctaaaccccgctgtgcacttcgctcaggtggtgaaagagtgtagagcagtggttatagctggcggtacaatgcagcccgtttccgattttcgacagcaattactggcttgcgctggtgtcgaggctgagagagtcgtagaattttcttgtggacacgtgattccccctgataatatactcccccttgtgatttgctccgggatatctaatcagcctttagagtttacttttcagaagagagagctgcctcagatgatggacgaggtaggaaggattctgtgcaacttatgtggggtggtaccaggaggtgtggtgtgtttttttccgtcatacgaataccttaggcaggtacacgcacactgggaaaagggcggactgctgggccggctggccgctagaaagaaaatatttcaagagcccaagagcgcacaccaggtggaacaggtgctgttagcatactctcgctgcatccaggcgtgcgggcaggaacgcggccaagtcacaggtgctttgttactctctgtggtcggtggcaagatgtctgagggaattaatttcagtgataatctgggccgctgtgtcgtaatggtcggcatgcccttcccaaatatccggtctgcagaactgcaggagaagatggcttatctcgatcaaacactacctcgagctcccggccaggcccctcctggtaaggcccttgtagagaacctgtgtatgaaggctgttaaccagagcatcggcagagccatacgccaccagaaggattttgcctcagtggtgctgcttgaccagagatacgcccggcctcccgtgctggctaagctacccgcttggattagggcgagggtggaagtgaaagccaccttcggaccagcaatcgccgctgtacagaagtttcaccgcgagaagagcgcctccagttag

SEQ ID NO: 219629 - DNA, 2643 bp, Artificial Sequence
  derived and/or modified sequence
atggccgagctgtacagagtgctggaggccggcaagattggcatctttgagagccccaccggcaccgggaagagcctgagcctcatctgtggggccctgtcctggctgcgggactttgagcagaagaagcgggaggaggaggcccggctgctggagactggaacaggccccctgcatgatgagaaggatgagagcctgtgcctgagcagcagctgtgagggcgccgccggcacccccaggcctgctggggagcccgcctgggtgacccagtttgtgcagaagaaggaggagcgggacctggtggaccggctgaaggccgagcaggcccggaggaagcagcgggaggagcggctgcagcagctgcagcaccgggtgcagctgaagtatgctgccaagaggctgcggcaggaggaggaggagcgggagaacctgctgcggctgagccgggagatgctggagaccggccctgaggccgagcggctggagcagctggagagcggggaggaggagctggtgctggccgagtatgaaagtgatgaggagaagaaggtggccagccgggtggatgaagatgaagatgacctggaggaggagcacatcaccaagatctactactgcagcaggacccacagccagctggcccagtttgtgcatgaggtgaagaagagcccctttgggaaggatgtgcggctggtgtccctgggcagccggcagaacctgtgtgtgaatgaagatgtgaagagcctgggctctgtgcagctgatcaatgacagatgtgtggacatgcagaggagcagacatgagaagaagaagggagctgaggaggagaagcccaagagaagacggcaggagaagcaggccgcctgccccttctacaaccacgagcagatgggcctgctgagagatgaggccctggccgaggtgaaggacatggagcagctgctggccctgggcaaggaggcccgggcctgcccctactacggcagccggctggccatcccagctgcccagctggtggtgctgccctaccagatgctgctgcatgctgccacccggcaggccgccggcatccggctgcaggaccaggtggtgatcattgatgaggcccacaacctgattgacaccatcaccggcatgcacagcgtggaggtgtctggcagccagctgtgccaggcccacagccagctgctgcagtatgtggagagatatggcaagaggctgaaggccaagaacctgatgtacctgaagcagatcctgtacctgctggagaagtttgtggccgtgctgggcggcaacatcaagcagaaccccaacacccagagcctgagccagacaggaacagagctgaagaccatcaatgacttcctgttccagagccagattgacaacatcaacctcttcaaggtgcagcgctactgtgagaagtccatgatcagcaggaagctgtttggcttcacagaaagatatggagctgtgttcagcagccgggagcagcccaagctggccggcttccagcagttcctgcagagcctgcagcccaggaccacagaggccctggccgccccagcagatgagagccaggccagcaccctgcggcctgccagccccctgatgcacatccagggcttcctggccgccctgaccacagccaaccaggacggccgggtcatcctgagccggcagggcagcctgagccagagcaccctgaagttcctgctgctgaacccagctgtgcactttgcccaggtggtgaaggagtgcagagctgtggtgattgctgggggcaccatgcagcctgtgtctgacttccggcagcagctgctggcctgtgccggcgtggaggccgagcgggtggtggagttcagctgtggccacgtgatccccccagacaacatcctgcccctggtgatctgcagcggcatcagcaaccagcccctggagttcaccttccagaagcgggagctgccccagatgatggatgaggtgggccgcatcctgtgcaacctgtgtggggtggtgcctgggggcgtggtgtgcttcttccccagctatgagtacctgcggcaggtgcacgcccactgggagaagggcggcctgctgggccgcctggccgccaggaagaagatcttccaggagcccaagagcgcccaccaggtggagcaggtgctgctggcctacagccgctgcatccaggcctgtggccaggagcggggccaggtgactggagccctgctgctgtctgtggtgggcggcaagatgtctgagggcatcaacttcagtgacaacctgggccgctgtgtggtgatggtgggcatgcccttccccaacatccgctctgctgagctgcaggagaagatggcctacctggaccagaccctgccccgggcccctggccaggcccctcctgggaaggccctggtggagaacctgtgcatgaaggctgtgaaccagagcatcggccgggccatccgccaccagaaggactttgcctctgtggtgctgctggaccagagatatgcccggccccctgtgctggccaagctgcctgcctggatccgggcccgggtggaggtgaaggccaccttcggccctgccatcgctgctgtgcagaagttccaccgggagaagagcgccagcagctag

SEQ ID NO: 219630 - DNA, 2643 bp, Artificial Sequence
  derived and/or modified sequence
atggccgagctgtaccgggtgctggaggccggcaagatcggcatcttcgaatcaccaacgggcaccgggaaaagcctgagtctgatctgcggcgctctcagttggttaagagattttgaacagaaaaagagagaagaagaagccagactccttgagacaggcactggaccactgcatgacgagaaggacgagagtctatgcctgagttctagctgcgaaggcgccgctggtaccccgagaccggccggcgagccagcctgggtcactcagtttgtgcaaaagaaagaagagagggatctggttgatcggctcaaggcagaacaggcacgcagaaagcagcgggaggagaggttgcagcagcttcagcatcgggtacagctgaaatacgcagccaagagattgagacaggaggaagaggagagggaaaatctcctgcggttaagcagggagatgctcgagacgggcccagaagctgaacggttggagcaactggaatcaggtgaagaggaactggtgctcgctgaatatgagagtgatgaagagaagaaggtcgctagtagagtagatgaggatgaagacgatctggaggaagagcacatcacaaagatctactactgtagccgtacccacagccagttggctcagttcgtacacgaagtaaagaagtctccttttggaaaagatgtgaggctggtgtcactgggctctaggcaaaacctatgtgtgaatgaagatgtgaagtccttgggatctgtgcaactaattaatgatcgctgtgtggatatgcaacgctctagacacgaaaagaagaaaggagctgaggaggaaaaacctaagcgcaggagacaggaaaaacaggccgcatgtcctttttataaccacgagcagatgggtctgctccgcgacgaggctctggccgaggttaaggacatggagcagttgctagccctgggaaaggaggctcgggcatgtccttactacggttcaagactggctattccggccgctcaattagtcgtccttccttatcagatgcttctgcatgccgccacgcgacaggctgctggaattcgcttacaggaccaggtagtcattattgatgaggcccataatctgatcgatacaattactggcatgcacagcgtggaggtctctgggagtcagctgtgccaagctcattcacaacttctgcaatacgtggagagatacggcaaaaggttaaaagctaagaatcttatgtatctaaagcagatcctttatctgctagagaagtttgttgccgtcctgggaggcaacattaaacagaatcccaatacgcagagcctgtctcaaactggaacagagttaaagaccatcaatgatttcctgtttcaatcccaaatcgacaacattaacctgtttaaagtgcagcggtactgcgagaagtccatgatatcacggaaacttttcgggtttactgagcgatacggagccgtgtttagcagccgggagcagccgaagctcgcaggatttcagcagtttctgcagtcgctccagcctcgtacaaccgaagctctcgccgctcccgcggacgaatcccaagctagcacactgcgcccagcctcacccctgatgcacatccaggggttcctggcagcactgacaacagctaaccaagatggccgcgtcattctgtcccgacagggatcattaagccagtctactcttaaattcttgctcctcaacccagcagtgcattttgcccaggtagttaaagagtgccgggccgtagtgatcgctggtggaactatgcagccagtgagcgactttaggcagcagctgctcgcctgtgccggtgtcgaggctgagagagttgtggaattcagctgcggccacgtcatcccccccgacaacatcctccctctggtcatctgctccggcatcagtaaccagcccctcgaatttacttttcagaaaagagaactgccacagatgatggatgaggtcggccggatattatgtaatctgtgcggcgtagtgcccggcggcgtagtgtgtttttttccaagctacgaatatctgcggcaagtccatgctcactgggagaaagggggcttacttggaaggcttgctgcacgcaagaagatctttcaggagcccaagagcgcgcaccaggttgagcaggttctgttggcctactcccgttgtatccaggcctgtggtcaggaaaggggacaggtgactggcgccctgctcctgagtgtcgtaggcggcaagatgtcagaaggcatcaatttctccgacaacttgggacggtgtgtagtcatggttgggatgccctttcccaatatcagaagcgctgaactacaggagaagatggcctatctcgatcaaacgctgcctcgtgcccccggacaggcaccacccggcaaagccctggtggaaaatctgtgtatgaaggccgtcaaccagagtattggacgggccattagacaccagaaggatttcgcgtctgtcgtactccttgaccagcggtatgcacgacctcccgttctggctaagctgcccgcctggatcagggcaagagttgaagtgaaagccacgtttggccccgccattgccgccgtgcaaaagttccaccgggaaaaaagcgcgtctagctag

SEQ ID NO: 219631 - DNA, 2643 bp, Artificial Sequence
  derived and/or modified sequence
atggcggagctgtaccgagtgctagaggccggaaaaatcgggatcttcgagagtccaacgggaacgggcaagagtctttcattaatctgtggggcactgtcttggctacgcgacttcgaacagaagaaacgagaggaggaggctcgattacttgagaccgggactggccctctacacgacgagaaggacgaatctctctgcttatcttccagctgcgaaggcgcagccggtacacctaggcctgccggagagcccgcatgggtaacacagttcgtgcaaaaaaaagaggaaagagatcttgttgatcggcttaaagctgagcaggcgagacggaagcagcgagaagagcgcctccagcagctccagcacagagtgcaactgaagtacgccgctaaacgcctgcgacaggaggaggaagaacgtgaaaacttactgagactgagcagggaaatgcttgaaaccggtcctgaggccgagcggctagaacaactggagtcaggcgaggaagaactcgttctggctgagtatgagtccgatgaggagaagaaggtggcttcccgcgtggacgaagatgaggatgaccttgaagaagaacatatcacaaaaatctattattgctcccggacacattcccagctggcccagttcgtgcatgaggttaaaaaatcgccctttggcaaggatgtgcgactggtgtctctgggaagccgccaaaatctgtgcgtgaatgaggatgtgaagtcactcggcagcgtccaactcatcaacgacaggtgtgttgatatgcagaggtccagacacgaaaagaagaagggcgctgaggaggaaaagccaaaacggcgacgtcaagagaagcaggctgcgtgccccttctacaaccatgaacagatgggccttctgcgagatgaagcactggctgaggtcaaggacatggagcagctgctggccctgggcaaggaagcccgagcctgcccttactacggaagcagactagccattccagccgctcaactggtggtgctgccgtaccagatgcttctgcacgccgctactcggcaggccgcaggcatcagattgcaagaccaggtggtgattatcgatgaagcacacaacctgattgataccatcaccggtatgcatagcgtggaggtgagcggttcccaattatgccaggcgcactcgcagctcttgcaatacgtggagcgatacggaaagcggctgaaggcgaagaatctaatgtacttgaagcaaattctgtatttgctggaaaagtttgtagccgttctcgggggaaacattaaacagaatccaaatacgcagtccttgtctcagacaggaacagaactgaagacaatcaatgacttcttattccagtctcagattgataacattaatcttttcaaggttcagagatattgcgaaaagagtatgattagccgcaaattattcggcttcaccgaaagatatggagccgttttttcttcacgagagcagccaaaacttgcgggattccagcagtttctccaaagcctgcagcctagaacaactgaggcactggcagcccctgccgacgagtcccaagccagcaccttgcgcccagcctccccccttatgcatatccagggattcctagccgcactcaccactgcgaatcaagacgggagggtgatcttatccaggcagggctccctgtcccagtcgacactaaagtttctcctattgaatcctgcagtgcacttcgcacaggttgtgaaggaatgtcgcgcagtagtcatcgcgggaggcacaatgcaacctgtgtccgattttcggcagcagcttctggcttgtgctggcgttgaggccgaaagagtcgtcgagtttagctgcgggcacgtgattcctcccgacaacatccttccactagttatctgtagcgggatctctaaccagcctctggagttcactttccagaagcgcgagttgccgcagatgatggacgaagtcggtcgaattctgtgtaacttatgcggggtggtgcctggcggtgtggtctgcttcttccccagctacgagtacctccgccaggtccatgcacactgggaaaaagggggtttactgggacggctggccgctaggaagaagatctttcaggagcctaaatccgctcaccaggtggaacaggtccttctcgcctactcaaggtgtattcaggcatgcggacaggagcggggtcaggtcacaggggctctgctgttaagtgttgtgggtgggaagatgtctgaggggatcaatttctccgacaatttggggagatgtgttgtcatggtgggcatgccgtttccaaacatccgcagcgccgagttacaggaaaagatggcataccttgaccagacactgccacgcgctccaggccaggccccaccaggcaaggcgctggttgaaaacctatgcatgaaggccgtgaatcagtcgataggccgtgcaatcagacaccagaaagattttgcctcagtggtcctcctggatcagcggtacgccagacctccagtcctcgctaaactgcccgcttggattcgagctcgcgtcgaagttaaagctaccttcggccctgctatagccgctgtacagaaattccatcgggagaagagcgcttcatcctag

SEQ ID NO: 219632 - protein, 215 aa, Artificial Sequence
  derived and/or modified sequence
MYSFMGGGLFCAWVGTILLVVAMATDHWMQYRLSGSFAHQGLWRYCLGNKCYLQTDSIGEPPGQGPGRAWGKSRADLGAQGHLYSRWRTLRLKEGKGATQAYWNATRAFMILSALCAISGIIMGIMAFAHQPTFSRISRPFSAGIMFFSSTLFVVLALAIYTGVTVSFLGRRFGDWRFSWSYILGWVAVLMTFFAGIFYMCAYRVHECRRLSTPR

SEQ ID NO: 219633 - DNA, 648 bp, Artificial Sequence
  derived and/or modified sequence
atgtactcttttatgggaggaggtctattttgcgcctgggtcgggaccattctgctcgtggttgctatggctacagaccattggatgcagtataggctgtctggatcttttgcccaccagggcctgtggaggtattgtctcgggaataaatgttacctacaaaccgactcgattggtgagcctcctggccaggggcctggccgggcatggggcaagtctcgagccgatctcggcgcccaggggcacctgtacagccgctggcggactctgaggctgaaggagggcaagggggccacacaggcatattggaatgcgacccgcgcatttatgattctctctgcactctgcgccatcagtggcattataatgggcatcatggcatttgcccatcaaccaacattcagccgcataagcaggcccttcagcgccggaattatgtttttctcttccactctgttcgtcgtgctggccctggccatctacacaggagtcacagtctcatttctgggacgccggttcggcgattggcgattctcctggtcctacatcctgggctgggtagcggtgctgatgacctttttcgcaggaattttttatatgtgcgcctatagggttcacgagtgccggcggttgagcactccccggtag

SEQ ID NO: 219634 - DNA, 983 bp, Artificial Sequence
  derived and/or modified sequence
gtggcagaaggagggctcgggcaggctctgccactcagatcaccatgtacagcttcatgggtggtggcctgttctgtgcctgggtggggaccatcctcctggtggtggccatggcaacagaccactggatgcagtaccggctgtcagggtccttcgcccaccagggcctgtggcggtactgcctgggcaacaagtgctacctgcagacagacagcatcggtgagccccccggccagggtccaggccgcgcctggggaaagagcagggcggacctcggggcccaaggacacctgtattccagatggagaactctgcggctcaaagagggaaagggagcaacccaagcatactggaatgccacccgggccttcatgatcctgtctgccctatgcgccatctccggcatcatcatgggcatcatggccttcgctcatcagcctaccttctcccgcatctcccggcccttctctgctggcatcatgtttttttcctcaacccttttcgtcgtgttggccttggccatctacactggagtcaccgtcagcttcctgggccgccgctttggggactggcgcttttcctggtcctacatcctgggctgggtggcagtgctcatgacgttcttcgcagggattttctacatgtgcgcctaccgggtgcatgaatgccggcgcctgtctacaccccgctgagcccaaatgtgtcccccaacttcatctggaagttaaagtgaggccactgaagaggaggaggagggtctagaggcctgaaatcctggttcctaggggaatgagggggctcagttctggactgtgggtttgtggggggaggctgactcctggtcctaggctggaaggaggaagaatagggcccatgggagggagctgagaagactcaagtccccgtctgcctggcaggttgttagaaaaatggactatccattagagcaactttctggggcctaataaaactgatgtgaaact

SEQ ID NO: 219635 - DNA, 648 bp, Artificial Sequence
  derived and/or modified sequence
atgtacagcttcatgggcggcggcctcttctgtgcctgggtgggcaccatcctgctggtggtggccatggccacagaccactggatgcagtaccgcctgagcggcagctttgcccaccagggcctgtggagatactgcctgggcaacaagtgctacctgcagacagacagcatcggggagcccccaggccagggccctggccgggcctggggcaagagcagagctgacctgggcgcccagggccacctgtacagccgctggaggaccctgcggctgaaggagggcaagggggccacccaggcctactggaatgccacccgggccttcatgatcctgagcgccctgtgtgccatcagcggcatcatcatgggcatcatggcctttgcccaccagcccaccttcagccgcatcagccggcccttctctgctggcatcatgttcttcagcagcaccctgtttgtggtgctggccctggccatctacacaggagtgacagtgtccttcctgggcagaagatttggagactggaggttctcctggagctacatcctgggctgggtggccgtgctgatgaccttctttgctggcatcttctacatgtgtgcctacagagtgcatgaatgtagaaggctgagcaccccaagatag

SEQ ID NO: 219636 - DNA, 648 bp, Artificial Sequence
  derived and/or modified sequence
atgtacagcttcatgggcggcggcctgttctgcgcctgggtgggcaccattctgttagtggtggcgatggccactgatcattggatgcaataccgactgtccggtagcttcgctcaccaaggactgtggcgctattgcctgggcaataagtgttacctgcagaccgactcgatcggcgaaccgcctggacaggggccaggacgcgcatggggaaagagtcgggctgatctgggagcacagggacacttgtactcccgatggagaacgctacggctcaaagaaggaaaaggcgcgactcaggcctactggaacgctaccagggcatttatgattctgtccgcactgtgtgccatttccggcattatcatgggtatcatggccttcgcccatcaacccactttctctaggatatccagaccattcagcgccggcattatgttttttagctcaactctgttcgtggttctggccctggctatatacaccggagtgactgttagctttttgggcaggagattcggggattggagattcagttggagctacattctgggatgggtggctgtgctgatgaccttctttgctgggatcttctatatgtgcgcgtaccgcgtgcacgagtgccggcgtttgtccacccctcgctag

SEQ ID NO: 219637 - DNA, 648 bp, Artificial Sequence
  derived and/or modified sequence
atgtactccttcatggggggtggtctgttttgtgcatgggtgggaacaatccttttagttgttgccatggctaccgatcactggatgcagtataggttgtcaggcagcttcgctcaccaggggctctggagatactgtcttggcaacaagtgctacctgcaaaccgacagtattggtgagcccccaggccaaggccctggacgagcgtggggcaagagcagagcagacttaggagcacaaggtcatctgtactccaggtggagaactctcagacttaaggaaggaaagggtgccacacaagcatactggaatgccacacgggcattcatgatcctctccgccctgtgtgccatttcaggcatcataatgggaattatggctttcgctcatcagccgacctttagccggatcagcaggccattttccgctggaatcatgttcttctcatctacgctgttcgttgtgctggcgctggcgatttataccggtgtgactgtgtcattcttgggccgacggtttggagattggcggtttagttggtcctacatactggggtgggtagcagtattgatgacattttttgcaggcattttctacatgtgtgcgtacagagtccatgagtgtaggagattgagcacaccaagatag

SEQ ID NO: 219638 - DNA, 648 bp, Artificial Sequence
  derived and/or modified sequence
atgtacagcttcatgggcggcggcctgttctgcgcctgggtgggcaccatcctgctggtggtggccatggccaccgaccactggatgcagtacagactgagcggcagcttcgcccaccagggcctgtggagatactgcctgggcaacaagtgctacctgcagaccgacagcatcggcgagccccccggccagggccccggcagagcctggggcaagagcagagccgacctgggcgcccagggccacctgtacagcagatggagaaccctgagactgaaggagggcaagggcgccacccaggcctactggaacgccaccagagccttcatgatcctgagcgccctgtgcgccatcagcggcatcatcatgggcatcatggccttcgcccaccagcccaccttcagcagaatcagcagacccttcagcgccggcatcatgttcttcagcagcaccctgttcgtggtgctggccctggccatctacaccggcgtgaccgtgagcttcctgggcagaagattcggcgactggagattcagctggagctacatcctgggctgggtggccgtgctgatgaccttcttcgccggcatcttctacatgtgcgcctacagagtgcacgagtgcagaagactgagcacccccagatag

SEQ ID NO: 219639 - protein, 306 aa, Artificial Sequence
  derived and/or modified sequence
MESIFHEKQPSGNMDDSGFFSIQVISNALKVWGLELILFNSPEYQRLRIDPINERSFICNYKEHWFTVRKLGKQWFNLNSLLTGPELISDTYLALFLAQLQQEGYSIFVVKGDLPDCEADQLLQMIRVQQMHRPKLIGEELAQLKEQRVHKTDLERVLEANDGSGMLDEDEEDLQRALALSRQEIDMEDEEADLRRAIQLSMQGSSRNISQDMTQTSGTNLTSEELRKRREAYFEKQQQKQQQQQQQQQQGDLSGQSSHPCERPATSSGALGSDLGDAMSEEDMLQAAVTMSLETVRNDLKTEGKK

SEQ ID NO: 219640 - DNA, 921 bp, Artificial Sequence
  derived and/or modified sequence
atggagtccatatttcatgagaagcagccctcaggtaacatggatgactctgggtttttcagtatccaagttatcagtaatgcactcaaggtttggggattggagttaatactatttaactcacctgaatatcaacgcctgagaatcgatcccatcaacgaacggagtttcatttgtaattacaaagaacattggtttactgtcagaaaactggggaagcagtggtttaatctgaattccttactgactggacccgagctcatttccgatacttacctcgcactgttcctggctcagctacaacaagaaggctattccatttttgttgtgaagggggacctgccagattgtgaggctgaccagcttctacaaatgatccgggtgcagcagatgcatcggcctaagctgataggcgaggaattagcgcagctgaaggaacagcgagtgcataaaacggacctggaacgagttctggaggcaaatgacgggtccggcatgctggacgaggacgaggaggacctacagcgcgcactggcactctctcgacaggagatagacatggaggacgaggaggcagatttgaggcgggccattcagctgtcaatgcagggctcaagcagaaacattagtcaagacatgacacagactagcggcacaaatctcacctccgaagagcttcgcaaacgcagggaggcttacttcgaaaagcagcaacaaaaacagcagcaacagcaacagcagcagcagcagggtgacctcagcggccagagttctcatccttgcgagcggcccgccacgagcagcggcgccctgggctcggatctgggcgacgccatgtctgaagaggacatgctccaagccgccgtgaccatgtctctggagaccgtgaggaacgatttgaagaccgagggcaagaagtag

SEQ ID NO: 219641 - DNA, 921 bp, Artificial Sequence
  derived and/or modified sequence
atggagagcatcttccacgagaagcagcccagcggcaacatggatgattctggcttcttcagcatccaggtgatcagcaatgccctgaaggtgtggggcctggagctgatcctcttcaacagccctgagtaccagaggctgagaattgaccccatcaatgaaagaagcttcatctgcaactacaaggagcactggttcaccgtgaggaagctgggcaagcagtggttcaacctgaacagcctgctgactggacctgagctgatcagtgacacctacctggccctcttcctggcccagctgcagcaggagggctacagcatctttgtggtgaagggggacctgcctgactgtgaggccgaccagctgctgcagatgatccgggtgcagcagatgcaccggcccaagctgattggagaggagctggcccagctgaaggagcagagggtgcacaagacagacctggagcgggtgctggaggccaatgatggcagcggcatgctggatgaagatgaggaggacctgcagagggccctggccctgagccggcaggagattgacatggaggatgaggaggccgacctgcggcgggccatccagctgtccatgcagggcagcagcaggaacatcagccaggacatgacccagaccagcggcaccaacctgaccagcgaggagctgaggaagagaagagaggcctactttgagaagcagcagcagaagcagcagcagcagcagcagcagcagcagcagggcgacctgagcggccagagcagccacccctgtgagaggcctgccaccagcagcggggccctgggcagtgacctgggagatgccatgtctgaggaggacatgctgcaggccgctgtgaccatgagcctggagaccgtgagaaatgacctgaagacagagggcaagaagtag

SEQ ID NO: 219642 - DNA, 921 bp, Artificial Sequence
  derived and/or modified sequence
atggagagcatcttccacgagaagcagcccagcggcaacatggacgactcagggtttttcagcatccaggtcatttccaacgccctaaaggtgtgggggctggaactgattctttttaactctccagaataccaacgacttagaatcgatccaattaatgagcgcagcttcatttgcaattacaaggagcactggttcacggtaagaaagctaggaaaacaatggtttaatttaaactccttgctgacagggcccgagctgatctcagatacatatctagctctattcttggcacagttgcagcaggaaggatatagcatctttgtcgtcaagggcgatctcccagactgcgaggcagaccagctgcttcagatgattagggtgcaacagatgcataggccaaaactgattggcgaagaactagcgcaactgaaagaacagcgagtgcataagaccgatttggaacgggtgcttgaagcaaatgacggatccgggatgttagacgaggacgaggaggatcttcagagggcccttgccctgtcccgtcaggagatcgacatggaagatgaggaagccgacctgcgccgcgctattcagctttccatgcagggcagctcccggaatattagccaggatatgacacagacttccggaaccaatctgactagtgaggagttgcggaagagaagggaagcatacttcgagaaacagcagcagaaacagcaacaacagcagcagcagcagcaacaaggagacctgagtggacagtcaagccatccatgcgaacggcccgccacttcatccggcgcgctgggttcagacctgggtgacgccatgagtgaagaagatatgctccaggctgctgtgaccatgtccttggaaacagtgcggaacgatttgaaaacagaaggaaagaaatag

SEQ ID NO: 219643 - DNA, 921 bp, Artificial Sequence
  derived and/or modified sequence
atggagagtatctttcacgaaaaacagccttcaggcaatatggatgacagcggatttttttctatccaggtcatctccaacgcccttaaggtgtgggggctggaactcatcctcttcaatagccccgaatatcagagactccgcattgacccaatcaacgaaagatcttttatctgtaactacaaggagcactggtttactgtacgcaagctgggtaaacagtggtttaacctgaactcactgcttacaggcccagagcttatcagcgatacctacctcgccttattcttagcccagctgcagcaggaaggttattccatattcgtcgtgaaaggagacttgcccgattgtgaggccgaccagctgctccaaatgattcgagtccagcagatgcacaggcctaagttgataggcgaagagctggcacagctgaaggagcaaagagtgcataaaacagacctcgagagagtgcttgaagccaacgacggatccggtatgcttgacgaggacgaagaggacctgcagcgcgcactggccctgtcccggcaagagattgacatggaggatgaagaggccgacttgcgccgtgcgatacagcttagtatgcaaggcagctctagaaacatctcacaagacatgacacagacaagcggaacaaacctaacctccgaggagttgcggaagaggcgggaggcctacttcgagaagcagcagcagaagcagcagcagcaacagcagcagcagcaacagggggacttaagcggacagtccagccatccttgcgagcgacctgctacatcttccggcgctctgggctctgatcttggtgatgctatgtccgaagaagacatgctccaggctgcagtcactatgagcctggagacagtgaggaatgacctaaaaacggaggggaagaagtag

SEQ ID NO: 219644 - DNA, 1205 bp, Artificial Sequence
  derived and/or modified sequence
ggggcggagctggagggggtggttcggcgtgggggccgttggctccagacaaataaacatggagtccatcttccacgagaaacagccttctggaaatatggatgacagtggttttttctctattcaggttataagcaatgccttgaaagtttggggtttagaactaatcctgttcaacagtccagagtatcagaggctcaggatcgatcctataaatgaaagatcatttatatgcaattataaggaacactggtttacagttagaaaattaggaaaacagtggtttaacttgaattctctcttgacgggtccagaattaatatcagatacatatcttgcacttttcttggctcaattacaacaggaaggttattctatatttgtcgttaagggtgatctgccagattgcgaagctgaccaactcctgcagatgattagggtccaacagatgcatcgaccaaaacttattggagaagaattagcacaactaaaagagcaaagagtccataaaacagacctggaacgagtgttagaagcaaatgatggctcaggaatgttagacgaagatgaggaggatttgcagagggctctggcactaagtcgccaagaaattgacatggaagatgaggaagcagatctccgcagggctattcagctaagtatgcaaggtagttccagaaacatatctcaagatatgacacagacatcaggtacaaatcttacttcagaagagcttcggaagagacgagaagcctactttgaaaaacagcagcaaaagcagcaacagcagcagcagcagcagcagcagggggacctatcaggacagagttcacatccatgtgaaaggccagccaccagttcaggagcacttgggagtgatctaggtgatgctatgagtgaagaagacatgcttcaggcagctgtgaccatgtctttagaaactgtcagaaatgatttgaaaacagaaggaaaaaaataatacctttaaaaaataatttagatattcatactttccaacattatcctgtgtgattacagcatagggtccactttggtaatgtgtcaaagagatgaggaaataagacttttagcggtttgcaaacaaaatgatgggaaagtggaacaatgcgtcggttgtaggactaaataatgatcttccaaatattagccaaagaggcattcagcaattaaagacatttaaaata

SEQ ID NO: 219645 - DNA, 921 bp, Artificial Sequence
  derived and/or modified sequence
atggagagcatcttccacgagaagcagcccagcggcaacatggacgacagcggcttcttcagcatccaggtgatcagcaacgccctgaaggtgtggggcctggagctgatcctgttcaacagccccgagtaccagagactgagaatcgaccccatcaacgagagaagcttcatctgcaactacaaggagcactggttcaccgtgagaaagctgggcaagcagtggttcaacctgaacagcctgctgaccggccccgagctgatcagcgacacctacctggccctgttcctggcccagctgcagcaggagggctacagcatcttcgtggtgaagggcgacctgcccgactgcgaggccgaccagctgctgcagatgatcagagtgcagcagatgcacagacccaagctgatcggcgaggagctggcccagctgaaggagcagagagtgcacaagaccgacctggagagagtgctggaggccaacgacggcagcggcatgctggacgaggacgaggaggacctgcagagagccctggccctgagcagacaggagatcgacatggaggacgaggaggccgacctgagaagagccatccagctgagcatgcagggcagcagcagaaacatcagccaggacatgacccagaccagcggcaccaacctgaccagcgaggagctgagaaagagaagagaggcctacttcgagaagcagcagcagaagcagcagcagcagcagcagcagcagcagcagggcgacctgagcggccagagcagccacccctgcgagagacccgccaccagcagcggcgccctgggcagcgacctgggcgacgccatgagcgaggaggacatgctgcaggccgccgtgaccatgagcctggagaccgtgagaaacgacctgaagaccgagggcaagaagtag

SEQ ID NO: 219646 - protein, 400 aa, Artificial Sequence [sequence omitted]

SEQ ID NO: 219647 - DNA, 1203 bp, Artificial Sequence
  derived and/or modified sequence
atgctggccagaagaaagcccgtgctgcccgccctgaccatcaaccccaccatcgccgagggccccagccccaccagcgagggcgccagcgaggccaacctggtggacctgcagaagaagctggaggagctggagctggacgagcagcagaagaagagactggaggccttcctgacccagaaggccaaggtgggcgagctgaaggacgacgacttcgagagaatcagcgagctgggcgccggcaacggcggcgtggtgaccaaggtgcagcacagacccagcggcctgatcatggccagaaagctgatccacctggagatcaagcccgccatcagaaaccagatcatcagagagctgcaggtgctgcacgagtgcaacagcccctacatcgtgggcttctacggcgccttctacagcgacggcgagatcagcatctgcatggagcacatggacggcggcagcctggaccaggtgctgaaggaggccaagagaatccccgaggagatcctgggcaaggtgagcatcgccgtgctgagaggcctggcctacctgagagagaagcaccagatcatgcacagagacgtgaagcccagcaacatcctggtgaacagcagaggcgagatcaagctgtgcgacttcggcgtgagcggccagctgatcgacagcatggccaacagcttcgtgggcaccagaagctacatggcccccgagagactgcagggcacccactacagcgtgcagagcgacatctggagcatgggcctgagcctggtggagctggccgtgggcagataccccatccccccccccgacgccaaggagctggaggccatcttcggcagacccgtggtggacggcgaggagggcgagccccacagcatcagccccagacccagaccccccggcagacccgtgagcggccacggcatggacagcagacccgccatggccatcttcgagctgctggactacatcgtgaacgagcccccccccaagctgcccaacggcgtgttcacccccgacttccaggagttcgtgaacaagtgcctgatcaagaaccccgccgagagagccgacctgaagatgctgaccaaccacaccttcatcaagagaagcgaggtggaggaggtggacttcgccggctggctgtgcaagaccctgagactgaaccagcccggcacccccaccagaaccgccgtgtag

SEQ ID NO: 219648 - DNA, 1203 bp, Artificial Sequence
  derived and/or modified sequence
atgctcgcaagacgtaagcccgtacttccagccttaactattaaccctacaatagctgaggggccctcccctacttctgagggagcgtccgaggccaatttggttgatttacaaaagaagctggaagagctggagctggatgagcagcaaaaaaaaagattagaggcattcctgactcagaaggccaaagtaggtgaactgaaagatgacgactttgagcggatctcagagcttggggctggcaacggcggtgttgtgaccaaggtgcagcataggccatcaggactgatcatggcacgaaagttaattcacctggaaatcaaaccagcaatcaggaaccagataattcgcgagctccaggtgttacacgaatgcaacagcccatacattgttggtttttacggcgccttctattccgacggagaaatctccatttgtatggaacacatggacggtggtagcctcgatcaagtgctgaaagaggccaagcgtattcctgaagagattctgggaaaggtctccatcgctgtcctaagaggccttgcttatttaagagagaagcaccagattatgcacagggatgtgaagcctagtaatattttggtgaatagcaggggagagatcaaactctgtgattttggagtttcgggacagctaattgattctatggccaactcctttgtaggaacgaggagctatatggctcccgaacggctccagggaacacactatagtgtgcaatccgacatctggagcatggggttgagcctggtggagctggcagtgggccggtaccccattccacccccggacgctaaagagcttgaagccatcttcggacgacccgtggtcgatggcgaggaaggcgagccccacagcatcagtccaaggccaaggccacctggcaggccagtgagtggacatggcatggactcacgaccagccatggcaatcttcgagctgctggattacatcgtcaatgagccaccccccaagctgccgaatggggttttcactccagatttccaagagttcgtaaacaagtgtctgatcaaaaaccctgccgaacgcgcggacctgaaaatgctgactaatcataccttcatcaagcgctccgaggtggaagaggtagattttgcaggctggttatgcaaaacccttcgtttaaaccagcccggtacgcccacacggacagcagtttag

SEQ ID NO: 219649 - DNA, 1203 bp, Artificial Sequence
  derived and/or modified sequence
atgctggcccggaggaagcctgtgctgcctgccctgaccatcaaccccaccatcgccgagggccccagccccaccagcgagggcgccagcgaggccaacctggtggacctgcagaagaagctggaggagctggagctggatgagcagcagaagaagaggctggaggccttcctgacccagaaggccaaggtgggggagctgaaggatgatgactttgagcgcatcagcgagctgggcgctggaaatggaggagtggtgaccaaggtgcagcaccggcccagcggcctcatcatggccaggaagctgatccacctggagatcaagccagccatccggaaccagatcatccgggagctgcaggtgctgcacgagtgcaacagcccctacatcgtgggcttctacggggccttctacagtgatggagagatcagcatctgcatggagcacatggatggcggcagcctggaccaggtgctgaaggaggccaagagaattcctgaggagatcctgggcaaggtgtccattgctgtgctgcggggcctggcctacctgcgggagaagcaccagatcatgcacagagatgtgaagcccagcaacatcctggtgaacagcagaggagagatcaagctgtgtgactttggagtgtctggccagctgattgacagcatggccaacagctttgtgggcaccaggagctacatggcccctgagcggctgcagggcacccactacagcgtgcagagcgacatctggagcatgggcctgagcctggtggagctggccgtgggccgctaccccatccccccaccagatgccaaggagctggaggccatcttcggccggcctgtggtggatggagaggagggggagccccacagcatcagcccccggccccggcccccaggccggcctgtgtctggccacggcatggacagcaggcctgccatggccatctttgagctgctggactacatcgtgaatgaacctccacccaagctgcccaatggagtcttcaccccagacttccaggagtttgtgaacaagtgcctgatcaagaacccagctgagagagctgacctgaagatgctgaccaaccacaccttcatcaagaggtctgaggtggaggaggtggactttgctggctggctgtgcaagaccctgcggctgaaccagcccggcacccccaccaggacagctgtgtag

SEQ ID NO: 219650 - DNA, 1203 bp, Artificial Sequence
  derived and/or modified sequence
atgctggcccggcggaagcccgtgctgcccgccctgaccatcaaccctacaatcgctgagggcccctctcctacctcggaaggggccagtgaggccaatttggttgatctgcagaaaaaactggaggagcttgagctcgatgagcagcaaaagaaaagattagaagcattcttgactcagaaagcaaaggttggcgaacttaaggacgatgactttgaacgcattagtgagctaggtgcaggaaacggaggggtggtaaccaaggtccagcacaggccttcgggcctcatcatggcccggaagcttatccacctcgaaattaagcccgctatacgtaatcaaattattcgggagctgcaggttctacacgaatgcaattcaccctacatcgtgggtttttacggtgctttctattcggacggagagattagtatctgtatggagcacatggacggtggaagtctggatcaagtgcttaaagaggcaaaaagaattcctgaagaaatcttagggaaagtcagtattgctgtcctgaggggcctcgcttacttgcgcgaaaagcaccaaatcatgcaccgagacgtcaaacccagtaatatcctggtgaactccagaggtgaaatcaaactatgtgattttggtgtctcgggacagctgatcgactctatggctaactctttcgtcgggacacggagttacatggctcctgagcgactgcagggcacccattacagtgtccagagcgatatttggagcatgggtctatccctggtggaactagccgtggggcgctaccccatccctcccccagacgccaaagagctcgaagcgatctttgggcgccctgtggtggatggtgaggagggagaaccccatagcatcagtcctcgcccgagacctcctggaagacctgtgtctggacatgggatggattccaggcctgcaatggcgatcttcgaacttctggactacatcgttaatgaaccaccgcctaagctgccaaacggagtatttacccccgattttcaagagtttgtgaacaagtgcctcattaagaatccagccgaacgtgccgacctgaagatgctgacgaaccatacgtttatcaagcgctctgaagtcgaagaggtggacttcgcaggttggctgtgcaaaacactgcgtctgaaccagcccggcacccctacccgtactgccgtctag

SEQ ID NO: 219651 - DNA, 1734 bp, Artificial Sequence
  derived and/or modified sequence
cccctgcctctcggactcgggctgcggcgtcagccttcttcgggcctcggcagcggtagcggctcgctcgcctcagccccagcgcccctcggctaccctcggcccaggcccgcagcgccgcccgccctcggccgccccgacgccggcctgggccgcggccgcagccccgggctcgcgtaggcgccgaccgctcccggcccgccccctatgggccccggctagaggcgccgccgccgccggcccgcggagccccgatgctggcccggaggaagccggtgctgccggcgctcaccatcaaccctaccatcgccgagggcccatcccctaccagcgagggcgcctccgaggcaaacctggtggacctgcagaagaagctggaggagctggaacttgacgagcagcagaagaagcggctggaagcctttctcacccagaaagccaaggtcggcgaactcaaagacgatgacttcgaaaggatctcagagctgggcgcgggcaacggcggggtggtcaccaaagtccagcacagaccctcgggcctcatcatggccaggaagctgatccaccttgagatcaagccggccatccggaaccagatcatccgcgagctgcaggtcctgcacgaatgcaactcgccgtacatcgtgggcttctacggggccttctacagtgacggggagatcagcatttgcatggaacacatggacggcggctccctggaccaggtgctgaaagaggccaagaggattcccgaggagatcctggggaaagtcagcatcgcggttctccggggcttggcgtacctccgagagaagcaccagatcatgcaccgagatgtgaagccctccaacatcctcgtgaactctagaggggagatcaagctgtgtgacttcggggtgagcggccagctcatcgactccatggccaactccttcgtgggcacgcgctcctacatggctccggagcggttgcagggcacacattactcggtgcagtcggacatctggagcatgggcctgtccctggtggagctggccgtcggaaggtaccccatccccccgcccgacgccaaagagctggaggccatctttggccggcccgtggtcgacggggaagaaggagagcctcacagcatctcgcctcggccgaggccccccgggcgccccgtcagcggtcacgggatggatagccggcctgccatggccatctttgaactcctggactatattgtgaacgagccacctcctaagctgcccaacggtgtgttcacccccgacttccaggagtttgtcaataaatgcctcatcaagaacccagcggagcgggcggacctgaagatgctcacaaaccacaccttcatcaagcggtccgaggtggaagaagtggattttgccggctggttgtgtaaaaccctgcggctgaaccagcccggcacacccacgcgcaccgccgtgtgacagtggccgggctccctgcgtcccgctggtgacctgcccaccgtccctgtccatgccccgcccttccagctgaggacaggctggcgcctccacccaccctcctgcctcacccctgcggagagcaccgtggcggggcgacagcgcatgcaggaacgggggtctcctctcctgcccgtcctggccggggtgcctctggggacgggcgacgctgctgtgtgtggtctcagaggctctgcttccttaggttacaaaacaaaacagggagagaaaaagcaaa

SEQ ID NO: 219652 - DNA, 1203 bp, Artificial Sequence
  derived and/or modified sequence
atgctggctagaaggaagcccgttctgccagccttaaccataaatcccactatcgccgagggtccttcccccacctcagagggggcttccgaggcgaacctcgtcgatctccagaagaaattagaggagttggaactcgatgaacagcaaaagaaaagactggaggccttccttactcagaaggctaaagtaggagaattgaaggacgacgacttcgaaaggatcagcgaactgggagctggcaacggtggagttgtgacaaaggtccagcataggccctccgggttgatcatggcgagaaagctcattcatctggagatcaagccggctattagaaaccagatcattagggagctgcaggtcctgcatgaatgcaattcaccctatatcgtagggttttatggagccttttattcagatggggagattagcatctgtatggagcacatggacgggggatctctggatcaggttctgaaggaggccaagcgtataccggaagaaatactgggaaaagtgtccattgcggtattgcggggtttagcctatttgcgggaaaagcatcagataatgcatcgggatgtgaagccatccaatatattggtgaattctcggggagaaatcaagttgtgcgacttcggcgtgtcggggcaactgatcgattcaatggccaactctttcgtggggactcggtcatatatggcgcctgaacggctgcagggaacccactattctgtccagtccgacatatggtctatgggattgtctttggttgagctcgctgtcggacggtaccctatacccccacctgatgcaaaagaactggaggccatctttggaagaccagtcgtggacggtgaagaaggcgagccccactctatttcaccacggcctcgtcccccaggcagacctgtaagtggacatggcatggactcacggccagccatggcgatcttcgagctactggattacatcgtgaacgagccaccccctaagctgcccaacggagtgtttacccctgatttccaggaattcgtcaataaatgcctaatcaaaaatccggctgaacgggctgatttaaagatgctcactaaccacacatttatcaagcggtctgaggtggaggaagtagattttgccggatggctctgcaagacactgagactcaatcaaccaggcacccccacccgtacagcagtgtag

SEQ ID NO: 219653 - protein, 116 aa, Artificial Sequence
  derived and/or modified sequence
MCDQTKHSKCCPAKGNQCCPPQQNQCCQSKGNQCCPPKQNQCCQPKGSQCCPPKHNHCCQPKPPCCIQARCCGLETKPEVSPLNMESEPNSPQTQDKGCQTQQQPHSPQNESRPSK

SEQ ID NO: 219654 - DNA, 351 bp, Artificial Sequence
  derived and/or modified sequence
atgtgcgaccagaccaagcacagcaagtgctgccccgccaagggcaaccagtgctgccccccccagcagaaccagtgctgccagagcaagggcaaccagtgctgcccccccaagcagaaccagtgctgccagcccaagggcagccagtgctgcccccccaagcacaaccactgctgccagcccaagcccccctgctgcatccaggccagatgctgcggcctggagaccaagcccgaggtgagccccctgaacatggagagcgagcccaacagcccccagacccaggacaagggctgccagacccagcagcagccccacagcccccagaacgagagcagacccagcaagtag

SEQ ID NO: 219655 - DNA, 351 bp, Artificial Sequence
  derived and/or modified sequence
atgtgcgaccaaaccaaacattccaagtgctgtcccgccaaaggtaaccagtgttgcccaccccagcagaatcagtgttgtcagtcaaaagggaaccaatgctgccctccaaagcagaatcagtgttgtcagcccaaaggatctcagtgttgcccccctaaacacaaccactgctgccagcctaaaccaccatgttgcatacaggcgcgttgctgtggactggaaaccaagccggaagtgtctccccttaacatggaaagcgaacctaattcaccacaaacacaggacaagggatgccagacgcagcagcagccccacagtccccagaacgagtcacgcccatccaagtag

SEQ ID NO: 219656 - DNA, 351 bp, Artificial Sequence
  derived and/or modified sequence
atgtgtgaccagaccaagcacagcaagtgctgcccagccaagggcaaccagtgctgccccccccagcagaaccagtgctgccagagcaagggcaaccagtgctgcccccccaagcagaaccagtgctgccagcccaagggcagccagtgctgcccccccaagcacaaccactgctgccagcccaagccaccctgctgcatccaggcccgctgctgcggcctggagaccaagccagaggtgagccccctgaacatggagagcgagcccaacagcccccagacccaggacaagggctgccagacccagcagcagccccacagcccccagaatgaaagccggcccagcaagtag

SEQ ID NO: 219657 - DNA, 192 bp, Artificial Sequence
  derived and/or modified sequence
atggccgcccccctgtctgtggaggtggagtttggcagcagccctggctgcctcttcctgtggagcagctttgctgaggtggtgcgcagcagctgcctgactgtgctgagaaatattgagagcctgtgcctggacagaagaaatcctggcaccagcggcacctgcagcagcggcagccgccgcatctgctag

SEQ ID NO: 219658 - DNA, 351 bp, Artificial Sequence
  derived and/or modified sequence
atgtgcgaccagaccaagcacagcaagtgctgccccgccaagggcaaccaatgctgtccaccccagcaaaaccagtgttgtcaaagcaagggcaaccagtgttgccctcccaaacagaatcagtgttgtcaacccaaggggagccagtgttgtccaccaaagcacaatcactgctgtcaaccaaagccaccttgttgcattcaggccaggtgttgcgggctggagacaaaacccgaggtaagcccattaaacatggagtctgagccaaactcccctcagacccaggacaaagggtgccagacgcagcagcagcctcactctcctcagaacgagtcccgcccctctaaatag

SEQ ID NO: 219659 - DNA, 351 bp, Artificial Sequence
  derived and/or modified sequence
atgtgcgatcagacaaagcattctaagtgttgtccagcaaagggaaaccagtgctgcccacctcagcaaaatcagtgttgtcaatctaaaggcaatcagtgctgccctcctaagcagaatcagtgctgccaacctaagggaagtcagtgttgtccccctaagcataaccactgctgtcagccgaagcctccttgttgcattcaagcacggtgttgcggcctggagaccaaaccagaggtctcacctcttaacatggagagtgagcccaattcaccacaaacgcaggataagggctgccagactcaacagcagccccacagtccacagaacgaatctagaccatccaaatag

SEQ ID NO: 219660 - DNA, 775 bp, Artificial Sequence
  derived and/or modified sequence
ggttcagaaggctttggcttctgatagtcatggactcactaggctgctgaggaagatcaataatacctactggaatcagtcatgagaagtcaagcatggaaattgtgaattgtgtgtgtggccagaccagtacctccaagtgttcagaagatgtgtgaccagacaaaacacagtaaatgctgcccagcaaaaggcaatcaatgctgcccaccacagcagaaccagtgctgccagtcaaaaggcaatcaatgctgcccaccaaaacagaaccagtgctgccagccaaaaggcagtcaatgctgcccaccaaaacacaatcactgctgccagccaaaacccccatgctgcattcaggccaggtgctgtggtttggagaccaagcctgaagtctcaccccttaacatggagtctgagcccaactcaccgcaaactcaggacaagggctgtcaaacccagcagcagccccatagcccacaaaatgagtccaggccaagcaaatgagagcagaagaagtcaaacaaagaagaagtccctggggccatgcctttcactttgtagggtgggggattactgagagtcaggctagacctgtgtttagagaagcagttttcacagtgactaccatttccacccaatgagaggctcctatttcccatcatagctccctaccctagggaggcctccatctggaaatgggaggatgaagaggctagaatcatctttcctagtgatcctgacatttagacagcacagaaataaagagcaataaaaagaa

SEQ ID NO: 219661 - protein, 349 aa, Artificial Sequence
  derived and/or modified sequence
MSSLSGKVQTVLGLVEPSKLGRTLTHEHLAMTFDCCYCPPPPCQEAISKEPIVMKNLYWIQKNAYSHKENLQLNQETEAIKEELLYFKANGGGALVENTTTGISRDTQTLKRLAEETGVHIISGAGFYVDATHSSETRAMSVEQLTDVLMNEILHGADGTSIKCGIIGEIGCSWPLTESERKVLQATAHAQAQLGCPVIIHPGRSSRAPFQIIRILQEAGADISKTVMSHLDRTILDKKELLEFAQLGCYLEYDLFGTELLHYQLGPDIDMPDDNKRIRRVRLLVEEGCEDRILVAHDIHTKTRLMKYGGHGYSHILTNVVPKMLLRGITENVLDKILIENPKQWLTFK

SEQ ID NO: 219662 - DNA, 1050 bp, Artificial Sequence
  derived and/or modified sequence
atgtcttctctttctggcaaagtccaaacagtcctgggattggtggaaccttccaagctaggtagaacacttacccacgagcacttagcgatgactttcgattgctgctattgtccccctcccccctgtcaggaggcaatcagtaaggagcctatcgtgatgaagaatttgtattggattcagaagaacgcatatagtcataaggaaaatctgcaactgaaccaagagactgaggcaattaaggaggagctgttgtattttaaagcaaacggaggcggcgcgctagtcgaaaacacaactactggcattagcagggacacccaaaccctgaaaagactggcagaggagactggagtgcatataatcagcggggccgggttttatgtggatgccacccatagtagcgagaccagggcaatgtctgtggagcagttgaccgatgtgctgatgaacgaaatattgcacggagcagacggcacatcaatcaaatgtggaattattggtgaaatcggatgttcatggcccctgactgaatctgagcgaaaggttcttcaggccacagcccacgcgcaagcgcagctggggtgtccggtcataatacatcccggtaggagctcccgtgcccccttccagatcattcgaattctgcaggaggccggcgcagacatctccaaaactgtgatgtcccaccttgatagaactatcctggacaagaaggaattactcgagtttgcacagctcggatgttatctggagtacgaccttttcgggacggagctgctgcactatcagctcggaccagacatcgacatgccagacgacaacaagaggatcaggagggtcagactgctggttgaggaggggtgtgaggatcgtatcttagtggctcacgatatccacacaaagactcgactgatgaaatatggtggacacggttattcgcacatcctaactaatgtcgtccccaaaatgctccttcggggcatcacagagaacgtcctggataagatactgatcgaaaatcctaagcagtggctcacgttcaagtag

SEQ ID NO: 219663 - DNA, 1050 bp, Artificial Sequence
  derived and/or modified sequence
atgtccagcctgtccgggaaagtccagactgtcctgggacttgtggaacccagcaagctagggcgaactctcacacatgagcacctggccatgactttcgactgttgttattgtcccccacctccgtgccaggaggccatctccaaggaaccaatcgtgatgaagaacctgtactggattcaaaaaaacgcttattcacataaggagaaccttcagctgaatcaagagacggaggcgatcaaggaagagcttctatacttcaaagccaacggcggtggcgcactggttgagaataccactaccggaatcagcagagacacacagaccctcaagcgtcttgctgaggaaaccggcgttcacatcatctccggcgccggtttttatgtggacgcaacacatagctcagagacaagggcaatgtcagtagagcagctgacggacgtccttatgaacgaaattctgcacggcgccgacggaacttctattaagtgtggtataatcggagagattgggtgcagctggcccttaaccgagtccgaacgtaaagtcctccaggctactgcccatgcccaggcccagctggggtgccccgtgatcatacacccaggacggtcatcccgagcccctttccagattatcagaatcttacaggaggccggcgccgacatctcaaagaccgtcatgagtcacctagaccggacaatcctagataagaaagaactccttgaatttgcgcagctaggatgctatcttgagtatgatctgtttgggaccgagttactgcattaccagctgggcccagatattgacatgcctgacgataataagagaataaggagggtgcgtcttctcgtcgaggaaggttgtgaggataggattttggtggcacatgatatccataccaaaacgaggctgatgaaatatgggggacacggctactctcatattttaactaatgtggtccctaagatgctcttgagaggtattacagagaatgtgttggacaaaatactgattgaaaacccaaaacagtggctgaccttcaagtag

SEQ ID NO: 219664 - DNA, 1050 bp, Artificial Sequence
  derived and/or modified sequence
atgagttccctttcagggaaagttcagacagtgctcgggttagtggagccgtctaagctcgggcgcacgctgactcacgagcacctggccatgactttcgactgctgttactgtccaccccccccctgccaagaagccatcagcaaggaacctatagtgatgaaaaatctttattggatccaaaagaatgcttattcacataaggagaacttgcagctcaaccaggagaccgaagccatcaaagaagagttactgtatttcaaagccaacggtgggggggcacttgtggagaataccacgacaggcatctcacgagatacccagacattgaagaggttggccgaggaaacaggcgttcacataatctccggcgccggcttctacgttgatgccactcattcttctgagacacgggcgatgtcagttgaacagctcaccgatgtgcttatgaacgagattttgcatggcgccgacggtacttccattaagtgcgggattatcggagaaatcggctgcagttggcctctaacagagtccgagcgtaaggtcctgcaggctactgcacatgcacaggctcagcttggctgcccagtcattatccaccctggccggagctcacgagccccctttcaaattattcgaattctgcaggaggcaggagcagatatcagcaagacagtaatgtctcatttggacagaaccatactggataagaaagaattgctagaattcgcccagctggggtgctaccttgagtacgacctgttcgggacagagttactccattaccagctgggtccagacatcgacatgcccgatgacaataaacggattaggagagtgcgactactggttgaggaggggtgtgaagatagaattctggtggcccacgatatccataccaaaacaagactaatgaaatatggaggtcacgggtactctcatatcctgacaaatgtagtccctaaaatgctgctgaggggtattacagaaaacgtcctggacaagatcctgatcgagaatcctaagcagtggctcacattcaaatag

SEQ ID NO: 219665 - DNA, 1050 bp, Artificial Sequence
  derived and/or modified sequence
atgtcctctctgagcggaaaggttcagaccgtcctgggattggtggagccttccaagttgggccggaccctgactcacgagcacctggcgatgaccttcgattgttgctattgtcctccccccccctgccaggaagctatttcaaaggagcccattgtgatgaagaatctgtactggatccagaaaaatgcctattctcacaaggagaacctgcaattaaaccaagaaaccgaagcgataaaggaagagcttctgtactttaaagcaaacgggggtggagctctagtagagaacactaccacaggaatttctcgcgatactcagacgctcaagaggttggccgaagaaacaggagttcacatcattagcggtgctggcttctatgtggacgcaactcattcctctgagacccgggctatgtctgtagagcaactcacagacgtgctcatgaatgagatacttcatggggcagacggcacatccattaagtgcggcatcattggcgaaatcggctgtagttggcccctgacagaatcggagcgcaaggtactgcaggcaacagcacatgcccaggcgcaacttgggtgccccgttatcatccatcccggtaggagctcccgcgcaccgttccaaattatcaggatattgcaggaggctggtgccgatatctcaaagactgtaatgtcacaccttgatcggactatcctggacaagaaggaactgttggaattcgctcagttggggtgttacctcgaatacgaccttttcgggacggagctgcttcattatcagctgggcccagacatcgacatgcccgacgataacaaacgcataaggcgtgttaggctgctggtggaggaagggtgtgaagatcggatcctcgtggcccatgacattcacactaagacaaggcttatgaagtacggcggacacggatattcacacatcctaacaaacgtcgtcccaaaaatgttactccgcggaataaccgagaatgtcctggataagatcttgattgagaatcccaagcagtggttaaccttcaagtag

SEQ ID NO: 219666 - DNA, 1050 bp, Artificial Sequence
  derived and/or modified sequence
atgagcagcctgagcggcaaggtgcagacagtgctgggcctggtggagcccagcaagctgggccgcaccctgacccatgagcacctggccatgacctttgactgctgctactgccccccaccaccctgccaggaggccatcagcaaggagcccatcgtgatgaagaacctgtactggatccagaagaatgcctacagccacaaggagaacctgcagctgaaccaggagacagaggccatcaaggaggagctgctgtacttcaaggccaacggcggcggggccctggtggagaacaccaccaccggcatcagccgggacacccagaccctgaagaggctggccgaggagactggagtgcacatcatctctggagctggcttctacgtggatgccacccacagcagcgagacccgggccatgtctgtggagcagctgacagatgtgctgatgaatgagatcctgcatggagcagatggcaccagcatcaagtgtggcatcattggagagatcggctgctcctggcccctgacagaaagtgagaggaaggtgctgcaggccacagcccacgcccaggcccagctgggctgccctgtgatcatccaccctggccgcagcagccgggcccccttccagatcatccgcatcctgcaggaggccggggctgacatcagcaagacagtgatgagccacctggacaggaccatcctggacaagaaggagctgctggagtttgcccagctgggctgctacctggagtatgacctgtttggaacagagctgctgcactaccagctgggccctgacatcgacatgccagatgacaacaagaggatcagaagagtgcggctgctggtggaggagggctgtgaggaccgcatcctggtggcccatgacatccacaccaagacccggctgatgaagtatggaggccacggctacagccacatcctgaccaacgtggtgcccaagatgctgctgcggggcatcacagaaaatgtgctggacaagatcctgattgagaaccccaagcagtggctgaccttcaagtag

SEQ ID NO: 219667 - DNA, 1050 bp, Artificial Sequence
  derived and/or modified sequence
atgagcagcctgagcggcaaggtgcagaccgtgctgggcctggtggagccttcaaaactggggcgcaccttaacccacgagcacctagccatgactttcgattgttgctactgtcctcctccgccttgccaagaggcaatcagcaaagagcccatcgtcatgaagaacttgtattggatacaaaaaaatgcctactcccacaaggaaaatcttcagttgaatcaggagacagaggcaataaaagaagagctcctgtatttcaaggccaacggaggaggcgcattggtcgagaataccacgacgggcatctcccgcgacactcagactctaaagagactcgctgaggaaaccggtgtgcacatcatttctggcgccggcttttatgtagatgcaacacactcgtccgaaacccgcgccatgagtgtagagcagcttactgacgtgctaatgaacgagatcctccatggagcagacgggacttctattaaatgtggcatcatcggcgaaattgggtgctcctggccacttacagagagtgagagaaaagtcttgcaggccacagctcatgcccaggcccagcttggatgccccgtgattattcaccctggaagatcaagccgggccccgttccaaataatcaggatactacaggaagcaggcgccgacatttccaagactgtgatgtctcacctagatcggaccattttggataagaaggagctgctggaatttgctcagttaggatgttatctggaatatgacctatttggaactgagcttctacattatcagctggggcctgacatcgatatgccggatgacaacaagaggatccggcgcgtacggttattagtcgaggaaggatgtgaggatcgcatattggtggcccacgacattcacacaaaaactcgtctgatgaaatatgggggccacgggtacagccacatactgacaaacgtcgtgcccaaaatgctgcttagagggatcacagagaatgtcctggataagattctaatagaaaacccgaaacagtggctcaccttcaagtag

SEQ ID NO: 219668 - DNA, 1050 bp, Artificial Sequence
  derived and/or modified sequence
atgagcagcctgagcggcaaggtgcagaccgtgctgggcctggtggagccctccaagctgggccgcaccctgacccacgaacatctggctatgaccttcgactgctgttactgtccccctcctccctgtcaggaggccattagcaaagaacccattgtgatgaaaaatctgtattggatccagaagaacgcatatagtcataaggaaaacctgcaactcaatcaggaaactgaagccataaaagaggaactgctgtatttcaaggcgaacggaggcggcgccctggtggagaacacaaccacaggaatcagccgggatacacaaaccctgaagcggctcgccgaggaaacgggggtacacatcatctctggagccgggttttacgttgacgctacccactcttctgagacaagggccatgtctgtggaacaactcactgacgtgctgatgaatgagatccttcacggcgccgatgggacatctattaagtgtggaatcatcggcgagatcggttgtagttggccactcacagagtcggagagaaaagtcctgcaggctacagcccatgctcaggcccaattggggtgccctgtcattattcaccctggcagatccagcagagcacctttccagataatccgtatactgcaggaggctggcgccgacatatctaagaccgtgatgtcacatctggaccgtacgattcttgacaagaaggagctgctggaattcgcccagctgggttgttatcttgaatacgatctctttggcaccgaactgctgcactaccagctggggcccgacattgacatgccagatgataacaagagaattcggcgtgtgcggctgctggtggaggaaggctgcgaggatcgcatactcgtggctcatgatatccatactaaaactcgcctaatgaagtatggaggccatggatatagccacatcctgaccaacgtggtgcctaagatgcttctgaggggtatcaccgagaatgttcttgacaagattcttatcgagaatcccaaacagtggcttacttttaagtag

SEQ ID NO: 219669 - DNA, 1050 bp, Artificial Sequence
  derived and/or modified sequence
atgagcagcctgagcggcaaggtgcagaccgtgctgggcctggtggaaccctccaagctcgggcgcaccctcacccacgagcacttagctatgacctttgattgttgctactgcccgccccccccttgccaagaagctatcagcaaggaaccaatcgtgatgaagaatttgtactggatccagaagaacgcctattctcataaggagaatctccagctgaaccaggaaaccgaggccattaaagaggagctgctgtattttaaggcaaatggcggtggagcactcgtagagaatacaaccactgggatctctagggatacccaaaccctgaaaagactcgcagaagaaacgggcgttcatattatttctggggccggattctacgtcgacgccacgcatagttcggagacacgggcgatgtccgtggagcagctgactgacgtcctgatgaatgaaatattgcacggtgctgacggcacatctatcaaatgcggcattataggtgagatcggttgctcatggccactgaccgagtctgagcgtaaggtgctgcaggccactgcccacgcgcaggcccagcttggctgtcccgtgattatccatcccggcaggtccagcagggccccttttcagatcatccgcatcctccaggaagctggggctgacatcagcaagacagttatgagtcaccttgatcggacaattttggacaagaaagagctgcttgagtttgcccaactagggtgctatctggaatacgacctgttcggaactgaactcctgcactatcagctgggtccagacatagacatgcccgacgacaacaagcgtattcgccgcgtgcgactgctggttgaagaaggctgcgaagaccggattttggtcgcacacgatatccacacaaaaactaggcttatgaaatatggcggacacggatatagccacatcttgacgaacgtggtcccaaagatgctgctacgaggaattactgaaaatgttctggataaaatccttatcgagaatcctaagcagtggttgaccttcaaatag

SEQ ID NO: 219670 - DNA, 1050 bp, Artificial Sequence
  derived and/or modified sequence
atgagcagcctgagcggcaaggtgcagaccgtgctgggcctggtggagccttccaaactcggaaggacactgacgcacgagcacctcgctatgactttcgactgttgttactgtccacccccaccttgccaggaggctatctcgaaggagcccatcgtgatgaagaacttgtattggatccagaaaaacgcctattcccacaaggagaatctgcagctgaatcaggaaaccgaggccataaaggaagaactgctgtacttcaaggcgaatggcggcggagccctggtagagaacaccaccaccggaatatcacgcgatacccaaacactcaaacgacttgctgaggaaaccggtgtgcatatcatcagcggagccggcttttacgtcgatgccacccactctagcgagaccagggcaatgtccgtggaacaactcaccgatgtcctcatgaacgagattctgcacggggctgacggaacatccataaaatgtggaatcattggtgagatcggctgctcctggcctctcaccgaaagtgagcggaaggtactgcaagccactgcacacgctcaggcccaactgggttgccccgtaatcatccacccgggtcgctcctcgagggcaccatttcaaatcatccgcatccttcaagaggcaggggccgacatctcaaagaccgttatgtcacatctggaccggactattctggataaaaaagaacttctcgagttcgcccaactgggatgctacctggaatacgacttatttggcactgaacttctccactaccagcttggtcctgacatcgatatgccggacgacaataagagaattagacgcgttcgcctcctggtcgaggagggatgtgaggacaggatccttgtcgcacacgatatccatacaaaaacaagactgatgaaatacggcggtcacggttactcccacatcctgactaacgtggtccccaagatgctgctgcggggaataaccgagaatgtgctggataagattctcatagagaatcccaaacaatggctgactttcaaatag

SEQ ID NO: 219671 - DNA, 3584 bp, Artificial Sequence
  derived and/or modified sequence
tttagaaaaaagaaatcctctttttagaacatctcttggtggtaccatcagaaatgtcttccttaagtggaaaagtccaaaccgttttgggccttgtagagccaagcaaactgggccgtaccctgacccatgaacacctggccatgacctttgactgctgttactgtccacctcccccgtgccaggaagctatttccaaagaacctatcgtgatgaaaaatttatattggattcagaaaaacgcctattcccataaagaaaaccttcaattaaatcaggagacagaagccataaaggaagaactgttgtattttaaagctaatggtggaggggctttggtggaaaacacaaccactgggattagccgagacacacagacgttgaagaggcttgcagaagagactggcgtccatatcatatctggagccgggttttatgtggatgcaactcactcctcagagaccagggccatgtcagtggagcagcttaccgatgtccttatgaatgaaattctccatggagctgatggaaccagtatcaagtgtggcattattggagaaattggttgctcctggcctttgactgagagtgaaagaaaggttctccaggccacagctcatgcccaggctcagcttggttgtcctgttattatccatcctggacggagctccagggcaccatttcagattatccgaatattgcaagaagcaggcgcagacatctccaaaacagtcatgtcacacctggataggactattcttgataagaaagagctcttggagtttgctcaacttggctgctacttggaatatgatctctttggtactgaactacttcattaccaactcggcccagatattgacatgcctgatgataacaaaagaattagaagggtgcgtctcctggtggaagagggctgtgaagatcgaattctggtagcacatgacatacatacgaaaacccggctgatgaaatatggaggtcacggctattctcatatactcaccaatgttgttcctaaaatgttgctgagaggcataactgagaatgtgcttgataagattctaatagagaaccctaagcaatggctaactttcaaataggatggttgcttatgaattcacaccttgagtataaaacttgcagagaacattcagcgatttccagtccactgtgagatattaatcagttacctaggactaatgacagatcatttccttctgatgagaactaggagggtttgccttctctgagaccagctattacaactgtgcctctagggagttactcagcctaattgagccctattattttaacttaacaaaataaatacagaagtacctatttctaaacaatgatttaaagtctatatcccctaagcggagttgttgtttttctccctaatctatcagctgcactacttgagaaaatttaaagtgtttctagttaaattatttccttcttgagcgatctaatgtttcttgtaatattgatgatcctactaattatcctgctgttctttaattaatgcttaatgaataatatggcactgtaaaatagcttctgcaacaagggaagttaaattttgagacttttttccccaaaggatactgactgtaatacaattaccaattcacaatgataaaaatattttgaaaggttaattttatactgtccacctatctatatattcttctactgaaatgattttgatatctttggctttccggtatctatttttgccatacattttgctgttttgcaaagtttgtataagaacacataacactactgaattataaaaattcaatcataaaagtcaaaatatattacataatatagtttaatgaatcattacatttataataacaaaggccacaatttaattaattggtaagatataatgcaaaaaaaaaaagagaaatgtttgccttatgtatattccctttatttcctttaccttttgtttttccttggacctaaacagagaaaataatgcttatgtatctgaagaaaaggtcagatctattggaaatgacagcccgatacttgagcctcctctttaaaaggtatccagccctgatattttgtgtaaataaaatgtttttaaaacctgttagttaaaacacttaggtgatgggcactgctgcttataaattcatcttttggttgaatcctcactatgctatttggtacctaaaaatattctccaaacccttgctgccagttcctctttgataaatatatagttaattcgaaataaaatccattgcaattcatttatgagttatcttacatatcacaaagaccaattagaattagtcattattcttgatgaagagtctgtttttaatcataaaaatcatgacagttactcagacccaggcatttcaacagagctaacaccaccttcagataggcacaccatgcataactcttgggaagttgagctttgctaaataaaagatatttctgctgatcaaagatgatcaagctttctgtgtattggaacagaaagtaacaaagaggaatgagccaggagaacaaactaattcctttaaataaataaaaaaaaaaaatgcaaatgtccttcaccagtaaagcaagcaaatttttaaaatctctgtttttgaaatctactcgtcaaagagttttcagaggcaatgaaaggggaacagatttttcattgtaatagtggaagttgtgtgatagttaggagatatcaacatgcatttttaatcttttccttagatgaaagagatggcttttggcagtgtgttctaaccagaaagaaaggatttgtattactctccaaatctactgtactgtcagcttcactccacctgagaaaaaagaaaaaaaaattgatagctcaaatgcatgtaattcataaacactgcaaaggagagccacttggtgtctgcagtcctcatattaacagtctgtcacagaatgcagttaaagtattgattggcatatggtaatagagcaaccatagccttaacttacagacctgtgaaataaagggcattttgacctaatacaattaattttctggataactcttaaagagaagtcattttaactgtttttgctactccatatattgtcattcaaaatatattttaacccaaaataagttaaataatttgtgcatgtttgtgtgtgtatatatgcatacacttttttatattaaaattttgaggctatacagccactgtgccctgtggaataaagccatatatataaatgttttatatgtatatgttttatacataaataaaacatttcatctaatatatatatgtgtgtgtgagtatatgtgtgcatgtttagcagatatttgtataaaatataaacactctgttgtcatataggctatatgcgaaattgttaattttaaaataacctcaggccacagacttgtagtaatcatttgaaggcctcacctagtgtccccttggtgacgtatgcagcagctcaaattaaacctttgtgcattgggttatgaataatcttttcttccaaagatggcaaaagcctcggtttgatttgatactaaagaataaatttctctgactttc

SEQ ID NO: 219672 - DNA, 3709 bp, Artificial Sequence
  derived and/or modified sequence
ggagggcacaggggagactaaaaaggccagggaagttggcctgccggaagttcccagggagaaggcagcgcgttgtacccgagatttgttttttaagattagaagaagactcagggagagacacattcttaaaaaagaaatcctctttttagaacatctcttggtggtaccatcagaaatgtcttccttaagtggaaaagtccaaaccgttttgggccttgtagagccaagcaaactgggccgtaccctgacccatgaacacctggccatgacctttgactgctgttactgtccacctcccccgtgccaggaagctatttccaaagaacctatcgtgatgaaaaatttatattggattcagaaaaacgcctattcccataaagaaaaccttcaattaaatcaggagacagaagccataaaggaagaactgttgtattttaaagctaatggtggaggggctttggtggaaaacacaaccactgggattagccgagacacacagacgttgaagaggcttgcagaagagactggcgtccatatcatatctggagccgggttttatgtggatgcaactcactcctcagagaccagggccatgtcagtggagcagcttaccgatgtccttatgaatgaaattctccatggagctgatggaaccagtatcaagtgtggcattattggagaaattggttgctcctggcctttgactgagagtgaaagaaaggttctccaggccacagctcatgcccaggctcagcttggttgtcctgttattatccatcctggacggagctccagggcaccatttcagattatccgaatattgcaagaagcaggcgcagacatctccaaaacagtcatgtcacacctggataggactattcttgataagaaagagctcttggagtttgctcaacttggctgctacttggaatatgatctctttggtactgaactacttcattaccaactcggcccagatattgacatgcctgatgataacaaaagaattagaagggtgcgtctcctggtggaagagggctgtgaagatcgaattctggtagcacatgacatacatacgaaaacccggctgatgaaatatggaggtcacggctattctcatatactcaccaatgttgttcctaaaatgttgctgagaggcataactgagaatgtgcttgataagattctaatagagaaccctaagcaatggctaactttcaaataggatggttgcttatgaattcacaccttgagtataaaacttgcagagaacattcagcgatttccagtccactgtgagatattaatcagttacctaggactaatgacagatcatttccttctgatgagaactaggagggtttgccttctctgagaccagctattacaactgtgcctctagggagttactcagcctaattgagccctattattttaacttaacaaaataaatacagaagtacctatttctaaacaatgatttaaagtctatatcccctaagcggagttgttgtttttctccctaatctatcagctgcactacttgagaaaatttaaagtgtttctagttaaattatttccttcttgagcgatctaatgtttcttgtaatattgatgatcctactaattatcctgctgttctttaattaatgcttaatgaataatatggcactgtaaaatagcttctgcaacaagggaagttaaattttgagacttttttccccaaaggatactgactgtaatacaattaccaattcacaatgataaaaatattttgaaaggttaattttatactgtccacctatctatatattcttctactgaaatgattttgatatctttggctttccggtatctatttttgccatacattttgctgttttgcaaagtttgtataagaacacataacactactgaattataaaaattcaatcataaaagtcaaaatatattacataatatagtttaatgaatcattacatttataataacaaaggccacaatttaattaattggtaagatataatgcaaaaaaaaaaagagaaatgtttgccttatgtatattccctttatttcctttaccttttgtttttccttggacctaaacagagaaaataatgcttatgtatctgaagaaaaggtcagatctattggaaatgacagcccgatacttgagcctcctctttaaaaggtatccagccctgatattttgtgtaaataaaatgtttttaaaacctgttagttaaaacacttaggtgatgggcactgctgcttataaattcatcttttggttgaatcctcactatgctatttggtacctaaaaatattctccaaacccttgctgccagttcctctttgataaatatatagttaattcgaaataaaatccattgcaattcatttatgagttatcttacatatcacaaagaccaattagaattagtcattattcttgatgaagagtctgtttttaatcataaaaatcatgacagttactcagacccaggcatttcaacagagctaacaccaccttcagataggcacaccatgcataactcttgggaagttgagctttgctaaataaaagatatttctgctgatcaaagatgatcaagctttctgtgtattggaacagaaagtaacaaagaggaatgagccaggagaacaaactaattcctttaaataaataaaaaaaaaaaatgcaaatgtccttcaccagtaaagcaagcaaatttttaaaatctctgtttttgaaatctactcgtcaaagagttttcagaggcaatgaaaggggaacagatttttcattgtaatagtggaagttgtgtgatagttaggagatatcaacatgcatttttaatcttttccttagatgaaagagatggcttttggcagtgtgttctaaccagaaagaaaggatttgtattactctccaaatctactgtactgtcagcttcactccacctgagaaaaaagaaaaaaaaattgatagctcaaatgcatgtaattcataaacactgcaaaggagagccacttggtgtctgcagtcctcatattaacagtctgtcacagaatgcagttaaagtattgattggcatatggtaatagagcaaccatagccttaacttacagacctgtgaaataaagggcattttgacctaatacaattaattttctggataactcttaaagagaagtcattttaactgtttttgctactccatatattgtcattcaaaatatattttaacccaaaataagttaaataatttgtgcatgtttgtgtgtgtatatatgcatacacttttttatattaaaattttgaggctatacagccactgtgccctgtggaataaagccatatatataaatgttttatatgtatatgttttatacataaataaaacatttcatctaatatatatatgtgtgtgtgagtatatgtgtgcatgtttagcagatatttgtataaaatataaacactctgttgtcatataggctatatgcgaaattgttaattttaaaataacctcaggccacagacttgtagtaatcatttgaaggcctcacctagtgtccccttggtgacgtatgcagcagctcaaattaaacctttgtgcattgggttatgaataatcttttcttccaaagatggcaaaagcctcggtttgatttgatactaaagaataaatttctctgactttc

SEQ ID NO: 219673 - DNA, 3777 bp, Artificial Sequence
  derived and/or modified sequence
aaaaaggccagggaagttggcctgccggaagttcccagggagaaggcagcgcgttgtacccgagattcagggtctggctctgcttcccaggctagagtgcatttggcgcgatcacagctcactgcagcctcgacctcctgagctcaagcgaacttcctgcctcagcctcctgagcttcctgagtagctgcgactacagaaaaaagaaatcctctttttagaacatctcttggtggtaccatcagaaatgtcttccttaagtggaaaagtccaaaccgttttgggccttgtagagccaagcaaactgggccgtaccctgacccatgaacacctggccatgacctttgactgctgttactgtccacctcccccgtgccaggaagctatttccaaagaacctatcgtgatgaaaaatttatattggattcagaaaaacgcctattcccataaagaaaaccttcaattaaatcaggagacagaagccataaaggaagaactgttgtattttaaagctaatggtggaggggctttggtggaaaacacaaccactgggattagccgagacacacagacgttgaagaggcttgcagaagagactggcgtccatatcatatctggagccgggttttatgtggatgcaactcactcctcagagaccagggccatgtcagtggagcagcttaccgatgtccttatgaatgaaattctccatggagctgatggaaccagtatcaagtgtggcattattggagaaattggttgctcctggcctttgactgagagtgaaagaaaggttctccaggccacagctcatgcccaggctcagcttggttgtcctgttattatccatcctggacggagctccagggcaccatttcagattatccgaatattgcaagaagcaggcgcagacatctccaaaacagtcatgtcacacctggataggactattcttgataagaaagagctcttggagtttgctcaacttggctgctacttggaatatgatctctttggtactgaactacttcattaccaactcggcccagatattgacatgcctgatgataacaaaagaattagaagggtgcgtctcctggtggaagagggctgtgaagatcgaattctggtagcacatgacatacatacgaaaacccggctgatgaaatatggaggtcacggctattctcatatactcaccaatgttgttcctaaaatgttgctgagaggcataactgagaatgtgcttgataagattctaatagagaaccctaagcaatggctaactttcaaataggatggttgcttatgaattcacaccttgagtataaaacttgcagagaacattcagcgatttccagtccactgtgagatattaatcagttacctaggactaatgacagatcatttccttctgatgagaactaggagggtttgccttctctgagaccagctattacaactgtgcctctagggagttactcagcctaattgagccctattattttaacttaacaaaataaatacagaagtacctatttctaaacaatgatttaaagtctatatcccctaagcggagttgttgtttttctccctaatctatcagctgcactacttgagaaaatttaaagtgtttctagttaaattatttccttcttgagcgatctaatgtttcttgtaatattgatgatcctactaattatcctgctgttctttaattaatgcttaatgaataatatggcactgtaaaatagcttctgcaacaagggaagttaaattttgagacttttttccccaaaggatactgactgtaatacaattaccaattcacaatgataaaaatattttgaaaggttaattttatactgtccacctatctatatattcttctactgaaatgattttgatatctttggctttccggtatctatttttgccatacattttgctgttttgcaaagtttgtataagaacacataacactactgaattataaaaattcaatcataaaagtcaaaatatattacataatatagtttaatgaatcattacatttataataacaaaggccacaatttaattaattggtaagatataatgcaaaaaaaaaaagagaaatgtttgccttatgtatattccctttatttcctttaccttttgtttttccttggacctaaacagagaaaataatgcttatgtatctgaagaaaaggtcagatctattggaaatgacagcccgatacttgagcctcctctttaaaaggtatccagccctgatattttgtgtaaataaaatgtttttaaaacctgttagttaaaacacttaggtgatgggcactgctgcttataaattcatcttttggttgaatcctcactatgctatttggtacctaaaaatattctccaaacccttgctgccagttcctctttgataaatatatagttaattcgaaataaaatccattgcaattcatttatgagttatcttacatatcacaaagaccaattagaattagtcattattcttgatgaagagtctgtttttaatcataaaaatcatgacagttactcagacccaggcatttcaacagagctaacaccaccttcagataggcacaccatgcataactcttgggaagttgagctttgctaaataaaagatatttctgctgatcaaagatgatcaagctttctgtgtattggaacagaaagtaacaaagaggaatgagccaggagaacaaactaattcctttaaataaataaaaaaaaaaaatgcaaatgtccttcaccagtaaagcaagcaaatttttaaaatctctgtttttgaaatctactcgtcaaagagttttcagaggcaatgaaaggggaacagatttttcattgtaatagtggaagttgtgtgatagttaggagatatcaacatgcatttttaatcttttccttagatgaaagagatggcttttggcagtgtgttctaaccagaaagaaaggatttgtattactctccaaatctactgtactgtcagcttcactccacctgagaaaaaagaaaaaaaaattgatagctcaaatgcatgtaattcataaacactgcaaaggagagccacttggtgtctgcagtcctcatattaacagtctgtcacagaatgcagttaaagtattgattggcatatggtaatagagcaaccatagccttaacttacagacctgtgaaataaagggcattttgacctaatacaattaattttctggataactcttaaagagaagtcattttaactgtttttgctactccatatattgtcattcaaaatatattttaacccaaaataagttaaataatttgtgcatgtttgtgtgtgtatatatgcatacacttttttatattaaaattttgaggctatacagccactgtgccctgtggaataaagccatatatataaatgttttatatgtatatgttttatacataaataaaacatttcatctaatatatatatgtgtgtgtgagtatatgtgtgcatgtttagcagatatttgtataaaatataaacactctgttgtcatataggctatatgcgaaattgttaattttaaaataacctcaggccacagacttgtagtaatcatttgaaggcctcacctagtgtccccttggtgacgtatgcagcagctcaaattaaacctttgtgcattgggttatgaataatcttttcttccaaagatggcaaaagcctcggtttgatttgatactaaagaataaatttctctgactttc

SEQ ID NO: 219674 - DNA, 3366 bp, Artificial Sequence
  derived and/or modified sequence
acaggggagactaaaaaggccagggaagttggcctgccggaagttcccagggagaaggcagcgcgttgtacccgagaaaaaagaaatcctctttttagaacatctcttggtggtaccatcagaaatgtcttccttaagtggaaaagtccaaaccgttttgggccttgtagagccaagcaaactgggccgtaccctgacccatgaacacctggccatgacctttgactgctgttactgtccacctcccccgtgccaggaagctatttccaaagaacctatcgtgatgaaaaatttatattggattcagaaaaacgcctattcccataaagaaaaccttcaattaaatcaggagacagaagccataaaggaagaactgttgtattttaaagctaatggtggaggggctttggtggaaaacacaaccactgggattagccgagacacacagacgttgaagaggcttgcagaagagactggcgtccatatcatatctggagccgggttttatgtggatgcaactcactcctcagagaccagggccatgtcagtggagcagcttaccgatgtccttatgaatgaaattctccatggagctgatggaaccagtatcaagtgtggcattattggagaaattggttgctcctggcctttgactgagagtgaaagaaaggttctccaggccacagctcatgcccaggctcagcttggttgtcctgttattatccatcctggacggagctccagggcaccatttcagattatccgaatattgcaagaagcaggcgcagacatctccaaaacagtcatgtcacacctggataggactattcttgataagaaagagctcttggagtttgctcaacttggctgctacttggaatatgatctctttggtactgaactacttcattaccaactcggcccagatattgacatgcctgatgataacaaaagaattagaagggtgcgtctcctggtggaagagggctgtgaagatcgaattctggtagcacatgacatacatacgaaaacccggctgatgaaatatggaggtcacggctattctcatatactcaccaatgttgttcctaaaatgttgctgagaggcataactgagaatgtgcttgataagattctaatagagaaccctaagcaatggctaactttcaaataggatggttgcttatgaattcacaccttgagtataaaacttgcagagaacattcagcgatttccagtccactgtgagatattaatcagttacctaggactaatgacagatcatttccttctgatgagaactaggagggtttgccttctctgagaccagctattacaactgtgcctctagggagttactcagcctaattgagccctattattttaacttaacaaaataaatacagaagtacctatttctaaacaatgatttaaagtctatatcccctaagcggagttgttgtttttctccctaatctatcagctgcactacttgagaaaatttaaagtgtttctagttaaattatttccttcttgagcgatctaatgtttcttgtaatattgatgatcctactaattatcctgctgttctttaattaatgcttaatgaataatatggcactgtaaaatagcttctgcaacaagggaagttaaattttgagacttttttccccaaaggatactgactgtaatacaattaccaattcacaatgataaaaatattttgaaaggttaattttatactgtccacctatctatatattcttctactgaaatgattttgatatctttggctttccggtatctatttttgccatacattttgctgttttgcaaagtttgtataagaacacataacactactgaattataaaaattcaatcataaaagtcaaaatatattacataatatagtttaatgaatcattacatttataataacaaaggccacaatttaattaattggtaagatataatgcaaaaaaaaaaagagaaatgtttgccttatgtatattccctttatttcctttaccttttgtttttccttggacctaaacagagaaaataatgcttatgtatctgaagaaaaggtcagatctattggaaatgacagcccgatacttgagcctcctctttaaaaggtatccagccctgatattttgtgtaaataaaatgtttttaaaacctgttagttaaaacacttaggtgatgggcactgctgcttataaattcatcttttggttgaatcctcactatgctatttggtacctaaaaatattctccaaacccttgctgccagttcctctttgataaatatatagttaattcgaaataaaatccattgcaattcatttatgagttatcttacatatcacaaagaccaattagaattagtcattattcttgatgaagagtctgtttttaatcataaaaatcatgacagttactcagacccaggcatttcaacagagctaacaccaccttcagataggcacaccatgcataactcttgggaagttgagctttgctaaataaaagatatttctgctgatcaaagatgatcaagctttctgtgtattggaacagaaagtaacaaagaggaatgagccaggagaacaaactaattcctttaaataaataaaaaaaaaaaatgcaaatgtccttcaccagtaaagcaagcaaatttttaaaatctctgtttttgaaatctactcgtcaaagagttttcagaggcaatgaaaggggaacagatttttcattgtaatagtggaagttgtgtgatagttaggagatatcaacatgcatttttaatcttttccttagatgaaagagatggcttttggcagtgtgttctaaccagaaagaaaggatttgtattactctccaaatctactgtactgtcagcttcactccacctgagaaaaaagaaaaaaaaattgatagctcaaatgcatgtaattcataaacactgcaaaggagagccacttggtgtctgcagtcctcatattaacagtctgtcacagaatgcagttaaagtattgattggcatatggtaatagagcaaccatagccttaacttacagacctgtgaaataaagggcattttgacctaatacaattaattttctggataactcttaaagagaagtcattttaactgtttttgctactccatatattgtcattcaaaatatattttaacccaaaataagttaaataatttgtgcatgtttgtgtgtgtatatatgcatacacttttttatattaaaattttgaggctatacagccactgtgccctgtggaataaagccatatatataaatgttttatatgtatatgttttatacataaataaaacatttcatct

SEQ ID NO: 219675 - DNA, 1050 bp, Artificial Sequence
  derived and/or modified sequence
atgtcttcgctctctggaaaagtacagactgttctgggactggtggagccgtccaagctcggtcggactctgacacatgaacacctcgcaatgacgtttgattgctgttattgcccacctcccccatgccaagaggctatttccaaggagcctatagtgatgaaaaacctgtattggattcagaaaaacgcatactcgcacaaagaaaatttacagctgaaccaggagaccgaggccatcaaggaagagctactttattttaaggccaacggaggtggggcactagttgagaatacgacaactggaatctctcgggatacccagacacttaaaaggctagcagaagagacaggcgtccacattatcagtggggcaggtttctacgtggatgcgacccattcttctgagaccagggccatgtcagttgaacagttgaccgatgtgcttatgaatgaaattctgcatggtgccgacgggacgagtatcaagtgcggcatcatcggagagattggctgcagctggccactcaccgaatcggagcggaaggtgctgcaggccaccgcccatgctcaggcccagctggggtgccccgtcattatacatccaggtagatcctcccgggcacctttccagattattcgaattctgcaagaagccggagccgacatttccaaaacagtgatgagccacctggatcgcacaatcctggataagaaagagctgttggaatttgctcagttgggttgttatttagagtatgacctgttcgggaccgaactgctgcattatcagcttggcccagacatcgatatgccggacgacaataaaaggattcgccgtgtgcgtctgttggtggaagaaggatgcgaagatagaatccttgtagcccatgatattcacacgaagacaaggctgatgaagtatgggggacacggctattctcacatcttaaccaacgtggttcccaagatgctgttgagaggcattaccgaaaatgttctcgataagatcctgattgaaaacccaaagcagtggctgacattcaagtag

SEQ ID NO: 219676 - DNA, 1050 bp, Artificial Sequence
  derived and/or modified sequence
atgtcatcacttagtggtaaagtgcagactgtgctcggactcgtggaaccatcaaagcttggaagaaccttaacgcatgaacacctggccatgaccttcgactgctgctattgcccaccgcctccgtgccaagaagccatcagcaaagaacccatcgttatgaagaatctctactggatccaaaagaacgcttatagccacaaagaaaacttgcagcttaaccaggagactgaagccatcaaggaggaacttctatacttcaaggctaacggcggaggggctctggtcgaaaatacgaccaccggaatcagtagagacacccagacccttaagaggctggccgaggaaactggggttcacatcatcagcggcgcagggttttatgtggacgctacccacagcagcgagactcgagccatgtcagtggaacaactcaccgacgtactgatgaatgagatattgcacggggctgacgggacaagcattaaatgtggcattattggcgagattggctgctcgtggccgctgacagagtccgaacggaaggtcctgcaggctactgcccacgcccaagctcagctcgggtgccccgtcatcatccaccctggccgatccagccgggcaccttttcaaataatcagaatactacaggaggcgggagcagatatcagcaagaccgtcatgtcccacctggatcggaccattctggataaaaaggagctcctggagttcgcgcagctggggtgctacttggaatacgacctgttcggtactgagcttctccactaccaactagggccagacatcgatatgcctgacgataataaaagaattaggagggtacggcttctggttgaggagggatgcgaagatcggattttagtggcgcatgatatccatactaaaacacgactgatgaagtatggaggccacggatactcacatattttgacaaacgtggttcccaagatgctattacgtggcatcaccgaaaacgtgctggataagatactgatcgagaaccccaagcagtggctgacctttaaatag

SEQ ID NO: 219677 - DNA, 1050 bp, Artificial Sequence
  derived and/or modified sequence
atgagttctctgtccggaaaggtccagactgtgttgggactggttgagccctccaagctgggaaggaccctcacccatgagcacttggcgatgacctttgattgctgttactgtccacctcctccgtgccaggaggccatttccaaggagcctattgtaatgaaaaacttatattggattcagaaaaacgcatacagccacaaggagaatctgcaattaaaccaagagacggaggctatcaaagaagagctgctgtactttaaagccaatggaggaggcgctctagtggagaacacaacgaccggcatttccagagacacccaaacactgaagcggctggccgaagagaccggagtgcacattatctctggggctgggttctatgtcgatgctacgcacagtagcgagacgcgggcaatgtctgtagaacagcttactgatgtcctgatgaacgagatactccatggcgctgacggcacatccataaagtgtggcatcatcggagagattggatgcagctggcccctgaccgagagtgaacgaaaggtcctacaagccacagcccacgcgcaggcgcagctgggctgtccagtgatcatacaccctgggcgtagctctcgggctccgttccagattatccggatccttcaggaggcaggcgctgatatttccaaaacggtgatgagccacctcgatcggaccattttagacaaaaaggaactccttgagttcgctcagctgggttgctatctcgagtacgatttgttcggaacggagctgctccactatcaattgggtccggatatcgatatgcccgatgataataaacggatacgtagggttagattgctggttgaggagggctgcgaggataggatcctggtcgcgcacgacattcacaccaagactagactcatgaaatacggcggacacgggtactctcacatccttactaatgtggtcccgaagatgctgctaagggggatcaccgagaatgtacttgacaagatacttatcgagaatcccaaacagtggttgacatttaagtag

SEQ ID NO: 219678 - DNA, 1050 bp, Artificial Sequence
  derived and/or modified sequence
atgtcctctttgagcggcaaagtgcaaactgttctagggctcgtagagcccagcaagcttggacggaccttgactcatgaacacctggctatgacatttgattgctgctactgtccaccccctccatgtcaggaagctattagcaaggagccaatcgtaatgaagaacctgtactggatccagaagaacgcttactcccataaggagaacctgcagttaaatcaggagaccgaggcgattaaggaggaactgctctacttcaaagccaatggcggaggtgctctggttgagaatacaactacgggcatttcccgggacacccagaccctgaaacgcttggcggaagaaaccggagtccacatcatctccggtgcaggcttttatgttgacgccacccactcaagcgagacgagggcaatgtcagtggaacaactaaccgacgtgctcatgaatgaaattttgcatggcgctgatggaacctccatcaaatgcgggattattggggaaataggttgttcctggcccctgactgagtccgagcggaaggttctccaggcaacagcgcatgctcaggcgcagctagggtgccccgtcatcattcaccccggacggtccagtcgagcccctttccagattatccgcatactccaggaggcaggtgcagacatatcaaaaacggttatgagccacctagaccgcaccatccttgataagaaggagcttcttgagtttgctcagcttggttgctacctcgagtatgacctgtttgggaccgagctcctccactaccagttaggtcccgacattgatatgcccgacgacaacaaaagaatccgcagggtccgcctgctggtcgaggaaggatgtgaagacaggatccttgtggcccacgatattcacactaagacaagacttatgaagtatggtgggcatggctactcccatatcctcacaaacgtagttccaaagatgctactgcggggaatcacggaaaatgtattagataaaatactcatcgaaaacccaaagcaatggttgaccttcaagtag

SEQ ID NO: 219679 - DNA, 1050 bp, Artificial Sequence
  derived and/or modified sequence
atgagcagcctgagcggcaaggtgcagaccgtgctgggcctggtggagcccagcaagctgggcagaaccctgacccacgagcacctggccatgaccttcgactgctgctactgccccccccccccctgccaggaggccatcagcaaggagcccatcgtgatgaagaacctgtactggatccagaagaacgcctacagccacaaggagaacctgcagctgaaccaggagaccgaggccatcaaggaggagctgctgtacttcaaggccaacggcggcggcgccctggtggagaacaccaccaccggcatcagcagagacacccagaccctgaagagactggccgaggagaccggcgtgcacatcatcagcggcgccggcttctacgtggacgccacccacagcagcgagaccagagccatgagcgtggagcagctgaccgacgtgctgatgaacgagatcctgcacggcgccgacggcaccagcatcaagtgcggcatcatcggcgagatcggctgcagctggcccctgaccgagagcgagagaaaggtgctgcaggccaccgcccacgcccaggcccagctgggctgccccgtgatcatccaccccggcagaagcagcagagcccccttccagatcatcagaatcctgcaggaggccggcgccgacatcagcaagaccgtgatgagccacctggacagaaccatcctggacaagaaggagctgctggagttcgcccagctgggctgctacctggagtacgacctgttcggcaccgagctgctgcactaccagctgggccccgacatcgacatgcccgacgacaacaagagaatcagaagagtgagactgctggtggaggagggctgcgaggacagaatcctggtggcccacgacatccacaccaagaccagactgatgaagtacggcggccacggctacagccacatcctgaccaacgtggtgcccaagatgctgctgagaggcatcaccgagaacgtgctggacaagatcctgatcgagaaccccaagcagtggctgaccttcaagtag

SEQ ID NO: 219680 - protein, 1640 aa, Artificial Sequence
  derived and/or modified sequence
MQSFRERCGFHGKQQNYQQTSQETSRLENYRQPSQAGLSCDRQRLLAKDYYNPQPYPSYEGGAGTPSGTAAAVAADKYHRGSKALPTQQGLQGRPAFPGYGVQDSSPYPGRYAGEESLQAWGAPQPPPPQPQPLPAGVAKYDENLMKKTAVPPSRQYAEQGAQVPFRTHSLHVQQPPPPQQPLAYPKLQRQKLQNDIASPLPFPQGTHFPQHSQSFPTSSTYSSSVQGGGQGAHSYKSCTAPTAQPHDRPLTASSSLAPGQRVQNLHAYQSGRLSYDQQQQQQQQQQQQQQALQSRHHAQETLHYQNLAKYQHYGQQGQGYCQPDAAVRTPEQYYQTFSPSSSHSPARSVGRSPSYSSTPSPLMPNLENFPYSQQPLSTGAFPAGITDHSHFMPLLNPSPTDATSSVDTQAGNCKPLQKDKLPENLLSDLSLQSLTALTSQVENISNTVQQLLLSKAAVPQKKGVKNLVSRTPEQHKSQHCSPEGSGYSAEPAGTPLSEPPSSTPQSTHAEPQEADYLSGSEDPLERSFLYCNQARGSPARVNSNSKAKPESVSTCSVTSPDDMSTKSDDSFQSLHGSLPLDSFSKFVAGERDCPRLLLSALAQEDLASEILGLQEAIGEKADKAWAEAPSLVKDSSKPPFSLENHSACLDSVAKSAWPRPGEPEALPDSLQLDKGGNAKDFSPGLFEDPSVAFATPDPKKTTGPLSFGTKPTLGVPAPDPTTAAFDCFPDTTAASSADSANPFAWPEENLGDACPRWGLHPGELTKGLEQGGKASDGISKGDTHEASACLGFQEEDPPGEKVASLPGDFKQEEVGGVKEEAGGLLQCPEVAKADRWLEDSRHCCSTADFGDLPLLPPTSRKEDLEAEEEYSSLCELLGSPEQRPGMQDPLSPKAPLICTKEEVEEVLDSKAGWGSPCHLSGESVILLGPTVGTESKVQSWFESSLSHMKPGEEGPDGERAPGDSTTSDASLAQKPNKPAVPEAPIAKKEPVPRGKSLRSRRVHRGLPEAEDSPCRAPVLPKDLLLPESCTGPPQGQMEGAGAPGRGASEGLPRMCTRSLTALSEPRTPGPPGLTTTPAPPDKLGGKQRAAFKSGKRVGKPSPKAASSPSNPAALPVASDSSPMGSKTKETDSPSTPGKDQRSMILRSRTKTQEIFHSKRRRPSEGRLPNCRATKKLLDNSHLPATFKVSSSPQKEGRVSQRARVPKPGAGSKLSDRPLHALKRKSAFMAPVPTKKRNLVLRSRSSSSSNASGNGGDGKEERPEGSPTLFKRMSSPKKAKPTKGNGEPATKLPPPETPDACLKLASRAAFQGAMKTKVLPPRKGRGLKLEAIVQKITSPSLKKFACKAPGASPGNPLSPSLSDKDRGLKGAGGSPVGVEEGLVNVGTGQKLPTSGADPLCRNPTNRSLKGKLMNSKKLSSTDCFKTEAFTSPEALQPGGTALAPKKRSRKGRAGAHGLSKGPLEKRPYLGPALLLTPRDRASGTQGASEDNSGGGGKKPKMEELGLASQPPEGRPCQPQTRAQKQPGHTNYSSYSKRKRLTRGRAKNTTSSPCKGRAKRRRQQQVLPLDPAEPEIRLKYISSCKRLRSDSRTPAFSPFEPSLGAQNPRSGQNAPPAPADARPLCTTRDRRAYSAREQGQR

SEQ ID NO: 219681 - protein, 1862 aa, Artificial Sequence
  derived and/or modified sequence
MQSFRERCGFHGKQQNYQQTSQETSRLENYRQPSQAGLSCDRQRLLAKDYYNPQPYPSYEGGAGTPSGTAAAVAADKYHRGSKALPTQQGLQGRPAFPGYGVQDSSPYPGRYAGEESLQAWGAPQPPPPQPQPLPAGVAKYDENLMKKTAVPPSRQYAEQGAQVPFRTHSLHVQQPPPPQQPLAYPKLQRQKLQNDIASPLPFPQGWWAGHSYKSCTAPTAQPHDRPLTASSSLAPGQRVQNLHAYQSGRLSYDQQQQQQQQQQQQQQALQSRHHAQETLHYQNLAKYQHYGQQGQGYCQPDAAVRTPEQYYQTFSPSSSHSPARSVGRSPSYSSTPSPLMPNLENFPYSQQPLSTGAFPAGITDHSHFMPLLNPSPTDATSSVDSLTALTSQVENISNTVQQLLLSKAAVPQKKGVKNLVSRTPEQHKSQHCSPEGSGYSAEPAGTPLSEPPSSTPQSTHAEPQEADYLSGSEDPLERSFLYCNQARGSPARVNSNSKAKPESVSTCSVTSPDDMSTKSDDSFQSLHGSLPLDSFSKFVAGERDCPRLLLSALAQEDLASEILGLQEAIGEKADKAWAEAPSLVKDSSKPPFSLENHSACLDSVAKSAWPRPGEPEALPDSLQLDKGGNAKDFSPGLFEDPSVAFATPDPKKTTGPLSFGTKPTLGVPAPDPTTAAFDCFPDTTAASSADSANPFAWPEENLGDACPRWGLHPGELTKGLEQGGKASDGISKGDTHEASACLGFQEEDPPGEKVASLPGDFKQEEVGGVKEEAGGLLQCPEVAKADRWLEDSRHCCSTADFGDLPLLPPTSRKEDLEAEEEYSSLCELLGSPEQRPGMQDPLSPKAPLICTKEEVEEVLDSKAGWGSPCHLSGESVILLGPTVGTESKVQSWFESSLSHMKPGEEGPDGERAPGDSTTSDASLAQKPNKPAVPEAPIAKKEPVPRGKSLRSRRVHRGLPEAEDSPCRAPVLPKDLLLPESCTGPPQGQMEGAGAPGRGASEGLPRMCTRSLTALSEPRTPGPPGLTTTPAPPDKLGGKQRAAFKSGKRVGKPSPKAASSPSNPAALPVASDSSPMGSKTKETDSPSTPGKDQRSMILRSRTKTQEIFHSKRRRPSEGRLPNCRATKKLLDNSHLPATFKVSSSPQKEGRVSQRARVPKPGAGSKLSDRPLHALKRKSAFMAPVPTKKRNLVLRSRSSSSSNASGNGGDGKEERPEGSPTLFKRMSSPKKAKPTKGNGEPATKLPPPETPDACLKLASRAAFQGAMKTKVLPPRKGRGLKLEAIVQKITSPSLKKFACKAPGASPGNPLSPSLSDKDRGLKGAGGSPVGVEEGLVNVGTGQKLPTSGADPLCRNPTNRSLKGKLMNNRASGTQGASEDNSGGGGKKPKMEELGLASQPPEGRPCQPQTRAQKQPGHTNYSSYSKRKRLTRGRAKNTTSSPCKGRAKRRRQQQVLPLDPAEPEIRLKYISSCKRLRSDSRTPAFSPFVRVEKRDAFTTICTVVNSPGDAPKPHRKPSSSASSSSSSSSFSLDAAGASLATLPGGSILQPRPSLPLSSTMHLGPVVSKALSTSCLVCCLCQNPANFKDLGDLCGPYYPEHCLPKKKPKLKEKVRPEGTCEEASLPLERTLKGPECAAAATAGKPPRPDGPADPAKQGPLRTSARGLSRRLQSCYCCDGREDGGEEAAPADKGHWVHEACAVWTGGVYLVAGKLFGLQEAMKVAVDMHGGTVALAPGDFSLPGLRFASLFQGPSWCDCPVLATSTPSSWSRCVPAAKKPGPPLGAATKDASTPTTTRVPAMQVRARPGTGGHWSPSKQSRGTLPGHSSPNPGPISLFSFPPLLPQQFFYPSVCLDLCWAMPGTWK

SEQ ID NO: 219682 - protein, 1906 aa, Artificial Sequence
  derived and/or modified sequence
MQSFRERCGFHGKQQNYQQTSQETSRLENYRQPSQAGLSCDRQRLLAKDYYNPQPYPSYEGGAGTPSGTAAAVAADKYHRGSKALPTQQGLQGRPAFPGYGVQDSSPYPGRYAGEESLQAWGAPQPPPPQPQPLPAGVAKYDENLMKKTAVPPSRQYAEQGAQVPFRTHSLHVQQPPPPQQPLAYPKLQRQKLQNDIASPLPFPQGTHFPQHSQSFPTSSTYSSSVQGGGQGAHSYKSCTAPTAQPHDRPLTASSSLAPGQRVQNLHAYQSGRLSYDQQQQQQQQQQQQQQALQSRHHAQETLHYQNLAKYQHYGQQGQGYCQPDAAVRTPEQYYQTFSPSSSHSPARSVGRSPSYSSTPSPLMPNLENFPYSQQPLSTGAFPAGITDHSHFMPLLNPSPTDATSSVDTQAGNCKPLQKDKLPENLLSDLSLQSLTALTSQVENISNTVQQLLLSKAAVPQKKGVKNLVSRTPEQHKSQHCSPEGSGYSAEPAGTPLSEPPSSTPQSTHAEPQEADYLSGSEDPLERSFLYCNQARGSPARVNSNSKAKPESVSTCSVTSPDDMSTKSDDSFQSLHGSLPLDSFSKFVAGERDCPRLLLSALAQEDLASEILGLQEAIGEKADKAWAEAPSLVKDSSKPPFSLENHSACLDSVAKSAWPRPGEPEALPDSLQLDKGGNAKDFSPGLFEDPSVAFATPDPKKTTGPLSFGTKPTLGVPAPDPTTAAFDCFPDTTAASSADSANPFAWPEENLGDACPRWGLHPGELTKGLEQGGKASDGISKGDTHEASACLGFQEEDPPGEKVASLPGDFKQEEVGGVKEEAGGLLQCPEVAKADRWLEDSRHCCSTADFGDLPLLPPTSRKEDLEAEEEYSSLCELLGSPEQRPGMQDPLSPKAPLICTKEEVEEVLDSKAGWGSPCHLSGESVILLGPTVGTESKVQSWFESSLSHMKPGEEGPDGERAPGDSTTSDASLAQKPNKPAVPEAPIAKKEPVPRGKSLRSRRVHRGLPEAEDSPCRAPVLPKDLLLPESCTGPPQGQMEGAGAPGRGASEGLPRMCTRSLTALSEPRTPGPPGLTTTPAPPDKLGGKQRAAFKSGKRVGKPSPKAASSPSNPAALPVASDSSPMGSKTKETDSPSTPGKDQRSMILRSRTKTQEIFHSKRRRPSEGRLPNCRATKKLLDNSHLPATFKVSSSPQKEGRVSQRARVPKPGAGSKLSDRPLHALKRKSAFMAPVPTKKRNLVLRSRSSSSSNASGNGGDGKEERPEGSPTLFKRMSSPKKAKPTKGNGEPATKLPPPETPDACLKLASRAAFQGAMKTKVLPPRKGRGLKLEAIVQKITSPSLKKFACKAPGASPGNPLSPSLSDKDRGLKGAGGSPVGVEEGLVNVGTGQKLPTSGADPLCRNPTNRSLKGKLMNSKKLSSTDCFKTEAFTSPEALQPGGTALAPKKRSRKGRAGAHGLSKGPLEKRPYLGPALLLTPRDRASGTQGASEDNSGGGGKKPKMEELGLASQPPEGRPCQPQTRAQKQPGHTNYSSYSKRKRLTRGRAKNTTSSPCKGRAKRRRQQQVLPLDPAEPEIRLKYISSCKRLRSDSRTPAFSPFVRVEKRDAFTTICTVVNSPGDAPKPHRKPSSSASSSSSSSSFSLDAAGASLATLPGGSILQPRPSLPLSSTMHLGPVVSKALSTSCLVCCLCQNPANFKDLGDLCGPYYPEHCLPKKKPKLKEKVRPEGTCEEASLPLERTLKGPECAAAATAGKPPRPDGPADPAKQGPLRTSARGLSRRLQSCYCCDGREDGGEEAAPADKGRKHECSKEAPAEPGGEAQEHWVHEACAVWTGGVYLVAGKLFGLQEAMKVAVDMMCSSCQEAGATIGCCHKGCLHTYHYPCASDAGCIFIEENFSLKCPKHKRLP

SEQ ID NO: 219683 - protein, 966 aa, Artificial Sequence
  derived and/or modified sequence
MQSFRERCGFHGKQQNYQQTSQETSRLENYRQPSQAGLSCDRQRLLAKDYYNPQPYPSYEGGAGTPSGTAAAVAADKYHRGSKALPTQQGLQGRPAFPGYGVQDSSPYPGRYAGEESLQAWGAPQPPPPQPQPLPAGVAKYDENLMKKTAVPPSRQYAEQGAQVPFRTHSLHVQQPPPPQQPLAYPKLQRQKLQNDIASPLPFPQGTHFPQHSQSFPTSSTYSSSVQGGGQGAHSYKSCTAPTAQPHDRPLTASSSLAPGQRVQNLHAYQSGRLSYDQQQQQQQQQQQQQQALQSRHHAQETLHYQNLAKYQHYGQQGQGYCQPDAAVRTPEQYYQTFSPSSSHSPARSVGRSPSYSSTPSPLMPNLENFPYSQQPLSTGAFPAGITDHSHFMPLLNPSPTDATSSVDTQAGNCKPLQKDKLPENLLSDLSLQSLTALTSQVENISNTVQQLLLSKAAVPQKKGVKNLVSRTPEQHKSQHCSPEGSGYSAEPAGTPLSEPPSSTPQSTHAEPQEADYLSGSEDPLERSFLYCNQARGSPARVNSNSKAKPESVSTCSVTSPDDMSTKSDDSFQSLHGSLPLDSFSKFVAGERDCPRLLLSALAQEDLASEILGLQEAIGEKADKAWAEAPSLVKDSSKPPFSLENHSACLDSVAKSAWPRPGEPEALPDSLQLDKGGNAKDFSPGLFEDPSVAFATPDPKKTTGPLSFGTKPTLGVPAPDPTTAAFDCFPDTTAASSADSANPFAWPEENLGDACPRWGLHPGELTKGLEQGGKASDGISKGDTHEASACLGFQEEDPPGEKVASLPGDFKQEEVGGVKEEAGGLLQCPEVAKADRWLEDSRHCCSTADFGDLPLLPPTSRKEDLEAEEEYSSLCELLGSPEQRPGMQDPLSPKAPLICTKEEVEEVLDSKAGWGSPCHLSGESVILLGPTVGTESKVQSWFEASLYSVYICIHIHIYNIYEDCKC

SEQ ID NO: 219684 - protein, 942 aa, Artificial Sequence
  derived and/or modified sequence
MQSFRERCGFHGKQQNYQQTSQETSRLENYRQPSQAGLSCDRQRLLAKDYYNPQPYPSYEGGAGTPSGTAAAVAADKYHRGSKALPTQQGLQGRPAFPGYGVQDSSPYPGRYAGEESLQAWGAPQPPPPQPQPLPAGVAKYDENLMKKTAVPPSRQYAEQGAQVPFRTHSLHVQQPPPPQQPLAYPKLQRQKLQNDIASPLPFPQGTHFPQHSQSFPTSSTYSSSVQGGGQGAHSYKSCTAPTAQPHDRPLTASSSLAPGQRVQNLHAYQSGRLSYDQQQQQQQQQQQQQQALQSRHHAQETLHYQNLAKYQHYGQQGQGYCQPDAAVRTPEQYYQTFSPSSSHSPARSVGRSPSYSSTPSPLMPNLENFPYSQQPLSTGAFPAGITDHSHFMPLLNPSPTDATSSVDTQAGNCKPLQKDKLPENLLSDLSLQSLTALTSQVENISNTVQQLLLSKAAVPQKKGVKNLVSRTPEQHKSQHCSPEGSGYSAEPAGTPLSEPPSSTPQSTHAEPQEADYLSGSEDPLERSFLYCNQARGSPARVNSNSKAKPESVSTCSVTSPDDMSTKSDDSFQSLHGSLPLDSFSKFVAGERDCPRLLLSALAQEDLASEILGLQEAIGEKADKAWAEAPSLVKDSSKPPFSLENHSACLDSVAKSAWPRPGEPEALPDSLQLDKGGNAKDFSPGLFEDPSVAFATPDPKKTTGPLSFGTKPTLGVPAPDPTTAAFDCFPDTTAASSADSANPFAWPEENLGDACPRWGLHPGELTKGLEQGGKASDGISKGDTHEASACLGFQEEDPPGEKVASLPGDFKQEEVGGVKEEAGGLLQCPEVAKADRWLEDSRHCCSTADFGDLPLLPPTSRKEDLEAEEEYSSLCELLGSPEQRPGMQDPLSPKAPLICTKEEVEEVLDSKAGWGSPCHLSGESVILLGPTVGTESKVQSWF

SEQ ID NO: 219685 - protein, 1993 aa, Artificial Sequence
  derived and/or modified sequence
MQSFRERCGFHGKQQNYQQTSQETSRLENYRQPSQAGLSCDRQRLLAKDYYNPQPYPSYEGGAGTPSGTAAAVAADKYHRGSKALPTQQGLQGRPAFPGYGVQDSSPYPGRYAGEESLQAWGAPQPPPPQPQPLPAGVAKYDENLMKKTAVPPSRQYAEQGAQVPFRTHSLHVQQPPPPQQPLAYPKLQRQKLQNDIASPLPFPQGTHFPQHSQSFPTSSTYSSSVQGGGQGAHSYKSCTAPTAQPHDRPLTASSSLAPGQRVQNLHAYQSGRLSYDQQQQQQQQQQQQQQALQSRHHAQETLHYQNLAKYQHYGQQGQGYCQPDAAVRTPEQYYQTFSPSSSHSPARSVGRSPSYSSTPSPLMPNLENFPYSQQPLSTGAFPAGITDHSHFMPLLNPSPTDATSSVDTQAGNCKPLQKDKLPENLLSDLSLQSLTALTSQVENISNTVQQLLLSKAAVPQKKGVKNLVSRTPEQHKSQHCSPEGSGYSAEPAGTPLSEPPSSTPQSTHAEPQEADYLSGSEDPLERSFLYCNQARGSPARVNSNSKAKPESVSTCSVTSPDDMSTKSDDSFQSLHGSLPLDSFSKFVAGERDCPRLLLSALAQEDLASEILGLQEAIGEKADKAWAEAPSLVKDSSKPPFSLENHSACLDSVAKSAWPRPGEPEALPDSLQLDKGGNAKDFSPGLFEDPSVAFATPDPKKTTGPLSFGTKPTLGVPAPDPTTAAFDCFPDTTAASSADSANPFAWPEENLGDACPRWGLHPGELTKGLEQGGKASDGISKGDTHEASACLGFQEEDPPGEKVASLPGDFKQEEVGGVKEEAGGLLQCPEVAKADRWLEDSRHCCSTADFGDLPLLPPTSRKEDLEAEEEYSSLCELLGSPEQRPGMQDPLSPKAPLICTKEEVEEVLDSKAGWGSPCHLSGESVILLGPTVGTESKVQSWFESSLSHMKPGEEGPDGERAPGDSTTSDASLAQKPNKPAVPEAPIAKKEPVPRGKSLRSRRVHRGLPEAEDSPCRAPVLPKDLLLPESCTGPPQGQMEGAGAPGRGASEGLPRMCTRSLTALSEPRTPGPPGLTTTPAPPDKLGGKQRAAFKSGKRVGKPSPKAASSPSNPAALPVASDSSPMGSKTKETDSPSTPGKDQRSMILRSRTKTQEIFHSKRRRPSEGRLPNCRATKKLLDNSHLPATFKVSSSPQKEGRVSQRARVPKPGAGSKLSDRPLHALKRKSAFMAPVPTKKRNLVLRSRSSSSSNASGNGGDGKEERPEGSPTLFKRMSSPKKAKPTKGNGEPATKLPPPETPDACLKLASRAAFQGAMKTKVLPPRKGRGLKLEAIVQKITSPSLKKFACKAPGASPGNPLSPSLSDKDRGLKGAGGSPVGVEEGLVNVGTGQKLPTSGADPLCRNPTNRSLKGKLMNSKKLSSTDCFKTEAFTSPEALQPGGTALAPKKRSRKGRAGAHGLSKGPLEKRPYLGPALLLTPRDRASGTQGASEDNSGGGGKKPKMEELGLASQPPEGRPCQPQTRAQKQPGHTNYSSYSKRKRLTRGRAKNTTSSPCKGRAKRRRQQQVLPLDPAEPEIRLKYISSCKRLRSDSRTPAFSPFVRVEKRDAFTTICTVVNSPGDAPKPHRKPSSSASSSSSSSSFSLDAAGASLATLPGGSILQPRPSLPLSSTMHLGPVVSKALSTSCLVCCLCQNPANFKDLGDLCGPYYPEHCLPKKKPKLKEKVRPEGTCEEASLPLERTLKGPECAAAATAGKPPRPDGPADPAKQGPLRTSARGLSRRLQSCYCCDGREDGGEEAAPADKGRKHECSKEAPAEPGGEAQEHWVHEACAVWTGGVYLVAGKLFGLQEAMKVAVDMHGGTVALAPGDFSLPGLRFASLFQGPSWCDCPVLATSTPSSWSRCVPAAKKPGPPLGAATKDASTPTTTRVPAMQVRARPGTGGHWSPSKQSRGTLPGHSSPNPGPISLFSFPPLLPQQFFYPSVCLDLCWAMPGTWK

SEQ ID NO: 219686 - DNA, 522 bp, Artificial Sequence
  derived and/or modified sequence
atgatggcccagctgttcctgctgcaggccaacgccgtgctgcccctaagtcatgagattaaggtcaagcgacagatccggttaccggctcctctctatcctcccgaacggaacgacagtaggagcttccagatccctcaggacctgcgcgagaagggctgggaagaaggccagcaacactttgctggcaaggcagccgacgctttccccgcacccgttcagctggagggactcgaggctggccagactactctagcttctcccgaggtagggccctggaggcccaaacgcctgtccggcgtgtgccttttgtctgcccttctacctgacccttgcaagactaacggaacattcttattacagaaacaccacttgccttctcttctagccgtgatcctgttccccgtcatcatacttaccggggcctctttcgcccacctatttgtagcactgtttgtttcccacctgctgctgaagctccctttaggtgccgggatgaggatgcaaagagatgcgcgctag

SEQ ID NO: 219687 - DNA, 4923 bp, Artificial Sequence
  derived and/or modified sequence
atgcagtcctttcgggagcgctgtgggttccatggaaagcagcagaattaccagcagaccagccaggaaacatccagactagaaaactacagacagccatctcaagcaggcctctcttgcgataggcagcgtctgctggctaaggattactacaatcctcagccttacccaagttatgagggaggggccggtaccccctcgggcactgccgccgcagtggcagccgataagtatcatcggggaagcaaggcactgcctacccaacaggggctccaaggcagacccgcatttccggggtacggcgtacaagactcttctccttaccccggcagatacgctggggaggagagcctacaggcctggggcgcaccccagccaccccccccacagcctcagcccttgcccgctggtgtagccaagtatgatgaaaacctcatgaaaaaaacagctgtccctccttcccggcagtatgccgagcaaggcgcccaggttccatttagaacccactctttacatgttcagcagccgccgcccccgcagcagccactcgcatacccgaaactccagcggcagaagttgcagaatgatatagcatcccctctgccctttccgcaaggcacacacttcccccagcacagtcagtcttttcctaccagctccacgtattcgtcatccgtgcagggcggtggccagggcgcccactcttataagtcttgtactgccccaacggcacagccccatgatcgccctctgactgcctcgtcgagcctggcccctggtcagcgtgtgcaaaacctgcatgcatatcagtccggccggctttcctacgatcaacagcaacagcaacagcagcagcagcagcagcagcagcaggctctgcagtccagacatcacgcacaagaaaccttgcattatcaaaaccttgccaaatatcagcattacgggcaacagggacaggggtactgtcagcccgatgctgccgtgcgcacccccgagcagtactatcagacattttcgccttcttctagccactcacctgcccgatccgtgggccggtccccgagttactccagcacacccagcccgctcatgccaaatcttgagaacttcccttatagccagcagcccctgagcactggcgcatttccagcgggcatcacggaccactcacactttatgccactgctgaaccccagccctaccgatgccacttcgagtgtcgacacccaggctgggaattgtaagcctctccagaaagacaagctgcccgagaacctgctgagtgacctatccctccaatctctgactgcgctcactagtcaggtggaaaacattagcaatactgtgcagcagctcctgctgtctaaagctgcggtgccacagaagaagggagtgaaaaacctagtctcacgaactccagagcagcataaaagtcagcactgttcacccgaaggctccggatactccgccgaacctgcaggaactccactgtccgagcccccctcgtctacacctcagagtacccacgcagaaccacaggaggctgactacctgagcgggtcagaagaccctctggagagaagcttcctatactgcaaccaggcccgcggctccccagccagagtgaacagtaatagtaaggccaaacccgagagcgtgagcacctgctcggtaactagcccggacgatatgtctacaaagtcggatgacagtttccagagtctccatggtagtttacccctggacagcttcagtaagttcgtcgccggggaacgagattgccccaggctgttactgagcgctctagcgcaggaggaccttgcgtccgagattcttgggctgcaggaagccatcggagagaaagctgataaggcttgggcggaggcaccctccctagtaaaagactctagcaagccccctttctcattggaaaatcatagcgcctgcctcgattcggttgccaagagtgcctggccaagacccggcgaacccgaggctttaccagattcgctccagttagataaggggggcaacgcgaaggactttagccctggattgtttgaagacccctccgtcgcctttgctacaccggaccctaaaaaaacaactggcccactgtcttttggaacaaagcccacactgggggtcccagcccctgaccctaccactgccgcatttgactgcttccccgataccacagctgctagcagcgcagactccgccaacccctttgcatggccggaagagaatctgggggacgcctgtcctcgatggggattgcacccaggtgagctgactaaagggttggagcaagggggcaaagcctccgacggcatcagcaagggggacacccatgaagcatcagcgtgcctgggatttcaggaggaggatcctcccggcgagaaggtggccagcctccctggtgactttaaacaggaggaagtcggcggcgtgaaggaggaggccggtggtctcctgcaatgccccgaagttgcgaaggccgacaggtggctggaggactctagacattgttgttctactgccgattttggggacctcccactgttgcctccaacaagcaggaaagaagacttggaggccgaagaggagtattcctccctgtgcgaactgctggggagtccggaacagagaccaggaatgcaggatcccctgagccctaaagcccctcttatatgtactaaggaagaggtagaggaagtgttggattccaaagctggctggggatcgccatgccatctttctggtgagagtgtcatcttgctaggcccaacagtggggacagaatcaaaggtgcagtcctggttcgaatcttcactgtctcacatgaagcccggcgaggaagggccggatggggagagggctcctggcgacagcacgacatcagatgccagtctggctcagaaacctaacaagccggcagtgcccgaagctcccattgcaaagaaagaaccagtacccagaggaaaatccctgagatccagaagggttcaccgtggcctcccggaagcagaagactccccctgcagagccccagttctgcccaaggaccttttgttaccagagagctgcaccgggcctccacagggacaaatggaaggggccggcgctcccggaaggggagcttctgagggcctgcccaggatgtgtacaagatccctgaccgctttgtcagaaccacgcacaccaggccccccggggcttaccacaactccggcccctcccgataaactgggaggcaagcagagagccgccttcaaaagcgggaagagggtgggtaaaccctctcccaaggcagcctcgtcgccctcaaatccggccgctctgccggttgctagcgattctagtcccatgggaagcaaaaccaaagagaccgattctccatctactccaggcaaggaccagaggtctatgatactgagaagccgcaccaagacgcaagagatctttcattctaagcggcggcgacctagcgagggccgtttgcctaattgtagagcgaccaaaaagctgttagataatagccatctgccagccaccttcaaagtttcctcaagcccccagaaagagggaagagtgagccagagagcccgggtccctaagcccggggctggtagtaagctgagcgacaggccgctgcatgccctgaagcggaaaagcgccttcatggcaccagtacccacaaagaagcggaatctcgtgcttaggtccagatcctctagctcgagtaatgcctctggtaacggaggagacgggaaggaagagagaccagaaggctcacccacgctcttcaaaagaatgtcttccccaaagaaggccaagcccaccaagggtaatggagagcctgccaccaaactaccacctcccgagacccccgacgcctgcttgaaactcgccagtagagccgccttccagggagcaatgaaaacgaaagtactcccaccccgtaagggccgcggactgaagctggaggcaatagtgcagaagataacttctccgtctctgaagaagttcgcatgcaaggctccgggtgcttcacccggtaacccactgtccccaagtcttagcgacaaggatcgcggcctgaaaggtgcaggtggatcgcctgtgggcgtggaagaggggctagtgaacgtcgggaccggccagaaactccctaccagcggcgccgaccccttgtgtcgcaaccctaccaaccgctccttaaagggcaaactcatgaactcaaagaagctttcaagtacggactgcttcaaaaccgaagcctttaccagtcctgaagcattgcagcctggggggacagcattggccccaaagaaacgaagccgcaagggccgcgcaggggctcacggactgagcaagggtcctcttgagaaacggccctacctggggccagcactgctgctgaccccacgtgacagggcctccggcacgcagggggccagtgaggacaactctggagggggcggtaagaaacctaaaatggaagaattggggctggcctctcagcctcctgaaggtcgaccctgccagccacagacgcgcgcacagaaacagccgggtcacaccaactactcgagctacagcaagcgcaaaagacttaccaggggccgggccaaaaataccacatcaagcccctgtaaggggcgagctaagagacgaaggcagcagcaggtactccccctggatcctgccgaacccgagattcgcctgaagtacataagcagttgcaaaaggcttagaagtgattctcgcacccccgcgttctctccgttcgagccaagtctgggagcccagaatccaaggagtggacagaatgccccccctgctcccgccgatgcccgaccgctgtgtacaacacgggatcgccgcgcctatagtgccagagagcaggggcagagatag

SEQ ID NO: 219688 - DNA, 5589 bp, Artificial Sequence
  derived and/or modified sequence
atgcagagcttccgcgagcgatgcgggtttcacgggaaacaacaaaactaccaacagacatcccaggagaccagtagactggaaaattatagacagccaagtcaggctggtctcagttgtgaccggcagcggcttctcgcaaaggattactacaacccccagccgtatccgtcctatgaagggggggctggaacacccagtggcacagctgcggcagtagcggcagataaatatcaccgtgggtccaaggccctcccgacccagcagggcctccagggtagacccgccttccctggatatggagtccaagatagttccccctaccctggacgctatgccggggaagagtcacttcaagcctggggagccccccaaccaccgcctcctcagccgcagccactgccagctggggtcgccaagtatgatgagaacctgatgaaaaagaccgctgtgcctccatcaaggcaatatgcggagcagggggctcaggtgcctttccgcacacattcactgcatgtgcagcaacccccccccccccaacagccgcttgcttaccccaaactgcaacgccagaagctgcagaatgatatagctagccctctaccatttccacagggctggtgggctggccactcctacaagtcatgcacagctccgacagcacaaccacacgacaggcctctcaccgccagctcgtctctggcacctgggcagagggttcagaatctgcacgcgtaccagagtggacggctcagttacgaccaacagcagcagcagcagcagcagcaacagcagcagcagcaggccctgcagtcaaggcaccatgcccaggagacactgcactaccaaaatttagcaaaataccagcactacggacagcaaggacagggctattgtcaacctgatgccgctgtcagaacgccggaacagtactaccaaacattttctccatcctcctcccatagccctgcacggtccgtgggacgtagcccgtcatactcctcaaccccctctcccctgatgcctaatctcgagaacttcccatacagtcagcagccattatctactggcgcctttcccgcgggaattacagatcattctcactttatgcccttgctgaacccaagtcccacagatgcaacctcttctgtcgattctctgactgcactgacatctcaggtggagaatatatcaaatactgtgcagcagctcctcctgtctaaagcagccgtaccccaaaagaagggagtcaaaaatctggtgagtagaacgcccgaacagcacaaatctcagcactgttcgcctgagggatccggatatagcgccgaacctgccggcacacccttgagcgagccaccatcttcaactccccaatccactcacgcagaaccacaggaggccgattacctgagcggctctgaagacccactagagaggtctttcctgtactgcaatcaggctagaggtagtcctgcccgggtgaactccaattctaaggcaaagcctgaatccgtgagcacatgctccgttaccagccctgacgacatgagcaccaaatccgacgatagcttccagtcgctgcatgggtctctgccacttgatagttttagcaagtttgttgccggggagcgtgattgccccagactcctgctctccgcactagctcaagaagacctggcaagcgaaattctgggtctgcaggaggctatcggtgaaaaggctgataaagcctgggccgaagctccaagtcttgtcaaggatagctccaaaccaccattctctctcgaaaaccactctgcttgcctggacagcgtagctaagtcggcatggccacgacccggcgagccagaagcgctgcccgattcattacagctggacaagggaggtaacgctaaggatttttctcctggattgttcgaagatccatccgttgccttcgctacccctgatcctaaaaagacaacaggacctctgtcctttgggaccaaacccacactgggagtgccagctccagaccccaccacagcagcatttgattgcttcccagacactacagccgcttcctccgcagactcggctaatccgttcgcttggcccgaagaaaatttgggggacgcgtgccctcgatgggggctgcaccccggtgagctgacgaaaggactggaacaagggggcaaagcaagcgacggcatctccaagggggacactcacgaggcatccgcctgcctgggtttccaggaggaggatccccccggggaaaaggtggccagcctgcctggcgactttaagcaggaggaagtaggaggcgtgaaggaagaggccggcgggctgctgcagtgccccgaagttgccaaagccgatcgttggctcgaagattcgcgacactgctgtagcacagccgactttggggacctgcccctgctgcccccaacatccagaaaggaggaccttgaggccgaggaagaatactcctcactatgtgaactcctgggtagtcccgagcagcgccccgggatgcaggacccactgtctcccaaagcaccattgatttgtacaaaagaggaagtagaggaggtgctagattctaaggcagggtggggttctccctgtcatctgagtggtgagtcagtcattctattgggacctactgtcggtaccgagtccaaggttcagagctggttcgaaagttccctgagccacatgaagcctggtgaagaaggcccagatggcgagcgcgcgcctggtgatagcacaactagcgacgcttctctcgcccaaaaacctaacaagcctgccgtacctgaggctcccattgcaaagaaagaacccgtgccccgggggaagagcctccgatcacgcagagttcatagagggctccccgaggcagaagattccccctgccgcgcccctgtattacccaaagatctgttgctgccggagtcatgcaccgggccaccccagggccagatggagggggccggcgcgcctgggaggggagcctcagagggccttccacggatgtgcactaggtcactcactgccctgtcagagcctcgtacacctggaccacctggccttaccactacaccggcaccaccagacaagcttggaggtaaacagagggccgcttttaagagtggtaaaagagtgggtaaaccttcccccaaggccgcatccagcccatcaaatcccgcagcactcccagtggcctcagacagcagtcccatgggatctaagaccaaggagacagatagtccgtcgactcccgggaaggatcaaaggagcatgatcctccgctccaggacaaaaacccaggagatcttccattccaagagacgccgtccctcagaaggaagactgcctaactgtcgggctaccaagaagctgctcgacaattctcacctacctgctacctttaaagtgagtagcagccctcagaaagagggtagggtgtcccagagggccagggtgcctaagcccggggctggaagtaagctgtcagataggccgttgcacgccctgaagaggaagagcgcttttatggctcctgttccgaccaaaaagcggaatctcgtactccgctcccgctcttccagctcctccaacgcgtcggggaacggtggcgatgggaaggaggagaggcccgaagggagcccaacactctttaagcggatgtcctcaccaaagaaggccaaacctaccaaaggcaatggagaaccagccacaaaactcccgccaccagagacgcccgatgcctgcctgaagctggcatccagagccgcatttcagggggctatgaagaccaaggtcttacccccccggaaaggcagagggctaaagttggaggcaatcgtgcagaaaatcactagcccaagtcttaagaagtttgcttgcaaggcccctggggccagccctgggaatcctctaagtccaagtttgagcgacaaggatcgcgggttgaagggggccgggggttctcccgtgggcgtggaggaaggtctggtcaacgtgggcaccggccagaagctgccaacatcaggtgccgaccccctatgccgcaaccccactaataggtcactgaaaggaaagcttatgaataaccgcgcgtcaggcacacagggggccagtgaggacaacagtggtggaggtgggaaaaaacctaaaatggaagaactgggcctggccagtcagcctcctgaagggcggccctgtcagcctcagacacgagcccaaaaacagcccggccatactaattacagctcatactcaaaacggaaaagactaactcgaggaagggcaaagaatacaaccagcagcccttgtaaagggcgagccaagcgcaggcgacagcagcaggtcttacccctggaccctgccgaacccgagatcaggttgaagtacatctccagttgtaaaagactgcgttctgacagccgaacccctgcttttagcccatttgtgcgggtggagaaaagggatgcgtttaccaccatatgcacagtcgtgaactcccctggggatgcacccaaaccccataggaagccttccagttccgcttcttcaagctcctcctcatcaagcttcagcttagacgctgccggagctagtctcgccacattgcctggtgggtcaattctgcagccccggccaagcctgccattgtcatcgacaatgcacctgggccccgtcgtgagtaaggctctgagcacgtcatgcctcgtgtgttgtctctgtcagaaccctgctaacttcaaggacctgggggacctgtgtggaccctattacccagaacattgcctacccaagaaaaaacccaaactcaaagagaaggtaagacctgaggggacttgtgaggaagctagcctaccactggagagaactctgaagggccctgaatgcgccgcggccgctacagcgggcaaacccccacggcccgatgggcctgcagatcctgcaaagcaaggacccctcagaacctctgcacgagggctcagccgccgtcttcaaagttgttattgctgtgatggcagggaagacggcggcgaagaagccgcccccgctgacaaagggcactgggtgcacgaagcttgcgccgtctggaccggaggcgtgtatttggtcgctggcaagctgttcggactgcaggaagccatgaaggttgcagttgatatgcacggcgggaccgtggccctggcaccaggcgatttctccttgcccggcctaaggtttgcctctctgtttcaggggccatcatggtgcgactgcccagtgctcgccacttctaccccaagttcttggagcagatgtgtgcccgccgcgaaaaagcctggccctcccctgggtgccgctactaaggacgcttctacgccaacaacaacacgcgtgccagccatgcaggtacgggcacgccccggaaccgggggacattggagcccttccaaacaatcgcgggggaccctccctggacactccagccctaatcccggtcccatctccctgttttcctttccccccctcctaccccagcagttcttttatccttccgtgtgcttagacctgtgttgggccatgcccggtacatggaagtag

SEQ ID NO: 219689 - DNA, 5721 bp, Artificial Sequence
  derived and/or modified sequence
atgcaatcctttagagagagatgtggtttccacggcaagcagcagaattaccagcagacgagccaagaaacaagccgactggagaactatcgacagccttcgcaggcaggtctgagttgtgaccggcagagacttctggccaaagattattacaacccccaaccttacccgtcgtacgaaggtggcgccggtacaccctctgggacggccgcggccgtggcagccgataagtaccatcgggggagcaaagcactccctactcaacaaggtcttcagggaaggccagcttttcctgggtacggagtgcaggattcatcaccctacccaggaagatacgcaggcgaggagtccctgcaggcatggggcgcaccgcagccccccccccctcaacctcaaccactgcctgccggggttgccaaatatgatgagaaccttatgaagaaaaccgccgtgcccccttcccggcagtatgcagagcagggcgctcaggtgccgtttaggacacattccctgcacgtgcaacagcctcctccaccccagcagcctctggcctaccccaagctacagcgccagaaattacagaatgacatcgccagtcccctccccttcccacagggaacacattttccccagcactcccaatctttcccaacatcctcaacttactcttcttctgttcaaggcggagggcagggcgctcactcctacaaatcctgcaccgccccaacagcgcagccccacgatagaccactcacagccagctcatcactggctccgggacagagggtgcagaacctgcatgcatatcagagtggccgactcagctacgatcaacaacagcagcaacaacagcagcaacaacagcaacagcaggcactgcaatcacgacaccatgcacaggagacactccattatcagaacctggccaagtaccagcactatgggcagcagggccagggctactgtcagcccgacgcagcagtaaggacgccagaacagtattatcagacctttagcccatcatccagtcactctcccgctaggagcgtgggtaggtccccttcctactcatctacaccctctccactaatgcccaacctggaaaactttccatactcacaacagcccttatccaccggggcctttccggccggcattacagaccattcacacttcatgccattgttaaacccctctcctactgatgcgaccagctcggtcgacacccaagcaggcaattgtaagcctttgcaaaaagataaacttcctgagaatctcctctcagacctgtctttacaaagtctcacagctctcacatcccaggtggagaacatctcgaacaccgtccaacagctgctgctgtccaaagcggccgtgccccagaaaaaaggcgtaaagaacctcgtgtcacggacacccgagcaacacaagtcccagcactgcagtcctgagggatcaggctattccgcagagcccgcaggaacacccctgtcagagccgccttccagtacacctcagtcaacccacgctgagcctcaagaagccgattacttgtcagggtcagaagaccccctggaaaggagctttctctattgcaaccaagcccgtggcagtccagctcgggtcaactcaaacagtaaagctaagcctgaatctgtatcaacatgcagcgtaacttcaccagacgatatgtcaaccaaatccgacgatagctttcagagccttcacggatcactgcctcttgatagcttctccaagtttgtagccggagaaagagactgcccgaggctgctgctttccgccctggcacaggaggatctcgcaagtgagatcttgggactccaggaggccattggggagaaagccgacaaagcttgggccgaggcacccagccttgtgaaggatagttcgaagccccccttctctcttgaaaaccattctgcttgcctggacagtgtggcgaagtcagcttggcctcgaccaggagaaccagaagcgttacccgactcacttcagctggataagggtggaaacgctaaggatttttctccaggactgtttgaagacccttccgtggccttcgccactccagatcccaaaaagactacaggaccattgagctttggcacaaagccaacactcggggtaccggcgcccgacccgacaaccgcggcttttgactgcttcccagacactactgccgcctcatccgcagattccgccaaccctttcgcttggccagaggagaatctcggcgacgcctgcccacgatggggacttcatcctggggagctgacgaagggcctcgaacagggtggtaaggcttctgatggcatttccaaaggggatactcacgaagccagtgcttgtttgggattccaggaggaggacccgccgggagagaaggtggcatccctacccggcgactttaaacaggaggaagtcgggggagtaaaggaggaggcaggaggactcctgcagtgtcctgaggtggcaaaggctgaccggtggctggaggactcccgccactgctgcagtactgctgacttcggggacctgcctctgctgcccccaaccagcaggaaagaagatctggaggccgaagaggaatattcaagcctctgcgagctgctggggtcaccagagcagcggccagggatgcaggatcccctgagcccgaaggcgcccctgatctgcacaaaagaggaggtcgaagaggttctggattctaaagctggatggggatcaccatgccacttgagcggcgagtctgtaatccttctaggaccaaccgtaggtaccgagtcaaaagtgcaatcatggttcgagagtagcttgagccatatgaaacctggcgaggaggggccagacggtgagagagcacctggtgactctacaacatcagatgcttcactcgcccaaaaacccaacaaacccgcggtgcctgaagcaccaatcgccaagaaagagcccgtgccccgggggaaatcacttaggtccagacgtgtccaccgtggtttgcctgaagcagaagatagtccctgtcgtgcacccgtgctgcctaaggatttgctcctgcctgaatcctgcaccgggccgccccagggccagatggagggagccggggctccaggccggggtgcctctgagggactcccgcgcatgtgcacccgaagtctgaccgctttatcggagccgaggaccccaggcccccctggcctgaccacaactcccgctccacctgataagttaggcgggaagcagagagccgccttcaagtcaggcaagcgggtcggcaaacccagccctaaagctgcctcctcgcccagcaatcctgcagctcttcccgtggcctccgattcctcacctatgggctcaaagacgaaggaaacagattctccctccacacctggaaaagaccagcggtctatgatcttgaggagtaggacgaagactcaggaaatttttcattcaaagaggcggaggccttccgaagggcgccttccgaactgccgtgcgacgaaaaaattactggacaactctcacctcccagcaacattcaaagtttcttctagtccacagaaagagggcagggtatcacaacgagctcgggtacccaaaccaggggcgggatcaaagctgtcggaccgccccctccacgcactgaagagaaagtctgcgtttatggcacccgtccccacaaaaaaacgcaatctcgtactgcgcagccgatcatcctccagctctaatgcgagcgggaatggcggggacggcaaagaagaaagacccgagggtagtccgacgctgtttaaacgcatgtccagcccaaagaaggcgaagccaactaaagggaacggggagcctgccactaaactccctcctcctgagactcccgatgcctgcctcaagttagcctcacgagccgctttccagggcgccatgaaaaccaaagtactaccgccaaggaaaggcagaggcctgaaactggaagccatcgtgcaaaagataacgtctccctctctcaaaaaattcgcttgtaaagcccctggggcttctcctgggaaccctttaagcccgtccctctccgacaaggacagaggactgaagggcgctggtggctcaccggtcggagtggaagagggcctggtgaatgtcggtaccggccagaaactccccacaagcggagctgacccattatgcagaaaccccacaaaccgcagcctaaaaggaaaactgatgaattcgaagaaactcagtagcacagattgttttaaaacagaggctttcaccagtcctgaggctttacagccaggcgggacagcactggcgcctaaaaagcgctctcgtaagggacgagccggagcacatggcttatcaaaaggaccactagaaaaacgtccatacctgggtccagctctgctgcttacacctcgcgatcgggccagcggaacacaaggggcaagtgaagacaacagcggggggggagggaagaagcctaagatggaagaactgggcctggcctctcaaccgccagagggacgaccctgccagccccagacccgtgctcaaaaacagcccggacataccaactactccagctattctaagcgtaagcgcctgacacgcggaagagccaagaatacaacctcatccccatgtaaggggcgcgcaaaacgtaggcgccagcaacaggtgctccccctggaccccgctgaacctgaaattaggttgaaatatatctcttcatgcaagcgtctgcggtccgactctcgtacacccgctttctcacccttcgtgcgtgtcgagaaaagggatgcttttacaacgatctgcaccgtggtgaactcgccaggcgatgctcccaaacctcaccgcaaaccaagtagctctgcttcatcatccagctcaagctcctcatttagcctggacgctgcaggtgcctccctggccacattgcctggcggctcaatactccaacccaggccaagcctgcctctttcctcaactatgcacctcggccccgtagtgtctaaggctctgtcaacaagctgcctggtctgttgtctgtgccagaatcctgccaacttcaaagatttgggcgatctgtgtggtccttattaccccgagcactgcctgcctaagaagaaacccaaattgaaagagaaggtgaggcccgaaggcacctgtgaagaggcatctctacctcttgaacgcacattaaaggggcctgagtgcgccgctgcagcaacagctggcaaacctcccaggccagacggtccggccgatcctgctaaacaagggcccttgcggacaagcgcacgggggctatcacgcagactccagtcctgctactgctgcgatggcagagaagacggcggcgaggaggcagccccggccgataagggccggaagcatgagtgcagcaaggaggcccccgccgaaccgggcggggaggcccaggagcactgggtgcacgaggcctgcgcagtctggacaggaggagtgtacctagtggccggaaagctgttcgggcttcaagaggccatgaaagttgccgtcgatatgatgtgtagttcatgtcaggaggccggagccactatcggctgctgtcataaaggatgtctacatacctaccactatccctgtgcaagcgacgcaggctgtatattcattgaagaaaatttcagccttaaatgccccaaacacaaacggcttccatag

SEQ ID NO: 219690 - DNA, 2901 bp, Artificial Sequence
  derived and/or modified sequence
atgcaaagcttcagagaacgctgtggctttcacgggaaacagcagaactatcagcaaacttcgcaggagacgagcagactcgaaaattatcgccaaccatcccaggccggattgagctgcgaccgccagcggttgctcgctaaagactactataatccacagccctatccgtcctacgaaggcggagccggaacacccagtggaaccgcggctgccgttgcagcagataaataccaccgcggctccaaggcactacctactcaacagggcctgcagggaaggccagcttttcccggctacggcgttcaggactcgtcaccatatcctggtaggtatgcgggagaagagagccttcaggcttggggggcccctcagccgcccccccctcagccacagcccttgcccgcaggggtcgcaaagtatgatgagaacctgatgaaaaaaacggctgtgccaccgtccagacaatacgcggaacaaggcgcacaggtcccctttagaacacacagtttacacgtccagcagccccccccacctcagcagccactagcatacccgaagttgcaacgacagaagttacaaaacgacatagcatccccactgccattcccacagggaacgcacttccctcagcacagccaatcttttcccaccagctctacctattcctcatcagtgcagggtggcggacagggagcacattcgtataaaagttgcaccgcccctactgcacagccacacgatcggcctctgactgcttcctcttctctcgcacctgggcagagagtacagaacctgcacgcttaccagtctgggagactttcctatgaccagcaacaacagcagcagcagcaacaacagcagcagcaacaggcactccagtctcggcaccacgctcaggagactctgcattaccagaacctggccaaataccagcactacggccagcagggccaggggtactgccagcctgatgctgccgttcgaacccctgagcagtactatcagacgtttagcccctcctctagtcattccccagcccgttcggtcggtagatccccgtcatacagtagcacccccagccccttgatgcccaatctcgaaaactttccttattcacagcaacccctgagtaccggggcattccccgcgggaatcacggatcactcacactttatgcccctgctcaatccttcccccacagacgccacatcatccgttgatacgcaggccggaaattgtaaacctctccaaaaggataagctgccagagaacctgctctccgatctctctttgcagagcttaacggccctcaccagtcaggtggagaacatctccaataccgtccagcagctgctgctctccaaagctgccgtcccccagaaaaagggggtgaagaacctagtgtctagaacaccagaacagcacaaatcccaacattgttctccagaggggtccggatattccgccgagcccgccggtactcccctctcagaacctccgtctagtactccccagtccacacacgcagagccccaggaggctgattacctctcaggatcagaggacccacttgagcggtcattcctctactgtaatcaggcacgtggctccccagctcgggtgaactcaaacagtaaggctaaacccgaatcagtaagcacctgttctgtgacttctcccgacgatatgagcacaaaaagtgacgattcattccagtctttgcacggatccctccctttggactcctttagcaaatttgtagcgggagaacgggattgtcccagactgcttctcagcgctctggcacaggaggacttagctagcgagatattgggtctgcaggaggcaattggggagaaagccgataaggcctgggcggaagctccatctctggtcaaagacagttccaaaccgccctttagtctggagaaccattccgcctgtcttgacagcgtggccaagtccgcctggcctcgccctggcgaacccgaggctctgcccgacagtctccagctggataagggcgggaatgcaaaggacttttcgcccggtctgtttgaagatccttcggtggcatttgccacgcctgatccaaagaagactaccggtcccctctcctttggtacaaaacctacactcggcgtgcctgcacccgaccctacaaccgcagcattcgactgctttcctgataccacggccgcctccagcgcggactcggccaacccctttgcatggcccgaagaaaaccttggtgacgcctgcccacgctggggcctgcaccctggcgagctcaccaaaggtctggaacaggggggtaaggcctctgatggtatttctaaaggcgatactcatgaggcctcagcctgtctgggcttccaggaggaagacccgcctggagaaaaggtcgcaagcctgcccggagattttaaacaggaggaggttggcggcgtgaaggaagaagcaggtggtctcttacagtgtcctgaagtggcgaaagccgacagatggttggaggattcccgccactgctgttctaccgctgatttcggagatttgcccttgctgccccccactagccggaaagaagatcttgaggcggaggaggagtacagcagcctctgcgaactcttagggagccctgagcagcgacccggtatgcaggatcctctatctcccaaggcaccactgatttgcacaaaggaagaggtggaagaagtgctggatagcaaagcaggatggggctccccttgccacctgagcggggaaagtgtgattctcttggggcctaccgtcggtacggagtctaaggtgcaatcttggttcgaggccagcctttatagtgtgtacatttgcatccacatccacatttataacatttacgaggactgcaagtgctag

SEQ ID NO: 219691 - DNA, 2829 bp, Artificial Sequence
  derived and/or modified sequence
atgcagagcttcagagaacggtgcgggttccacggcaagcagcagaactatcagcaaaccagtcaggaaacaagcagacttgagaattacagacaaccatcccaagctgggctcagttgtgataggcagaggctcctggctaaggactactataacccgcagccttatcccagctacgaaggaggagccgggacaccttccggcaccgcagccgccgtggctgcggataaataccacaggggtagcaaggcactccctactcagcaggggctccagggacggccagccttccccgggtacggtgtgcaggacagttcaccgtatccaggacgctatgcaggcgaggaatctctacaggcttggggcgcgcctcagcccccacctccacaaccccagccactgcctgcgggtgtcgccaagtacgatgagaaccttatgaagaaaactgccgtgccccctagcagacagtatgcagagcagggcgcccaagtgccttttcgcactcatagcttacacgttcagcagccaccccctcctcagcaaccacttgcatacccaaagctgcagcgccagaagcttcaaaatgacatcgcgagccctctgccatttccgcagggaactcacttcccacagcactctcagagcttcccaacctcgtcaacctacagctctagtgtccagggtggggggcagggtgcacattcttacaagagttgcaccgctcccacagcccaaccacacgaccgacccctcaccgcatcttccagcctggcaccgggccagcgagtgcagaacctccatgcctatcaatccggtcgactctcctatgatcagcaacagcagcagcaacaacagcagcagcagcagcagcaggctctgcagtccaggcaccacgcccaagagacgctgcattaccaaaatctggccaagtaccagcattacggccagcagggtcagggctattgtcagccggatgctgccgtgcgtacacctgagcaatattaccaaacatttagcccttcatcctctcatagcccagctcgctcagtcgggaggtcaccaagctacagctccacacctagccccctaatgccgaatctggagaactttccctattctcagcagccactgtctacaggcgcgtttcctgccggcatcactgatcactctcactttatgcctctcctgaatcccagcccaactgacgcgacttcaagcgtggatacccaagccgggaattgtaagcccctccagaaagataaattgcccgaaaacctcctgtccgacctcagcctacaatctctgacagcactcacttcacaggtcgagaacatcagtaatacagtgcagcaactgctgctttcaaaggcggctgtcccccagaaaaaaggcgtcaagaatctggtctcgcgtacacctgagcaacacaaatcccaacactgcagccctgaggggagcggatatagcgcggaaccagcaggcacccctctgagcgagcccccctcctccacaccccagagcacgcacgccgaacctcaggaagcggattacctgtccggctctgaagatcctctggaaaggtctttcctctactgcaatcaggctagaggttctccagcgcgcgtgaattctaactcaaaggcaaaacctgaaagtgtgtccacctgcagtgtgacgagtccagatgatatgtccacaaaaagcgacgacagctttcaaagcctgcacggtagccttccactcgatagcttcagcaagtttgtggctggcgagcgcgactgccctcgactgctgctgtccgcactggctcaggaggacctggcctctgaaatcctggggttgcaggaggccatcggagagaaagctgacaaggcctgggccgaagcccctagtctcgtgaaagattcctcaaagccaccattttccttagaaaaccattccgcttgtctggactctgtggctaaatctgcttggcccaggccaggtgaaccagaagctctgcctgattcccttcagttggacaagggaggtaatgccaaagacttttccccagggctatttgaggaccctagcgtcgcctttgcaacccccgatccgaagaaaacaacggggcctctgagctttggcaccaagccaaccctgggcgtgccggcccctgatccaacgacagccgcctttgattgcttccccgacaccacagctgcctctagtgctgatagtgcgaatccatttgcttggcccgaggagaatctgggagacgcatgccctagatggggactccacccgggtgagctgaccaaaggccttgagcaggggggaaaagcatccgatggcatttccaagggggacacccatgaagccagcgcttgtctaggcttccaggaagaggatcctccaggggagaaagttgcgtccttgcccggggactttaaacaagaagaagtaggaggtgtgaaagaagaggctggaggccttttacagtgtcccgaggtagccaaagccgaccggtggctagaagatagccgccactgttgcagcaccgcagattttggagatctgccgctgttaccccccacatcccgtaaggaagacctggaagccgaggaggagtattcatcactgtgtgaactccttgggagccctgagcagaggcccggaatgcaggatccgctgtcccccaaggcacccctgatttgcaccaaggaggaagtggaagaggtcctggattccaaggccggctggggctccccttgtcacttgtcaggagaatccgtaatattgctaggccctacagtggggacagaatccaaagtccagtcctggttttag

SEQ ID NO: 219692 - DNA, 5982 bp, Artificial Sequence
  derived and/or modified sequence
atgcagtcttttagggagaggtgtggattccatggtaagcagcaaaactaccagcagacctcccaggagacttcacgactcgaaaactaccggcagccatcccaggcaggactgagttgcgatagacagagattactggcaaaagattattacaatcctcagccctatccctcatatgaggggggggcaggcactcccagtggcacagccgccgccgtggctgcggacaaataccaccgcggttcaaaggctctgcccacccaacaaggcctccagggaagacccgcctttccggggtacggagttcaggatagcagtccttatcccgggcgatacgcaggagaggagtctttacaagcttggggggcccctcaaccccctcccccccagcctcagcctctcccagccggcgtagcaaaatacgatgaaaacctcatgaagaagacagccgttcccccctctcgccagtatgccgagcagggagcccaggtgccatttcgaacccactctctccacgtccaacagcctccaccaccccagcaacccctggcctaccccaaattacagcgacagaagttgcagaatgatattgcctccccgctgccttttccacaggggacacactttcctcagcacagccagagtttccctacaagctcaacttattcctcatctgtccaaggtggcggccagggcgcccattcctataagagctgcaccgccccaactgcacagcctcacgacagacccctcacggcaagcagttcactggccccaggtcaacgcgttcagaacctccacgcgtatcagtctggcaggctttcctacgatcaacaacagcagcagcagcagcaacagcagcaacagcagcaggccctacagtccaggcatcacgcacaagagacattgcactatcagaacctggcaaagtatcaacattatggccagcaggggcagggctattgtcagcctgacgccgcggtgaggacaccagaacaatattaccaaaccttttcgcctagctccagccattcaccggctaggtcagtgggccgctccccctcatacagctctaccccatcccccctgatgcccaaccttgaaaattttccttacagccagcagcctctctccaccggagcctttcctgccgggattactgaccactcccactttatgcccctgctgaatccctcccctacagatgctacctccagcgttgatactcaggctggtaactgcaaaccattacagaaggacaagcttcccgaaaacctcctaagtgacctgtcactgcaaagcctgaccgccctgacttctcaggtggagaatatcagcaataccgtccaacagctcctcctctccaaagcggcagtgccccaaaaaaagggcgtcaaaaatttggtcagtagaactcctgaacagcataagtctcaacattgttccccggagggtagcggatattcggccgagccagctggaactcccttaagtgagcctccatctagtacgccacagagcactcacgctgagccccaggaggctgactacctgagtggtagtgaggacccattagaaagaagctttctgtactgtaatcaggctaggggcagcccagccagggttaactcgaatagtaaggctaagccggagagcgtatctacctgcagcgtcacttctcccgacgacatgagcactaaatccgacgattcctttcagtcattgcatggctccctgccactggatagtttcagtaaattcgtggcaggagaacgcgactgccctcgattgctcctgtctgctctggcacaagaagatctggcctccgaaattttgggtctgcaggaagccattggggaaaaggcggataaagcctgggccgaggcgccatccctcgtcaaggactctagcaagccccctttctccttggaaaaccactccgcttgtctggattctgtggccaagagcgcctggccccgtccaggagaacctgaggccctgccagactctttgcagctcgacaaaggaggtaacgccaaagatttcagcccgggattgttcgaggacccctcggtagcctttgcaacacctgatcctaagaagaccacaggacccctgtccttcggaaccaagcccactctcggagtgcccgctcccgacccaactactgcagcatttgactgcttccccgacaccacagcggcctcatccgctgatagtgcaaaccctttcgcatggccggaagaaaatctcggcgacgcttgtccccgatggggacttcaccctggcgaattaaccaaagggctggagcagggtggcaaagctagtgatgggatttccaagggcgacacacatgaagcttcagcatgccttggctttcaggaggaggatccaccaggtgagaaagtcgcgagcctgccaggagattttaaacaggaggaggtaggcggcgtaaaagaggaggccggaggactgttacaatgtcccgaggtagctaaagctgacagatggctggaggactccagacattgctgttctacagctgatttcggagacttacccctactgcccccgacaagtcggaaggaggacctggaggcggaggaagaatatagtagcctttgtgagttgctgggatctcccgaacagaggcctggaatgcaggacccactgagccctaaagctccactgatctgcacaaaggaggaagtggaggaggttctggacagcaaagcaggatggggatcaccatgccatctgagcggggaatccgtcattctcctggggcccactgtgggaacagaatctaaagtacagagctggtttgagtctagcctgagtcacatgaagcccggtgaggagggtcccgacggggaaagggcccccggggattccacaacctctgatgcttccctggcccaaaaaccaaataaacctgccgtgccagaagcacccattgccaaaaaagagcctgtgccgcgagggaagtccctacgcagtaggagagtacaccgggggttgcctgaggccgaggattctccctgtagggccccagtgctcccaaaagacctgctccttcccgagagctgtacgggaccccctcagggtcaaatggagggggccggcgcccccggaaggggcgcatcggaggggctgccaagaatgtgtactcgaagccttactgccctaagtgagcccaggacacccgggccccctggcttgacgactacacccgcccctccagataagctcggtggcaagcagagggcagcttttaagtctgggaagcgtgtaggtaaaccctcccctaaagccgcctccagtccctccaatcctgccgcactgccagtggcatcagatagcagtcctatgggcagcaaaaccaaggagacagacagccctagtacccctgggaaggaccagagatcgatgattctgcggtcccgaaccaaaacccaggagatttttcacagcaagaggcgccggccgagcgaaggaagacttcctaactgccgagctactaagaaattactggacaactcccaccttccagccaccttcaaggtgtcgagttcaccccaaaaagagggccgggtctcccaacgtgccagggttcctaaaccgggagccgggtcgaagctatctgatcgacccttgcatgctcttaaacgcaagtctgccttcatggcacccgtgcctaccaaaaaaaggaatctggtactgcgcagtaggtcaagttcatctagcaacgcatcaggcaatggcggagacggcaaggaggagcgtcccgaaggaagccctactctgttcaaacggatgtcctcccctaaaaaagccaaacccaccaaaggcaatggagaacccgcaactaaattaccaccacccgaaactccagacgcctgcctcaagttggcgtccagggctgctttccagggggcgatgaagaccaaggtgcttcctccgcgcaaaggaaggggactgaagctggaagccattgtccagaaaataacttctcccagcctcaagaagttcgcttgtaaggcgcctggagcttcccccgggaatcccctgtccccttctttgagcgataaggacagagggcttaagggagcgggcgggtctccggtaggagttgaggaggggcttgtcaatgtggggacaggtcagaaactacctacctccggagcagacccactttgcagaaaccccacaaatagatccctgaaaggaaagctgatgaacagcaaaaagttaagctccaccgattgtttcaaaacagaagccttcacttctcctgaggccctgcagcccggagggaccgcactggcccctaagaaacgtagcagaaagggtagggcaggcgctcacggactctctaaagggcctttggaaaagcgaccatatttaggtccagccctgctcttgacacctagggatcgagccagcggaacccagggggcaagcgaggacaatagcggtgggggaggtaagaagcctaagatggaggaacttggattggcatctcaaccccctgaagggcgtccctgccaaccacagactcgagcccagaaacagccagggcataccaattactcatcttactctaaacggaaacgcttgacccgggggagggccaagaacacaactagttccccttgtaaaggcagggcaaaacgacggcgccagcagcaggttctgcctctggaccccgcagaacccgagattcggctcaaatatatcagtagttgtaagcggctccgatcggactcgcgcacccctgctttctccccctttgttcgcgtcgaaaagcgagacgccttcacaactatttgtactgtcgttaattcaccaggggacgcccctaaacctcacaggaaacccagcagctctgcaagcagctcaagctcatcctcctcctttagtctggatgccgcaggcgcatctttagcaaccctgcccggcggttctattttgcaacctaggccatctctgcctctcagttccacaatgcaccttggtcccgtggtttctaaggcactgtccaccagctgcctggtctgctgcttgtgtcagaacccagccaatttcaaggatctgggtgatctgtgtggcccatactatccggagcactgcttgccaaaaaagaagcccaagcttaaggagaaagtgcgacctgaaggaacgtgtgaggaggccagcctgcccttagaacgcacactgaaaggcccagagtgtgcggccgcagctaccgccgggaaacccccacgacctgatggcccagctgaccccgctaaacaaggaccactccgcacatccgcacgggggttgtccaggcgcctgcagtcctgctattgttgcgatggcagggaagatggaggcgaggaggcagctcctgccgataagggacgcaaacatgaatgttccaaggaagcacccgcggagcctgggggggaagctcaggagcattgggtccacgaagcgtgcgcggtgtggacaggcggcgtgtacctagtagcgggcaaattgttcggactgcaggaggccatgaaagttgcagtggacatgcatggcgggactgtcgccctcgccccaggagatttttccctgccagggctacggttcgcctcactgttccagggaccaagttggtgtgactgccctgtgttagcaacctccactccatcatcctggtctagatgcgtcccggctgccaagaaaccaggtccacctctaggcgccgctacaaaagacgcttcaactccaaccacaacgagagttcccgcaatgcaggtacgagccagacccggtaccggcggtcactggagcccatccaagcagtctcggggcaccttacccgggcacagctcaccaaatcctggtcctatctccctcttcagctttccaccgttactgccccaacagttcttttatccttccgtgtgtttggatctctgctgggctatgcccgggacatggaagtag

SEQ ID NO: 219693 - DNA, 4923 bp, Artificial Sequence
  derived and/or modified sequence
atgcagagcttccgggagcgctgtggcttccacggcaagcagcagaactaccagcagaccagccaggagaccagccggctggagaactaccggcagcccagccaggccggcctgagctgtgaccggcagaggctgctggccaaggactactacaacccccagccctaccccagctatgaaggaggagctggcaccccatctggaacagctgctgctgtggccgctgacaagtaccaccggggcagcaaggccctgcccacccagcagggcctgcagggccgcccagccttccctggctacggcgtgcaggacagcagcccctacccaggccgctatgctggggaggagagcctgcaggcctggggcgccccccagcccccaccaccccagccccagcccctgcctgctggggtggccaagtatgatgagaacctgatgaagaagacagctgtgccccccagccggcagtatgcagagcagggcgcccaggtgcccttccgcacccacagcctgcacgtgcagcagcccccaccaccccagcagcccctggcctaccccaagctgcagaggcagaagctgcagaatgacatcgccagccccctgcccttcccccagggcacccacttcccccagcacagccagagcttccccaccagcagcacctacagcagctctgtgcagggcggcggccagggcgcccacagctacaagagctgcacagcccccacagcccagccccatgaccggcccctgacagccagcagcagcctggcccctggccagagggtgcagaacctgcacgcctaccagagcggccgcctgtcctatgaccagcagcagcagcagcagcagcagcagcagcagcagcagcaggccctgcagagccgccaccacgcccaggagaccctgcactaccagaacctggccaagtaccagcactacggccagcagggccagggctactgccagccagatgctgctgtgaggaccccagagcagtactaccagaccttcagccccagcagcagccacagccctgcccggtctgtgggccgcagccccagctacagcagcacccccagccccctgatgcccaacctggagaacttcccctacagccagcagcccctgagcactggagccttccctgctggcatcacagaccacagccacttcatgcccctgctgaaccccagccccacagatgccaccagctctgtggacacccaggccggcaactgcaagcccctgcagaaggacaagctgcctgagaacctgctgagtgacctgagcctgcagagcctgacagccctgaccagccaggtggagaacatcagcaacacagtgcagcagctgctgctgagcaaggctgctgtgccccagaagaagggcgtgaagaacctggtgtccaggaccccagagcagcacaagagccagcactgcagccctgagggcagcggctacagcgctgagcctgctggcacccccctgtctgagccccccagcagcaccccccagagcacccacgccgagccccaggaggccgactacctgagcggcagcgaggaccccctggagaggagcttcctgtactgcaaccaggcccggggcagccctgcccgggtgaacagcaacagcaaggccaagccagagagcgtgtccacctgcagcgtgaccagcccagatgacatgagcaccaagagtgatgacagcttccagagcctgcacggcagcctgcccctggacagcttcagcaagtttgtggccggggagcgggactgcccccggctgctgctgagcgccctggcccaggaggacctggccagcgagatcctgggcctgcaggaggccatcggggagaaggctgacaaggcctgggccgaggcccccagcctggtgaaggacagcagcaagccacccttcagcctggagaaccacagcgcctgcctggacagcgtggccaagagcgcctggcccaggcctggagagcctgaggccctgcctgacagcctgcagctggacaagggcggcaatgccaaggacttcagccctggcctgtttgaggaccccagcgtggcctttgccaccccagaccccaagaagaccaccggccccctgagctttggcaccaagcccaccctgggcgtgcctgccccagaccccaccacagctgcctttgactgcttcccagacaccacagctgccagcagcgctgacagcgccaacccctttgcctggccagaggagaacctgggagatgcctgcccccgctggggcctgcaccctggagagctgaccaagggcctggagcagggcggcaaggccagtgatggcatcagcaaaggagacacccatgaggccagcgcctgcctgggcttccaggaggaggaccccccaggagagaaggtggccagcctgcccggggacttcaagcaggaggaggtgggcggcgtgaaggaggaggccggcggcctgctgcagtgcccagaggtggccaaggctgaccgctggctggaggacagccgccactgctgcagcacagctgactttggagacctgcccctgctgccccccaccagcaggaaagaagacctggaggccgaggaggagtacagcagcctgtgtgagctgctgggcagccctgagcagaggcctggcatgcaggaccccctgagccccaaggcccccctcatctgcaccaaggaggaggtggaggaggtgctggacagcaaggccggctggggcagcccctgccacctgtctggagagagcgtcatcctgctgggccccaccgtgggcacagagagcaaggtgcagagctggtttgagagcagcctgagccacatgaagccaggagaggagggcccagatggagagcgggcccctggggacagcaccaccagtgatgccagcctggcccagaagcccaacaagccagctgtgcctgaggcccccatcgccaagaaggagcctgtgccccggggcaagagcctgcggagcagaagagtgcaccggggcctgcctgaggccgaggacagcccctgccgggcccctgtgctgcccaaggacctgctgctgcctgagagctgcaccggccccccccagggccagatggagggcgctggggcccctggccgcggggccagcgagggcctgcccaggatgtgcaccaggagcctgacagccctgtctgagcccaggaccccaggccccccaggcctgaccaccaccccagcccccccagacaagctgggcggcaagcagagagctgccttcaagagcggcaagagggtgggcaagcccagccccaaggccgccagcagccccagcaacccagctgccctgcctgtggccagtgacagcagccccatgggcagcaagaccaaggagacagacagccccagcaccccaggcaaggaccagaggtccatgatcctgcggagcaggaccaagacccaggagatcttccacagcaagagaagaagacccagcgagggccgcctgcccaactgccgggccaccaagaagctgctggacaacagccacctgcctgccaccttcaaggtgagcagcagcccccagaaggagggccgggtgtcccagagggcccgggtgcccaagccaggggccggcagcaagctgagtgaccggcccctgcacgccctgaagaggaagagcgccttcatggcccctgtgcccaccaagaagaggaacctggtgctgcggagccgcagcagcagcagcagcaatgccagcggaaatggaggagatggcaaggaggagaggcctgagggcagccccaccctcttcaagaggatgagcagccccaagaaggccaagcccaccaagggaaatggagagcccgccaccaagctgcccccacctgagaccccagatgcctgcctgaagctggccagccgggccgccttccagggcgccatgaagaccaaggtgctgccccccaggaagggccggggcctgaagctggaggccatcgtgcagaagatcaccagccccagcctgaagaagtttgcctgcaaggcccctggggccagccctggcaaccccctgagccccagcctgagtgacaaggaccggggcctgaagggagctgggggcagccctgtgggcgtggaggagggcctggtgaatgtgggcaccggccagaagctgcccaccagcggggctgaccccctgtgcaggaaccccaccaacagaagcctgaagggcaagctgatgaacagcaagaagctgagcagcacagactgcttcaagacagaggccttcaccagccctgaggccctgcagcccggcggcacagccctggcccccaagaagaggagcaggaagggccgggccggggcccacggcctgagcaagggccccctggagaagaggccctacctgggccctgccctgctgctgaccccccgggaccgggccagcggcacccagggcgccagcgaggacaacagcggcggcggcggcaagaagcccaagatggaggagctgggcctggccagccagcccccagagggccggccctgccagccccagacccgggcccagaagcagcccggccacaccaactacagcagctacagcaagaggaagaggctgacccggggccgggccaagaacaccaccagcagcccctgcaagggccgggccaagagaagacggcagcagcaggtgctgcccctggaccctgctgagcctgagatccggctgaagtacatcagcagctgcaagaggctgcggagtgacagcaggaccccagccttcagcccctttgagcccagcctgggcgcccagaaccccaggagcggccagaatgcccccccagccccagcagatgcccggcccctgtgcaccacccgggacagaagagcctacagcgcccgggagcagggccagaggtag

SEQ ID NO: 219694 - DNA, 5589 bp, Artificial Sequence
  derived and/or modified sequence
atgcagagcttccgggagcgctgtggcttccacggcaagcagcagaactaccagcagaccagccaggagaccagccggctggagaactaccggcagcccagccaggccggcctgagctgtgaccggcagaggctgctggccaaggactactacaacccccagccctaccccagctatgaaggaggagctggcaccccatctggaacagctgctgctgtggccgctgacaagtaccaccggggcagcaaggccctgcccacccagcagggcctgcagggccgcccagccttccctggctacggcgtgcaggacagcagcccctacccaggccgctatgctggggaggagagcctgcaggcctggggcgccccccagcccccaccaccccagccccagcccctgcctgctggggtggccaagtatgatgagaacctgatgaagaagacagctgtgccccccagccggcagtatgcagagcagggcgcccaggtgcccttccgcacccacagcctgcacgtgcagcagcccccaccaccccagcagcccctggcctaccccaagctgcagaggcagaagctgcagaatgacatcgccagccccctgcccttcccccagggctggtgggccggccacagctacaagagctgcacagcccccacagcccagccccatgaccggcccctgacagccagcagcagcctggcccctggccagagggtgcagaacctgcacgcctaccagagcggccgcctgtcctatgaccagcagcagcagcagcagcagcagcagcagcagcagcagcaggccctgcagagccgccaccacgcccaggagaccctgcactaccagaacctggccaagtaccagcactacggccagcagggccagggctactgccagccagatgctgctgtgaggaccccagagcagtactaccagaccttcagccccagcagcagccacagccctgcccggtctgtgggccgcagccccagctacagcagcacccccagccccctgatgcccaacctggagaacttcccctacagccagcagcccctgagcactggagccttccctgctggcatcacagaccacagccacttcatgcccctgctgaaccccagccccacagatgccaccagctctgtggacagcctgacagccctgaccagccaggtggagaacatcagcaacacagtgcagcagctgctgctgagcaaggctgctgtgccccagaagaagggcgtgaagaacctggtgtccaggaccccagagcagcacaagagccagcactgcagccctgagggcagcggctacagcgctgagcctgctggcacccccctgtctgagccccccagcagcaccccccagagcacccacgccgagccccaggaggccgactacctgagcggcagcgaggaccccctggagaggagcttcctgtactgcaaccaggcccggggcagccctgcccgggtgaacagcaacagcaaggccaagccagagagcgtgtccacctgcagcgtgaccagcccagatgacatgagcaccaagagtgatgacagcttccagagcctgcacggcagcctgcccctggacagcttcagcaagtttgtggccggggagcgggactgcccccggctgctgctgagcgccctggcccaggaggacctggccagcgagatcctgggcctgcaggaggccatcggggagaaggctgacaaggcctgggccgaggcccccagcctggtgaaggacagcagcaagccacccttcagcctggagaaccacagcgcctgcctggacagcgtggccaagagcgcctggcccaggcctggagagcctgaggccctgcctgacagcctgcagctggacaagggcggcaatgccaaggacttcagccctggcctgtttgaggaccccagcgtggcctttgccaccccagaccccaagaagaccaccggccccctgagctttggcaccaagcccaccctgggcgtgcctgccccagaccccaccacagctgcctttgactgcttcccagacaccacagctgccagcagcgctgacagcgccaacccctttgcctggccagaggagaacctgggagatgcctgcccccgctggggcctgcaccctggagagctgaccaagggcctggagcagggcggcaaggccagtgatggcatcagcaaaggagacacccatgaggccagcgcctgcctgggcttccaggaggaggaccccccaggagagaaggtggccagcctgcccggggacttcaagcaggaggaggtgggcggcgtgaaggaggaggccggcggcctgctgcagtgcccagaggtggccaaggctgaccgctggctggaggacagccgccactgctgcagcacagctgactttggagacctgcccctgctgccccccaccagcaggaaagaagacctggaggccgaggaggagtacagcagcctgtgtgagctgctgggcagccctgagcagaggcctggcatgcaggaccccctgagccccaaggcccccctcatctgcaccaaggaggaggtggaggaggtgctggacagcaaggccggctggggcagcccctgccacctgtctggagagagcgtcatcctgctgggccccaccgtgggcacagagagcaaggtgcagagctggtttgagagcagcctgagccacatgaagccaggagaggagggcccagatggagagcgggcccctggggacagcaccaccagtgatgccagcctggcccagaagcccaacaagccagctgtgcctgaggcccccatcgccaagaaggagcctgtgccccggggcaagagcctgcggagcagaagagtgcaccggggcctgcctgaggccgaggacagcccctgccgggcccctgtgctgcccaaggacctgctgctgcctgagagctgcaccggccccccccagggccagatggagggcgctggggcccctggccgcggggccagcgagggcctgcccaggatgtgcaccaggagcctgacagccctgtctgagcccaggaccccaggccccccaggcctgaccaccaccccagcccccccagacaagctgggcggcaagcagagagctgccttcaagagcggcaagagggtgggcaagcccagccccaaggccgccagcagccccagcaacccagctgccctgcctgtggccagtgacagcagccccatgggcagcaagaccaaggagacagacagccccagcaccccaggcaaggaccagaggtccatgatcctgcggagcaggaccaagacccaggagatcttccacagcaagagaagaagacccagcgagggccgcctgcccaactgccgggccaccaagaagctgctggacaacagccacctgcctgccaccttcaaggtgagcagcagcccccagaaggagggccgggtgtcccagagggcccgggtgcccaagccaggggccggcagcaagctgagtgaccggcccctgcacgccctgaagaggaagagcgccttcatggcccctgtgcccaccaagaagaggaacctggtgctgcggagccgcagcagcagcagcagcaatgccagcggaaatggaggagatggcaaggaggagaggcctgagggcagccccaccctcttcaagaggatgagcagccccaagaaggccaagcccaccaagggaaatggagagcccgccaccaagctgcccccacctgagaccccagatgcctgcctgaagctggccagccgggccgccttccagggcgccatgaagaccaaggtgctgccccccaggaagggccggggcctgaagctggaggccatcgtgcagaagatcaccagccccagcctgaagaagtttgcctgcaaggcccctggggccagccctggcaaccccctgagccccagcctgagtgacaaggaccggggcctgaagggagctgggggcagccctgtgggcgtggaggagggcctggtgaatgtgggcaccggccagaagctgcccaccagcggggctgaccccctgtgcaggaaccccaccaacagaagcctgaagggcaagctgatgaacaacagagccagcggcacccagggcgccagcgaggacaacagcggcggcggcggcaagaagcccaagatggaggagctgggcctggccagccagcccccagagggccggccctgccagccccagacccgggcccagaagcagcccggccacaccaactacagcagctacagcaagaggaagaggctgacccggggccgggccaagaacaccaccagcagcccctgcaagggccgggccaagagaagacggcagcagcaggtgctgcccctggaccctgctgagcctgagatccggctgaagtacatcagcagctgcaagaggctgcggagtgacagcaggaccccagccttcagcccctttgtgcgggtggagaagagagatgccttcaccaccatctgcaccgtggtgaacagccctggagatgcccccaagccccacaggaagcccagcagcagcgccagcagcagcagcagcagcagcagcttcagcctggatgctgctggggccagcctggccaccctgcccggcggcagcatcctgcagccccggcccagcctgcccctgagcagcaccatgcacctgggccctgtggtgtccaaggccctgagcaccagctgcctggtgtgctgcctgtgccagaacccagccaacttcaaggacctgggggacctgtgtggcccctactacccagagcactgcctgcccaagaagaagcccaagctgaaggagaaggtgcggcctgagggcacctgtgaggaggccagcctgcccctggagaggaccctgaagggcccagaatgtgccgccgccgccacagctgggaagccacccaggccagatggccctgctgaccctgccaagcagggccccctgcggaccagcgcccggggcctgagccggcggctgcagagctgctactgctgtgatggccgggaggatggaggagaggaggccgccccagctgacaagggccactgggtgcatgaggcctgtgctgtgtggacaggaggagtgtacctggtggccggcaagctgtttggcctgcaggaggccatgaaggtggccgtggacatgcatggaggcaccgtggccctggcccctggggacttcagcctgcccggcctgcgctttgccagcctcttccagggccccagctggtgtgactgccctgtgctggccaccagcacccccagctcctggagccgctgtgtgcctgctgccaagaagccaggcccccccctgggcgccgccaccaaggatgccagcacccccaccaccaccagggtgcctgccatgcaggtgcgggcccggcccggcaccggcggccactggagccccagcaagcagagccggggcaccctgcccggccacagcagccccaaccctggccccatcagcctcttctccttcccccccctgctgccccagcagttcttctaccccagcgtgtgcctggacctgtgctgggccatgcctggcacctggaagtag

SEQ ID NO: 219695 - DNA, 5721 bp, Artificial Sequence
  derived and/or modified sequence
atgcagagcttccgggagcgctgtggcttccacggcaagcagcagaactaccagcagaccagccaggagaccagccggctggagaactaccggcagcccagccaggccggcctgagctgtgaccggcagaggctgctggccaaggactactacaacccccagccctaccccagctatgaaggaggagctggcaccccatctggaacagctgctgctgtggccgctgacaagtaccaccggggcagcaaggccctgcccacccagcagggcctgcagggccgcccagccttccctggctacggcgtgcaggacagcagcccctacccaggccgctatgctggggaggagagcctgcaggcctggggcgccccccagcccccaccaccccagccccagcccctgcctgctggggtggccaagtatgatgagaacctgatgaagaagacagctgtgccccccagccggcagtatgcagagcagggcgcccaggtgcccttccgcacccacagcctgcacgtgcagcagcccccaccaccccagcagcccctggcctaccccaagctgcagaggcagaagctgcagaatgacatcgccagccccctgcccttcccccagggcacccacttcccccagcacagccagagcttccccaccagcagcacctacagcagctctgtgcagggcggcggccagggcgcccacagctacaagagctgcacagcccccacagcccagccccatgaccggcccctgacagccagcagcagcctggcccctggccagagggtgcagaacctgcacgcctaccagagcggccgcctgtcctatgaccagcagcagcagcagcagcagcagcagcagcagcagcagcaggccctgcagagccgccaccacgcccaggagaccctgcactaccagaacctggccaagtaccagcactacggccagcagggccagggctactgccagccagatgctgctgtgaggaccccagagcagtactaccagaccttcagccccagcagcagccacagccctgcccggtctgtgggccgcagccccagctacagcagcacccccagccccctgatgcccaacctggagaacttcccctacagccagcagcccctgagcactggagccttccctgctggcatcacagaccacagccacttcatgcccctgctgaaccccagccccacagatgccaccagctctgtggacacccaggccggcaactgcaagcccctgcagaaggacaagctgcctgagaacctgctgagtgacctgagcctgcagagcctgacagccctgaccagccaggtggagaacatcagcaacacagtgcagcagctgctgctgagcaaggctgctgtgccccagaagaagggcgtgaagaacctggtgtccaggaccccagagcagcacaagagccagcactgcagccctgagggcagcggctacagcgctgagcctgctggcacccccctgtctgagccccccagcagcaccccccagagcacccacgccgagccccaggaggccgactacctgagcggcagcgaggaccccctggagaggagcttcctgtactgcaaccaggcccggggcagccctgcccgggtgaacagcaacagcaaggccaagccagagagcgtgtccacctgcagcgtgaccagcccagatgacatgagcaccaagagtgatgacagcttccagagcctgcacggcagcctgcccctggacagcttcagcaagtttgtggccggggagcgggactgcccccggctgctgctgagcgccctggcccaggaggacctggccagcgagatcctgggcctgcaggaggccatcggggagaaggctgacaaggcctgggccgaggcccccagcctggtgaaggacagcagcaagccacccttcagcctggagaaccacagcgcctgcctggacagcgtggccaagagcgcctggcccaggcctggagagcctgaggccctgcctgacagcctgcagctggacaagggcggcaatgccaaggacttcagccctggcctgtttgaggaccccagcgtggcctttgccaccccagaccccaagaagaccaccggccccctgagctttggcaccaagcccaccctgggcgtgcctgccccagaccccaccacagctgcctttgactgcttcccagacaccacagctgccagcagcgctgacagcgccaacccctttgcctggccagaggagaacctgggagatgcctgcccccgctggggcctgcaccctggagagctgaccaagggcctggagcagggcggcaaggccagtgatggcatcagcaaaggagacacccatgaggccagcgcctgcctgggcttccaggaggaggaccccccaggagagaaggtggccagcctgcccggggacttcaagcaggaggaggtgggcggcgtgaaggaggaggccggcggcctgctgcagtgcccagaggtggccaaggctgaccgctggctggaggacagccgccactgctgcagcacagctgactttggagacctgcccctgctgccccccaccagcaggaaagaagacctggaggccgaggaggagtacagcagcctgtgtgagctgctgggcagccctgagcagaggcctggcatgcaggaccccctgagccccaaggcccccctcatctgcaccaaggaggaggtggaggaggtgctggacagcaaggccggctggggcagcccctgccacctgtctggagagagcgtcatcctgctgggccccaccgtgggcacagagagcaaggtgcagagctggtttgagagcagcctgagccacatgaagccaggagaggagggcccagatggagagcgggcccctggggacagcaccaccagtgatgccagcctggcccagaagcccaacaagccagctgtgcctgaggcccccatcgccaagaaggagcctgtgccccggggcaagagcctgcggagcagaagagtgcaccggggcctgcctgaggccgaggacagcccctgccgggcccctgtgctgcccaaggacctgctgctgcctgagagctgcaccggccccccccagggccagatggagggcgctggggcccctggccgcggggccagcgagggcctgcccaggatgtgcaccaggagcctgacagccctgtctgagcccaggaccccaggccccccaggcctgaccaccaccccagcccccccagacaagctgggcggcaagcagagagctgccttcaagagcggcaagagggtgggcaagcccagccccaaggccgccagcagccccagcaacccagctgccctgcctgtggccagtgacagcagccccatgggcagcaagaccaaggagacagacagccccagcaccccaggcaaggaccagaggtccatgatcctgcggagcaggaccaagacccaggagatcttccacagcaagagaagaagacccagcgagggccgcctgcccaactgccgggccaccaagaagctgctggacaacagccacctgcctgccaccttcaaggtgagcagcagcccccagaaggagggccgggtgtcccagagggcccgggtgcccaagccaggggccggcagcaagctgagtgaccggcccctgcacgccctgaagaggaagagcgccttcatggcccctgtgcccaccaagaagaggaacctggtgctgcggagccgcagcagcagcagcagcaatgccagcggaaatggaggagatggcaaggaggagaggcctgagggcagccccaccctcttcaagaggatgagcagccccaagaaggccaagcccaccaagggaaatggagagcccgccaccaagctgcccccacctgagaccccagatgcctgcctgaagctggccagccgggccgccttccagggcgccatgaagaccaaggtgctgccccccaggaagggccggggcctgaagctggaggccatcgtgcagaagatcaccagccccagcctgaagaagtttgcctgcaaggcccctggggccagccctggcaaccccctgagccccagcctgagtgacaaggaccggggcctgaagggagctgggggcagccctgtgggcgtggaggagggcctggtgaatgtgggcaccggccagaagctgcccaccagcggggctgaccccctgtgcaggaaccccaccaacagaagcctgaagggcaagctgatgaacagcaagaagctgagcagcacagactgcttcaagacagaggccttcaccagccctgaggccctgcagcccggcggcacagccctggcccccaagaagaggagcaggaagggccgggccggggcccacggcctgagcaagggccccctggagaagaggccctacctgggccctgccctgctgctgaccccccgggaccgggccagcggcacccagggcgccagcgaggacaacagcggcggcggcggcaagaagcccaagatggaggagctgggcctggccagccagcccccagagggccggccctgccagccccagacccgggcccagaagcagcccggccacaccaactacagcagctacagcaagaggaagaggctgacccggggccgggccaagaacaccaccagcagcccctgcaagggccgggccaagagaagacggcagcagcaggtgctgcccctggaccctgctgagcctgagatccggctgaagtacatcagcagctgcaagaggctgcggagtgacagcaggaccccagccttcagcccctttgtgcgggtggagaagagagatgccttcaccaccatctgcaccgtggtgaacagccctggagatgcccccaagccccacaggaagcccagcagcagcgccagcagcagcagcagcagcagcagcttcagcctggatgctgctggggccagcctggccaccctgcccggcggcagcatcctgcagccccggcccagcctgcccctgagcagcaccatgcacctgggccctgtggtgtccaaggccctgagcaccagctgcctggtgtgctgcctgtgccagaacccagccaacttcaaggacctgggggacctgtgtggcccctactacccagagcactgcctgcccaagaagaagcccaagctgaaggagaaggtgcggcctgagggcacctgtgaggaggccagcctgcccctggagaggaccctgaagggcccagaatgtgccgccgccgccacagctgggaagccacccaggccagatggccctgctgaccctgccaagcagggccccctgcggaccagcgcccggggcctgagccggcggctgcagagctgctactgctgtgatggccgggaggatggaggagaggaggccgccccagctgacaagggcaggaagcatgagtgcagcaaggaggccccagctgagcctggaggagaggcccaggagcactgggtgcatgaggcctgtgctgtgtggacaggaggagtgtacctggtggccggcaagctgtttggcctgcaggaggccatgaaggtggccgtggacatgatgtgcagcagctgccaggaggccggggccaccatcggctgctgccacaagggctgcctgcacacctaccactacccctgtgccagtgatgctggctgcatcttcatcgaggagaacttcagcctgaagtgccccaagcacaagaggctgccctag

SEQ ID NO: 219696 - DNA, 2901 bp, Artificial Sequence
  derived and/or modified sequence
atgcagagcttccgggagcgctgtggcttccacggcaagcagcagaactaccagcagaccagccaggagaccagccggctggagaactaccggcagcccagccaggccggcctgagctgtgaccggcagaggctgctggccaaggactactacaacccccagccctaccccagctatgaaggaggagctggcaccccatctggaacagctgctgctgtggccgctgacaagtaccaccggggcagcaaggccctgcccacccagcagggcctgcagggccgcccagccttccctggctacggcgtgcaggacagcagcccctacccaggccgctatgctggggaggagagcctgcaggcctggggcgccccccagcccccaccaccccagccccagcccctgcctgctggggtggccaagtatgatgagaacctgatgaagaagacagctgtgccccccagccggcagtatgcagagcagggcgcccaggtgcccttccgcacccacagcctgcacgtgcagcagcccccaccaccccagcagcccctggcctaccccaagctgcagaggcagaagctgcagaatgacatcgccagccccctgcccttcccccagggcacccacttcccccagcacagccagagcttccccaccagcagcacctacagcagctctgtgcagggcggcggccagggcgcccacagctacaagagctgcacagcccccacagcccagccccatgaccggcccctgacagccagcagcagcctggcccctggccagagggtgcagaacctgcacgcctaccagagcggccgcctgtcctatgaccagcagcagcagcagcagcagcagcagcagcagcagcagcaggccctgcagagccgccaccacgcccaggagaccctgcactaccagaacctggccaagtaccagcactacggccagcagggccagggctactgccagccagatgctgctgtgaggaccccagagcagtactaccagaccttcagccccagcagcagccacagccctgcccggtctgtgggccgcagccccagctacagcagcacccccagccccctgatgcccaacctggagaacttcccctacagccagcagcccctgagcactggagccttccctgctggcatcacagaccacagccacttcatgcccctgctgaaccccagccccacagatgccaccagctctgtggacacccaggccggcaactgcaagcccctgcagaaggacaagctgcctgagaacctgctgagtgacctgagcctgcagagcctgacagccctgaccagccaggtggagaacatcagcaacacagtgcagcagctgctgctgagcaaggctgctgtgccccagaagaagggcgtgaagaacctggtgtccaggaccccagagcagcacaagagccagcactgcagccctgagggcagcggctacagcgctgagcctgctggcacccccctgtctgagccccccagcagcaccccccagagcacccacgccgagccccaggaggccgactacctgagcggcagcgaggaccccctggagaggagcttcctgtactgcaaccaggcccggggcagccctgcccgggtgaacagcaacagcaaggccaagccagagagcgtgtccacctgcagcgtgaccagcccagatgacatgagcaccaagagtgatgacagcttccagagcctgcacggcagcctgcccctggacagcttcagcaagtttgtggccggggagcgggactgcccccggctgctgctgagcgccctggcccaggaggacctggccagcgagatcctgggcctgcaggaggccatcggggagaaggctgacaaggcctgggccgaggcccccagcctggtgaaggacagcagcaagccacccttcagcctggagaaccacagcgcctgcctggacagcgtggccaagagcgcctggcccaggcctggagagcctgaggccctgcctgacagcctgcagctggacaagggcggcaatgccaaggacttcagccctggcctgtttgaggaccccagcgtggcctttgccaccccagaccccaagaagaccaccggccccctgagctttggcaccaagcccaccctgggcgtgcctgccccagaccccaccacagctgcctttgactgcttcccagacaccacagctgccagcagcgctgacagcgccaacccctttgcctggccagaggagaacctgggagatgcctgcccccgctggggcctgcaccctggagagctgaccaagggcctggagcagggcggcaaggccagtgatggcatcagcaaaggagacacccatgaggccagcgcctgcctgggcttccaggaggaggaccccccaggagagaaggtggccagcctgcccggggacttcaagcaggaggaggtgggcggcgtgaaggaggaggccggcggcctgctgcagtgcccagaggtggccaaggctgaccgctggctggaggacagccgccactgctgcagcacagctgactttggagacctgcccctgctgccccccaccagcaggaaagaagacctggaggccgaggaggagtacagcagcctgtgtgagctgctgggcagccctgagcagaggcctggcatgcaggaccccctgagccccaaggcccccctcatctgcaccaaggaggaggtggaggaggtgctggacagcaaggccggctggggcagcccctgccacctgtctggagagagcgtcatcctgctgggccccaccgtgggcacagagagcaaggtgcagagctggtttgaggccagcctgtacagcgtgtacatctgcatccacatccacatctacaacatctatgaggactgcaagtgctag

SEQ ID NO: 219697 - DNA, 2829 bp, Artificial Sequence
  derived and/or modified sequence
atgcagagcttccgggagcgctgtggcttccacggcaagcagcagaactaccagcagaccagccaggagaccagccggctggagaactaccggcagcccagccaggccggcctgagctgtgaccggcagaggctgctggccaaggactactacaacccccagccctaccccagctatgaaggaggagctggcaccccatctggaacagctgctgctgtggccgctgacaagtaccaccggggcagcaaggccctgcccacccagcagggcctgcagggccgcccagccttccctggctacggcgtgcaggacagcagcccctacccaggccgctatgctggggaggagagcctgcaggcctggggcgccccccagcccccaccaccccagccccagcccctgcctgctggggtggccaagtatgatgagaacctgatgaagaagacagctgtgccccccagccggcagtatgcagagcagggcgcccaggtgcccttccgcacccacagcctgcacgtgcagcagcccccaccaccccagcagcccctggcctaccccaagctgcagaggcagaagctgcagaatgacatcgccagccccctgcccttcccccagggcacccacttcccccagcacagccagagcttccccaccagcagcacctacagcagctctgtgcagggcggcggccagggcgcccacagctacaagagctgcacagcccccacagcccagccccatgaccggcccctgacagccagcagcagcctggcccctggccagagggtgcagaacctgcacgcctaccagagcggccgcctgtcctatgaccagcagcagcagcagcagcagcagcagcagcagcagcagcaggccctgcagagccgccaccacgcccaggagaccctgcactaccagaacctggccaagtaccagcactacggccagcagggccagggctactgccagccagatgctgctgtgaggaccccagagcagtactaccagaccttcagccccagcagcagccacagccctgcccggtctgtgggccgcagccccagctacagcagcacccccagccccctgatgcccaacctggagaacttcccctacagccagcagcccctgagcactggagccttccctgctggcatcacagaccacagccacttcatgcccctgctgaaccccagccccacagatgccaccagctctgtggacacccaggccggcaactgcaagcccctgcagaaggacaagctgcctgagaacctgctgagtgacctgagcctgcagagcctgacagccctgaccagccaggtggagaacatcagcaacacagtgcagcagctgctgctgagcaaggctgctgtgccccagaagaagggcgtgaagaacctggtgtccaggaccccagagcagcacaagagccagcactgcagccctgagggcagcggctacagcgctgagcctgctggcacccccctgtctgagccccccagcagcaccccccagagcacccacgccgagccccaggaggccgactacctgagcggcagcgaggaccccctggagaggagcttcctgtactgcaaccaggcccggggcagccctgcccgggtgaacagcaacagcaaggccaagccagagagcgtgtccacctgcagcgtgaccagcccagatgacatgagcaccaagagtgatgacagcttccagagcctgcacggcagcctgcccctggacagcttcagcaagtttgtggccggggagcgggactgcccccggctgctgctgagcgccctggcccaggaggacctggccagcgagatcctgggcctgcaggaggccatcggggagaaggctgacaaggcctgggccgaggcccccagcctggtgaaggacagcagcaagccacccttcagcctggagaaccacagcgcctgcctggacagcgtggccaagagcgcctggcccaggcctggagagcctgaggccctgcctgacagcctgcagctggacaagggcggcaatgccaaggacttcagccctggcctgtttgaggaccccagcgtggcctttgccaccccagaccccaagaagaccaccggccccctgagctttggcaccaagcccaccctgggcgtgcctgccccagaccccaccacagctgcctttgactgcttcccagacaccacagctgccagcagcgctgacagcgccaacccctttgcctggccagaggagaacctgggagatgcctgcccccgctggggcctgcaccctggagagctgaccaagggcctggagcagggcggcaaggccagtgatggcatcagcaaaggagacacccatgaggccagcgcctgcctgggcttccaggaggaggaccccccaggagagaaggtggccagcctgcccggggacttcaagcaggaggaggtgggcggcgtgaaggaggaggccggcggcctgctgcagtgcccagaggtggccaaggctgaccgctggctggaggacagccgccactgctgcagcacagctgactttggagacctgcccctgctgccccccaccagcaggaaagaagacctggaggccgaggaggagtacagcagcctgtgtgagctgctgggcagccctgagcagaggcctggcatgcaggaccccctgagccccaaggcccccctcatctgcaccaaggaggaggtggaggaggtgctggacagcaaggccggctggggcagcccctgccacctgtctggagagagcgtcatcctgctgggccccaccgtgggcacagagagcaaggtgcagagctggttctag

SEQ ID NO: 219698 - DNA, 5982 bp, Artificial Sequence
  derived and/or modified sequence
atgcagagcttccgggagcgctgtggcttccacggcaagcagcagaactaccagcagaccagccaggagaccagccggctggagaactaccggcagcccagccaggccggcctgagctgtgaccggcagaggctgctggccaaggactactacaacccccagccctaccccagctatgaaggaggagctggcaccccatctggaacagctgctgctgtggccgctgacaagtaccaccggggcagcaaggccctgcccacccagcagggcctgcagggccgcccagccttccctggctacggcgtgcaggacagcagcccctacccaggccgctatgctggggaggagagcctgcaggcctggggcgccccccagcccccaccaccccagccccagcccctgcctgctggggtggccaagtatgatgagaacctgatgaagaagacagctgtgccccccagccggcagtatgcagagcagggcgcccaggtgcccttccgcacccacagcctgcacgtgcagcagcccccaccaccccagcagcccctggcctaccccaagctgcagaggcagaagctgcagaatgacatcgccagccccctgcccttcccccagggcacccacttcccccagcacagccagagcttccccaccagcagcacctacagcagctctgtgcagggcggcggccagggcgcccacagctacaagagctgcacagcccccacagcccagccccatgaccggcccctgacagccagcagcagcctggcccctggccagagggtgcagaacctgcacgcctaccagagcggccgcctgtcctatgaccagcagcagcagcagcagcagcagcagcagcagcagcagcaggccctgcagagccgccaccacgcccaggagaccctgcactaccagaacctggccaagtaccagcactacggccagcagggccagggctactgccagccagatgctgctgtgaggaccccagagcagtactaccagaccttcagccccagcagcagccacagccctgcccggtctgtgggccgcagccccagctacagcagcacccccagccccctgatgcccaacctggagaacttcccctacagccagcagcccctgagcactggagccttccctgctggcatcacagaccacagccacttcatgcccctgctgaaccccagccccacagatgccaccagctctgtggacacccaggccggcaactgcaagcccctgcagaaggacaagctgcctgagaacctgctgagtgacctgagcctgcagagcctgacagccctgaccagccaggtggagaacatcagcaacacagtgcagcagctgctgctgagcaaggctgctgtgccccagaagaagggcgtgaagaacctggtgtccaggaccccagagcagcacaagagccagcactgcagccctgagggcagcggctacagcgctgagcctgctggcacccccctgtctgagccccccagcagcaccccccagagcacccacgccgagccccaggaggccgactacctgagcggcagcgaggaccccctggagaggagcttcctgtactgcaaccaggcccggggcagccctgcccgggtgaacagcaacagcaaggccaagccagagagcgtgtccacctgcagcgtgaccagcccagatgacatgagcaccaagagtgatgacagcttccagagcctgcacggcagcctgcccctggacagcttcagcaagtttgtggccggggagcgggactgcccccggctgctgctgagcgccctggcccaggaggacctggccagcgagatcctgggcctgcaggaggccatcggggagaaggctgacaaggcctgggccgaggcccccagcctggtgaaggacagcagcaagccacccttcagcctggagaaccacagcgcctgcctggacagcgtggccaagagcgcctggcccaggcctggagagcctgaggccctgcctgacagcctgcagctggacaagggcggcaatgccaaggacttcagccctggcctgtttgaggaccccagcgtggcctttgccaccccagaccccaagaagaccaccggccccctgagctttggcaccaagcccaccctgggcgtgcctgccccagaccccaccacagctgcctttgactgcttcccagacaccacagctgccagcagcgctgacagcgccaacccctttgcctggccagaggagaacctgggagatgcctgcccccgctggggcctgcaccctggagagctgaccaagggcctggagcagggcggcaaggccagtgatggcatcagcaaaggagacacccatgaggccagcgcctgcctgggcttccaggaggaggaccccccaggagagaaggtggccagcctgcccggggacttcaagcaggaggaggtgggcggcgtgaaggaggaggccggcggcctgctgcagtgcccagaggtggccaaggctgaccgctggctggaggacagccgccactgctgcagcacagctgactttggagacctgcccctgctgccccccaccagcaggaaagaagacctggaggccgaggaggagtacagcagcctgtgtgagctgctgggcagccctgagcagaggcctggcatgcaggaccccctgagccccaaggcccccctcatctgcaccaaggaggaggtggaggaggtgctggacagcaaggccggctggggcagcccctgccacctgtctggagagagcgtcatcctgctgggccccaccgtgggcacagagagcaaggtgcagagctggtttgagagcagcctgagccacatgaagccaggagaggagggcccagatggagagcgggcccctggggacagcaccaccagtgatgccagcctggcccagaagcccaacaagccagctgtgcctgaggcccccatcgccaagaaggagcctgtgccccggggcaagagcctgcggagcagaagagtgcaccggggcctgcctgaggccgaggacagcccctgccgggcccctgtgctgcccaaggacctgctgctgcctgagagctgcaccggccccccccagggccagatggagggcgctggggcccctggccgcggggccagcgagggcctgcccaggatgtgcaccaggagcctgacagccctgtctgagcccaggaccccaggccccccaggcctgaccaccaccccagcccccccagacaagctgggcggcaagcagagagctgccttcaagagcggcaagagggtgggcaagcccagccccaaggccgccagcagccccagcaacccagctgccctgcctgtggccagtgacagcagccccatgggcagcaagaccaaggagacagacagccccagcaccccaggcaaggaccagaggtccatgatcctgcggagcaggaccaagacccaggagatcttccacagcaagagaagaagacccagcgagggccgcctgcccaactgccgggccaccaagaagctgctggacaacagccacctgcctgccaccttcaaggtgagcagcagcccccagaaggagggccgggtgtcccagagggcccgggtgcccaagccaggggccggcagcaagctgagtgaccggcccctgcacgccctgaagaggaagagcgccttcatggcccctgtgcccaccaagaagaggaacctggtgctgcggagccgcagcagcagcagcagcaatgccagcggaaatggaggagatggcaaggaggagaggcctgagggcagccccaccctcttcaagaggatgagcagccccaagaaggccaagcccaccaagggaaatggagagcccgccaccaagctgcccccacctgagaccccagatgcctgcctgaagctggccagccgggccgccttccagggcgccatgaagaccaaggtgctgccccccaggaagggccggggcctgaagctggaggccatcgtgcagaagatcaccagccccagcctgaagaagtttgcctgcaaggcccctggggccagccctggcaaccccctgagccccagcctgagtgacaaggaccggggcctgaagggagctgggggcagccctgtgggcgtggaggagggcctggtgaatgtgggcaccggccagaagctgcccaccagcggggctgaccccctgtgcaggaaccccaccaacagaagcctgaagggcaagctgatgaacagcaagaagctgagcagcacagactgcttcaagacagaggccttcaccagccctgaggccctgcagcccggcggcacagccctggcccccaagaagaggagcaggaagggccgggccggggcccacggcctgagcaagggccccctggagaagaggccctacctgggccctgccctgctgctgaccccccgggaccgggccagcggcacccagggcgccagcgaggacaacagcggcggcggcggcaagaagcccaagatggaggagctgggcctggccagccagcccccagagggccggccctgccagccccagacccgggcccagaagcagcccggccacaccaactacagcagctacagcaagaggaagaggctgacccggggccgggccaagaacaccaccagcagcccctgcaagggccgggccaagagaagacggcagcagcaggtgctgcccctggaccctgctgagcctgagatccggctgaagtacatcagcagctgcaagaggctgcggagtgacagcaggaccccagccttcagcccctttgtgcgggtggagaagagagatgccttcaccaccatctgcaccgtggtgaacagccctggagatgcccccaagccccacaggaagcccagcagcagcgccagcagcagcagcagcagcagcagcttcagcctggatgctgctggggccagcctggccaccctgcccggcggcagcatcctgcagccccggcccagcctgcccctgagcagcaccatgcacctgggccctgtggtgtccaaggccctgagcaccagctgcctggtgtgctgcctgtgccagaacccagccaacttcaaggacctgggggacctgtgtggcccctactacccagagcactgcctgcccaagaagaagcccaagctgaaggagaaggtgcggcctgagggcacctgtgaggaggccagcctgcccctggagaggaccctgaagggcccagaatgtgccgccgccgccacagctgggaagccacccaggccagatggccctgctgaccctgccaagcagggccccctgcggaccagcgcccggggcctgagccggcggctgcagagctgctactgctgtgatggccgggaggatggaggagaggaggccgccccagctgacaagggcaggaagcatgagtgcagcaaggaggccccagctgagcctggaggagaggcccaggagcactgggtgcatgaggcctgtgctgtgtggacaggaggagtgtacctggtggccggcaagctgtttggcctgcaggaggccatgaaggtggccgtggacatgcacggcggcaccgtggccctggcccctggggacttcagcctgcccggcctgcgctttgccagcctcttccagggccccagctggtgtgactgccctgtgctggccaccagcacccccagctcctggagccgctgtgtgcctgctgccaagaagccaggcccccccctgggcgccgccaccaaggatgccagcacccccaccaccaccagggtgcctgccatgcaggtgcgggcccggcccggcactggaggccactggagccccagcaagcagagccggggcaccctgcccggccacagcagccccaaccctggccccatcagcctcttctccttcccccccctgctgccccagcagttcttctaccccagcgtgtgcctggacctgtgctgggccatgcctggcacctggaagtag

SEQ ID NO: 219699 - DNA, 4923 bp, Artificial Sequence
  derived and/or modified sequence
atgcagagcttccgggagcggtgcggcttccacggcaagcagcagaactaccagcaaacctctcaggagacttcacggctcgaaaattacagacaaccttcccaggcgggactgtcatgcgacagacagcgtctgttggcaaaggattattacaatccacagccttatcccagctatgaaggaggcgctggcacgccctcaggcacggccgccgctgtggctgctgataagtatcatagagggagtaaagcgctacccacccagcagggactacaaggaagaccagcctttcccggctacggcgtgcaagactcaagcccctacccaggtcgttatgccggagaggagtccctccaggcttggggagcaccccaacctcctcctccgcaacctcagccgcttcccgccggtgtcgcaaaatacgatgagaaccttatgaagaaaacagctgtgccacccagccgccaatatgctgagcaaggagctcaggtcccgttcaggacccactccctgcatgttcagcagccccccccgccacaacaacctctggcctatcccaaactacaaaggcaaaagctgcaaaatgacattgcatcgcccctaccttttccacaaggaactcattttccacagcattcacagagcttcccaacttccagcacatattccagttctgtgcagggcggaggccagggagctcattcgtataaatcctgtacagcgccaaccgcacaaccccatgatcgacccctcacagctagcagctccctggcgcccggacagcgagttcaaaatctgcacgcctatcagtcaggcagactgagctacgatcagcagcagcaacagcaacagcagcagcagcaacagcagcaggctcttcagtcccgccaccatgcgcaggaaacactgcactatcaaaatctggccaaatatcagcactatgggcagcagggacagggctattgccaacccgacgcggccgtacgcactcctgaacagtattaccagaccttctcccccagcagttcacacagtcctgcacgctctgtcggaaggagccccagctactcctccacgccatcacctttgatgccgaatctggagaatttcccatatagccaacaacccttgtcaaccggtgcctttcccgctggaatcactgaccacagtcattttatgcctttgcttaacccttcaccgaccgacgccacatcttcagttgacacccaagccggcaattgcaagcccctccaaaaagacaagctcccagaaaacctgttgagcgatctatctttacagagcttgactgccctgactagccaagtagagaatatttctaacaccgtgcagcaactgctgcttagcaaggctgccgtacctcagaagaagggcgtgaagaatctcgtttctcggactcccgaacagcataaatcacagcattgctcccccgagggatctggctatagtgccgagcccgccggtacacctttgagcgagcctccttcttcgaccccccagtctacccatgccgagccccaagaagccgattacttgtcaggctcggaagacccgttagagaggagcttcctgtactgcaaccaagctagaggttcaccagcccgcgtgaattctaattcaaaagccaagcccgaaagcgtgtctacatgctcagtgacgtcgccagacgacatgtcaaccaaatcagacgatagtttccaaagcctgcatggtagcctgcctctcgacagtttctctaagttcgtggcaggggagcgtgactgtccccgcctgctgctttctgcacttgctcaggaggatctcgcttcagagatcttaggactgcaggaagccataggcgaaaaggcagacaaggcatgggccgaggcaccatccttggtgaaggactccagcaaacctccgttctcactagagaatcacagcgcctgtctggattcagtggcgaagtcagcgtggccccgccctggagaaccggaagctctgccagattctctacagcttgacaaaggaggtaatgccaaggatttttctcctgggctattcgaggacccatccgtggcctttgcgacaccagatcccaagaagacaacagggcccttgagtttcggaacaaaaccaacactcggtgtgcctgcccccgatccaaccaccgccgcattcgactgctttcccgacacaacggccgcatcaagcgctgactccgcaaaccctttcgcatggcccgaggagaatctgggggacgcctgcccacggtgggggttgcatcctggtgaacttacaaagggtctggaacagggtgggaaagccagcgacggcattagcaagggggacacacatgaagcaagtgcctgtctggggtttcaggaagaggacccacctggcgaaaaagttgcgtctcttcctggcgacttcaagcaggaagaagtcggaggcgtgaaagaggaggccggaggccttcttcagtgtccagaagtcgctaaggcagatcggtggttagaagattccagacattgctgcagcactgctgatttcggcgaccttcctctcttaccccctacgtctagaaaggaagacctcgaggcagaggaagagtattcgtctctttgcgagttgctcggcagcccagagcagcggccaggaatgcaggaccccctgtcaccaaaggccccactgatctgcacaaaagaggaggtggaggaggttctggacagcaaggccggatgggggagtccatgtcaccttagtggtgagagcgtaatcttgctggggccaactgttggcaccgaatctaaggtgcagtcttggtttgagagctctctttcccatatgaaaccaggagaggagggcccagacggcgagagggccccaggagactcgacaacaagcgatgcttccctggcacagaagcccaataaacccgccgttcccgaggccccaatcgctaaaaaagaacctgtgccacgaggcaaatctttaaggagtcgaagggttcacagagggcttcccgaggctgaggacagcccctgccgggcaccagtcctgcccaaagatctcctgctgccggaatcatgtacgggtccgccacagggccaaatggagggggcaggtgcaccggggcgaggtgcttctgaaggactccccagaatgtgcacccgttccctgacggccctttccgagccccggacacccggtcctccaggcctgaccaccacaccggctccccctgacaaattggggggaaaacagcgggctgccttcaagtctgggaagagggtcggcaagccctcccctaaggcggccagttctccttcgaaccctgctgcattgccagtggccagcgattcctcgcccatgggctcaaagaccaaggagaccgactccccctcaacccctggcaaggatcaaaggtcaatgatcttgcgaagtaggaccaaaacacaggaaatctttcacagcaagcgccggagacctagcgagggccgtctgccgaactgccgggccactaaaaaactcctagacaacagccatctgcccgcaactttcaaggtctcctctagtccgcagaaggagggccgcgtgtcacagagagcaagagtgcccaaaccaggcgccgggtcaaaactgtcagaccgacccctccacgctctgaaacgcaagtctgcctttatggcccccgttccaactaagaagcgtaacttagtgttaaggagcagatcctcttcttcatccaatgcatctggcaatggtggagacgggaaggaggagagaccggaggggagtcccaccctattcaaaaggatgtcttcccccaagaaggcaaaaccaacaaaaggcaatggagaacctgctaccaaactgcctcctccagagactccagatgcttgcttaaagctggcttctagagccgcttttcagggcgcgatgaaaacaaaagtcttaccccctcggaaaggacggggcctgaaactagaggcaattgtccagaaaattactagccctagtctcaaaaagtttgcttgtaaagccccaggcgcttcgcctggcaaccctctgtctccctcgctgagcgataaagatcgtggtttgaagggagccggcgggtcccccgtcggagtggaagaaggtctcgtgaatgtgggtaccggccagaaacttcccaccagcggggctgatcctctgtgcaggaatccgaccaaccggtcattgaagggtaagctgatgaatagtaagaagctgagcagtaccgattgtttcaaaaccgaggctttcacatcacccgaggccctacagcctggtggcaccgcgcttgcccctaagaaacgctctcgaaagggccgagccggcgcccacggactgtctaagggacccttagaaaagcggccatacctaggtcccgccctcttgttgacacctagagatagagccagcggaacccagggtgcatctgaagataattccggtggtggcgggaaaaagcctaaaatggaagagctcggcctcgctagccaaccgccagaggggaggccatgccagccgcagactagggctcagaagcagcccggtcatactaattacagtagctacagcaagagaaaaagactgacaagagggcgagcgaagaacaccacatcatctccgtgcaagggtagagctaaacgccgaagacagcagcaagtgttgcccctggatcccgccgagcctgagataagactgaaatacatctcttcctgcaaaaggttacgctctgactcacggacacccgcctttagtcctttcgaaccatcactcggcgcccagaatcctagatcagggcagaatgccccacccgctcctgcagacgcccgtcccctttgcacaacccgtgatcgccgggcatatagtgcgagggagcaaggacagcgatag

SEQ ID NO: 219700 - DNA, 5589 bp, Artificial Sequence
  derived and/or modified sequence
atgcagagcttccgggagcggtgcggcttccacggcaagcagcagaactaccaacagactagtcaggaaactagtcgtctggagaactacaggcagcctagccaagccgggctctcatgcgatcgccagcggcttctggctaaagactactataacccacagccatacccttcatacgaaggcggagcaggaactccatccggaacagctgcagcagtggcagccgataaataccaccgcggtagtaaagcgctgccaacacagcagggactgcagggacgccccgctttccctgggtatggcgttcaggattctagcccttaccctgggagatatgccggggaggagagtttacaggcttggggcgccccccagcccccccctccacagccccagcctctgccagcgggggtcgctaaatacgatgagaaccttatgaaaaagaccgcagtacccccttcccgccaatacgctgaacagggggcgcaggtgccgttccggactcattcccttcacgtccaacagccacctcctccccaacagcctcttgcctatcccaagctccagaggcagaaactgcagaatgacatcgctagtcctctcccattccctcagggctggtgggctggtcacagctataaatcatgtactgctcctaccgcccagcctcatgataggcctctgaccgcaagctcctcgctagctcctggccagcgcgtccagaacctgcacgcatatcagagcggccggctctcttacgaccagcagcagcaacaacaacaacagcagcagcaacaacagcaggctctgcagagtagacaccatgcccaagagacactgcactatcaaaacctggccaagtaccagcattatggccagcagggacaggggtattgccagcctgatgcagccgtccgcacccctgaacagtactaccaaacgttctctccatccagttcccactcaccagctaggtcagtggggcgttctcccagttacagcagtacaccgtctcctctgatgcctaacctggagaacttcccctatagccaacagcccctgtccaccggcgcttttcccgcgggaattaccgaccatagccactttatgcccctcctgaacccgtcacccaccgatgcaactagttcagtggattctcttactgccttaaccagccaggtggaaaacattagcaacactgtgcagcagctgctcctgagcaaagctgcagttccacagaagaaaggtgtaaagaacctcgtctcccggactcccgagcagcataagagccagcattgttcaccagaaggttctggttatagtgcggagcctgccggcacgcccctaagcgagccaccgtcctccaccccacagtcgacacacgccgaacctcaggaagcagattacttgtcaggatctgaggacccactggagaggtccttcctgtattgcaatcaggccagagggagtccagctcgggtgaattctaatagcaaagctaaaccggagagtgtgtccacctgctcagttacatctcccgatgacatgagcactaaatctgacgattcatttcagagcttacacgggagcctgccactggactccttttccaagtttgttgccggagagagagactgcccccgactgctgctttccgcattggcgcaggaggacttggcatccgaaatccttggactccaagaggccatcggagagaaggccgacaaggcctgggctgaagctccttctctggtgaaggattcttctaagcctcctttctcactggaaaatcattctgcttgccttgacagtgtcgccaagagtgcttggcccaggcctggtgagccggaagctcttcctgactccctgcaattggacaaaggaggaaatgccaaggatttcagccccggcctgttcgaggacccttctgtagcgtttgctacccccgatccgaagaagaccacaggccctctctccttcggtactaaaccaacccttggggttcctgcgcctgaccctactaccgccgcattcgattgtttccctgatactaccgccgcaagctcagccgactcagcaaaccccttcgcttggcctgaggagaatctgggcgatgcatgccctaggtggggcctacatccaggagaactgaccaagggtctggaacagggaggaaaagcttctgacggcatctcgaagggcgatacccatgaagcctcagcctgtcttggttttcaggaagaagacccccccggcgagaaagtggcctccctgcctggggactttaaacaagaggaggtgggcggagtcaaagaggaagctggaggtcttctccaatgtcctgaagttgctaaggctgaccgatggctagaagatagcaggcactgctgctctacggctgacttcggtgatctacccctgttgccccctacatctcggaaggaggacctggaggcggaggaagaatactcttccctgtgtgaactcctaggcagtcctgaacagcggcccggaatgcaagatcccttgtctccgaaagcccctctgatatgcaccaaggaggaagtcgaggaggtgctggatagtaaagctggttggggctctccttgtcatttaagcggggagtccgttattctgctgggccctactgtgggaaccgagtccaaggtacagagctggtttgagagttccctgtcgcatatgaagcccggagaggagggacccgacggtgaaagggcacctggcgatagcaccacatccgacgcatcactcgcccagaaaccaaataagcctgcagtgccagaagccccaattgcaaaaaaggaaccagtgcctagaggcaagtcccttagatctagaagggtccacagaggcctgcccgaagcggaggattccccttgtcgagccccagtattacccaaggacctgcttctgccggagagttgcactggtccaccccagggccagatggaaggcgcgggcgctccaggtaggggtgctagtgagggactgccgagaatgtgcactcgctctctgacggcgctatcggagccccgaacccccggcccaccaggcctaaccaccactcccgcaccgccagacaaactgggcggtaagcagcgcgccgccttcaaatcaggtaaacgggtagggaaaccttccccaaaagcagcgtcgagtccaagtaacccagctgcgctacctgtagcttccgactcttcacctatgggcagtaagacaaaggaaacagatagtccttcgacaccaggtaaagaccagaggtctatgattctgcgctcacgcacaaaaacccaggaaatattccattctaaaagaaggaggccttcagagggaaggttgcctaactgcagggctacgaagaagttgctggacaactcccacctgcccgccactttcaaagtctccagcagcccccagaaggaaggtcgtgtgtcccagagggccagagtgccaaaacccggggctggcagtaaactcagcgaccggcctctgcacgctctgaagcgaaagagcgctttcatggcgcccgttcccacaaagaagcgaaacttggtcctgcggtccagatctagcagcagctcaaacgccagtggcaatgggggggacggtaaggaagagcggccagaggggtcccctacactattcaagcgaatgagcagccctaagaaagcgaaaccaacgaaaggcaatggagagcccgcaacaaagctcccccctcctgagacccctgacgcatgtttgaaattagcttccagagcagccttccagggagctatgaaaactaaggtcctccctcctcggaaggggaggggcctcaagcttgaggccattgtgcaaaagataacatccccaagtcttaagaaattcgcttgtaaagcacccggcgcctcacctgggaaccccctgtctccatcactgtccgataaagataggggcctcaaaggcgctgggggatcaccagtgggggttgaggaagggctggttaacgtgggaaccggtcagaagttacctacatcgggagccgatcctctgtgcagaaaccctactaataggtcattgaaaggcaaactcatgaataaccgggctagtggtacacagggggccagcgaggacaatagcgggggaggcggaaaaaaacctaagatggaagagttgggcctcgccagccagccaccagagggcaggccttgccagccacaaacaagggcacaaaaacagccaggacacacaaattactcaagctactccaagaggaagcgcttgaccagggggcgggcaaaaaatacgacttctagcccctgcaagggccgggcgaagagaagaagacagcagcaagtgctgcctctggacccagcggaaccggagatccgtctcaaatacattagctcatgtaagagacttaggtcggattcccgtacgccagctttttcacccttcgtgagggtggaaaaaagggatgcattcaccactatatgcacagtcgtaaactcacccggtgacgcacctaaaccgcatcgaaagccttcaagcagtgcatccagtagttcttcttcgtcttcgttctctctggatgccgccggagccagcctggccactctgccaggcggctccattctccagcctagaccctctttgcctttgtcctctaccatgcaccttggtcccgttgtctctaaggccctcagtaccagctgtctcgtctgttgcctctgtcaaaatcccgccaattttaaagatctcggtgatctctgcggcccttattatccggaacactgtttgcccaagaagaagcctaaactcaaagagaaggtaaggcccgagggcacctgcgaggaggccagccttccactggaaagaactctcaaagggccagagtgcgccgccgccgccacagccggcaaacccccgaggcctgacgggcccgcagacccagctaagcaaggacccctgcgaacttcggcccgcgggctgagccggcgacttcagtcttgttactgctgcgatgggcgggaggacggtggcgaagaagccgccccagccgacaagggacattgggtccacgaagcttgcgccgtgtggactggaggcgtgtatctggtggctggcaagctctttgggctgcaggaggcaatgaaggtcgccgtcgatatgcatggcggtacggtagccttggcccccggcgacttctctctgcctggactcagattcgcctccttattccaaggcccaagctggtgcgattgtccagtactcgccacctccacaccaagctcctggagcagatgcgtaccagctgcgaaaaagccaggcccccctctgggtgctgccacaaaagatgctagcacacccaccacaactcgcgttcctgctatgcaggtgagagctcggccaggaactggaggacactggagtccatcaaagcagagccgcgggacactccccggccacagctcccccaacccagggccaatctccctgttttcctttcctccactgctgccacagcaatttttttatccttctgtttgcttggacctctgctgggccatgcctggcacctggaaatag

SEQ ID NO: 219701 - DNA, 5721 bp, Artificial Sequence
  derived and/or modified sequence
atgcagagcttccgggagcggtgcggcttccacggcaagcagcagaactatcagcagacctcccaagaaacgagcagactggagaactaccgtcagccaagccaggccggattgtcttgcgatcgccagagactgctggcgaaggattattataatcctcagccctatccatcttatgaagggggcgcggggactccaagtgggacagccgcagccgtggccgctgacaagtatcataggggttcgaaggcgctcccgacccaacagggacttcagggcagacccgcttttcctggatatggagtgcaagattcttccccttatccagggcgctacgctggcgaggagtcacttcaggcctggggagccccacaacctccaccccctcagcctcagccattgcctgcgggggtggcaaaatatgacgaaaatctcatgaagaagaccgcggtgccacccagtaggcaatacgccgaacagggcgcccaggttcctttccggacacactcccttcacgtacagcaacctccgcccccgcaacaacccctcgcctacccaaagctgcaacggcagaagctgcagaacgatattgcaagccctttgccctttccacagggcacacatttcccacagcactcccagtcgttccccacgtcttcaacatactcttcaagtgtgcagggtggaggtcaaggggcacactcgtataaaagctgcacggccccgactgcccaacctcacgatcggcctctgacggcctctagtagcctggctccagggcagcgcgtccaaaacctacacgcctatcagagtggccgcctgagctatgatcagcagcagcagcagcagcagcagcagcaacaacaacagcaggcccttcaatcccgacaccacgcccaggagaccctgcattatcagaatcttgccaagtatcagcattatggacagcagggacaggggtattgccagcccgacgctgcagtgagaacgccagaacagtactaccagactttcagtccatcaagcagccacagcccggcaaggagcgtgggacgaagtccaagctacagttccacaccaagcccattgatgccaaatctggagaactttccctattctcaacagcctctatccaccggcgccttccctgccgggataacggaccactctcactttatgcccctgctcaatccttccccaactgacgctactagcagcgtcgacactcaggcggggaattgcaaaccattgcagaaggataaactgcccgaaaacctgctgagcgatctgagcctgcagagccttactgccttgacttcccaagtggaaaatatttcaaacaccgtgcaacaactcctcctgagtaaagcggcagtgccacagaaaaagggcgtcaagaatttggtcagtcgcacgcctgagcagcacaagtctcagcactgcagcccagagggaagtggctactcagccgagcctgcgggcacaccacttagtgaaccgccttcctctaccccacagtctacccacgctgaaccacaggaggcggactacctgagtggttccgaggatccccttgagcggtccttcttgtactgtaaccaagccagagggagccctgctcgtgtgaactcgaactccaaggccaaacctgaatccgtgagtacatgcagtgtgacgtctcccgacgatatgtcaacaaagtcagatgactctttccagtccctgcatggtagcctgcctctagacagtttcagcaaattcgtggctggagagcgcgattgtccaaggttgcttctctcagccttggcgcaggaagatctggccagtgagatccttggactacaagaagcaatcggggaaaaagctgataaggcctgggctgaagccccgtctctcgtaaaagactcctctaaacctcctttctcactggagaaccactcagcgtgtctggatagtgtcgctaagtctgcctggccacgtcccggagagccagaggccctcccagatagtttacagctggataagggcggcaacgccaaagatttttctcctgggttgttcgaggacccatcggtcgcctttgccactcccgaccctaaaaaaactacaggccccttgtcttttgggaccaagcccactctcggtgtacccgccccagatccgaccaccgctgccttcgactgttttccggacaccacggcagcttcatccgcagacagcgcaaatccatttgcgtggcctgaggaaaatctgggtgacgcgtgtccaagatggggtctacatcccggagagctcaccaaggggttggaacaggggggcaaggcatcagacggcatttctaagggagacacccatgaggcttctgcttgcctcgggtttcaagaagaggatccgccaggagagaaggtggccagccttccaggggatttcaaacaggaagaggtcgggggggttaaagaggaagctggcggactgctccaatgccctgaagtcgctaaagccgacagatggttagaggacagcagacactgctgctctactgcagattttggagacctgcctttactccctccaacctctcggaaagaagacctcgaagcagaagaggagtactcaagtttgtgcgaactgctgggctccccagagcagaggccaggaatgcaggatcccttaagccccaaggcgccactcatatgcaccaaggaggaagtggaagaggtgctcgactccaaggcaggttgggggagtccttgtcacttgagtggcgagtccgtgattctcctgggtccaacagttgggacggagagcaaggttcagtcttggtttgaatcatcgctgtcacatatgaagcccggtgaggaggggcctgacggagaaagagcccctggcgattctaccacgagcgacgcgagcttggcgcagaaacccaataaacccgcggttccggaggccccaattgctaagaaagaaccagtaccaaggggaaagtctctgaggagcaggcgcgtgcatagaggcctgccggaggctgaggacagtccatgccgggctccggttcttcccaaagacctgcttctcccagagtcttgtacgggtcctccccagggccagatggagggagccggcgcacccggacggggcgcctccgagggcctaccccggatgtgtacccgatccctgaccgcgctgagcgagccccgtacgcccggtccccctggtctaaccaccacgccggccccaccagataagctgggcggtaaacagagggcggcattcaagtccggaaaaagagttggaaagccctcccctaaggcggcctccagtccatccaatcctgctgctctccctgtggcatctgacagttcacctatgggcagcaagaccaaagagaccgactccccctcgacccccggaaaggaccaacggagcatgattcttcggtcacgaaccaagacacaggaaatcttccattcaaagagaaggcgcccctcagaggggaggcttcctaactgcagagcaactaagaaactcttggacaactctcatcttcccgccacttttaaagtttcctcttcgccccagaaagaaggacgggtgtctcagagggcacgggtgccgaagcccggggccggttccaaacttagcgataggcccctacatgccctaaaacgaaaatccgcatttatggcccccgttcctaccaaaaagagaaatctggtgctgaggtccaggagctccagtagctccaacgcctcagggaacggtggggatgggaaagaggaaaggcccgagggctctcccaccctgttcaagcgcatgtcttcccctaagaaggcgaaacctactaaaggcaacggcgaacctgccaccaaactcccgccgccggagacccctgacgcctgcttgaaactggcctctcgggcagcctttcaaggtgcaatgaagaccaaagtcctgccgcctaggaagggacggggccttaagctggaggcgattgttcagaagatcacctccccaagcctgaagaaattcgcttgcaaggcccccggggcaagcccggggaaccctcttagcccctccctgagtgacaaagatcgaggtcttaaaggtgccggaggatcccctgtaggggtggaagaaggcctggtgaatgtgggaacgggacagaagttgcctactagtggtgccgatccattgtgcaggaatcccacgaaccgctctctcaagggaaaactcatgaattccaagaagctctccagcacggactgtttcaagacagaagccttcacttcacctgaagcgttacaacctggggggaccgccctcgctcctaaaaagagatccagaaaaggtcgagccggggctcacggtcttagtaagggtccattggaaaaacgtccatacctcggccccgccctacttttaactcctcgggatagggcaagtggaactcagggcgcaagcgaagataatagcggtgggggagggaaaaaaccaaaaatggaggaactaggactggcttcccaaccgcctgaggggaggccctgtcaaccgcaaacgcgggcccagaaacagcccggacataccaactatagcagttacagcaagcggaagcgcctcaccaggggacgagctaagaacactacttccagcccttgcaagggtcgggctaaacggcgacgacagcagcaggtgcttccgctggaccctgctgagcctgagataagactcaaatacatttcaagctgcaagcggctgcgatctgactccaggacccccgcgtttagcccattcgtgcgcgtcgagaagcgtgatgctttcaccactatttgcacggttgtgaactccccaggcgacgcaccaaaaccccaccgaaagccctcatctagcgcatcgtcatcgtcctcaagtagcagcttctccctggatgcagccggcgcctcgctcgccaccctaccaggtggatccatcctgcaaccgcggccctcactgcctctgagctctacaatgcacctcggtcccgtggtgagtaaagccctcagcacctcatgtcttgtttgctgtctgtgtcaaaaccccgccaatttcaaagaccttggtgacctgtgcggtccttattatccggagcattgtctgcccaaaaagaaacccaaactgaaggaaaaggtcagaccggaggggacttgcgaagaagcatccctgcctctagagcgaacactgaaggggcccgagtgcgctgccgcagcaacagccggaaaacctccacgccccgacggcccagccgatcccgcgaaacagggacccttacgcacatctgcacgcggtctttctcggcggcttcagtcctgttactgttgcgatggcagggaagatggaggcgaggaagcggccccggccgacaaagggaggaagcatgagtgtagtaaggaagctcccgctgaacctggcggagaagcccaggaacactgggtacacgaagcctgtgcagtgtggaccggtggagtttacctggttgccgggaaactgtttggactgcaagaggcgatgaaggtcgctgtggatatgatgtgttctagttgtcaagaagccggagctacaatcgggtgctgccacaaaggttgtctgcatacctaccattatccctgcgccagcgacgctgggtgtatttttatcgaggagaacttctccttaaaatgccccaagcacaaacggttgccctag

SEQ ID NO: 219702 - DNA, 2901 bp, Artificial Sequence
  derived and/or modified sequence
atgcagagcttccgggagcggtgcggcttccacggcaagcagcagaactaccagcagaccagccaggaaaccagtagactcgaaaactatagacaacctagccaagcaggactcagttgcgaccgccagagattgctcgctaaggattattataacccgcagccgtaccccagctatgaggggggcgccggaacgccaagtggcaccgcagctgcagtagccgcagataaataccacagaggcagtaaggcattacctacccaacaggggctccagggccgccctgcatttcctgggtacggagtccaggatagctccccctatccagggagatacgcaggggaagaaagcctccaggcatggggggcacctcagccccctcctccccagccccagcccttgccagccggcgtagcgaagtacgatgaaaaccttatgaaaaagacggcagttcccccatctcggcagtacgccgagcagggcgctcaagtgccattccggacgcattctctccacgtgcagcagcccccccccccgcaacaaccactggcatatcccaaactccaaagacagaagctccaaaatgacatcgcaagcccactgcccttccctcaggggactcacttcccccaacactcccagagctttcctactagctccacttattccagttctgtccagggtgggggacagggcgcccacagttataagtcgtgcactgctcctactgctcagcctcacgaccgccctctgactgccagttcctctttggcacccggtcagcgtgtacagaacttacacgcctaccagagcggcaggttgtcctatgatcagcagcagcagcagcagcagcagcagcagcagcaacagcaggctctacaaagccgtcaccatgcccaggagaccctgcactaccagaacctggctaagtaccaacattacggccaacagggacagggatactgtcaaccggatgcagccgtgaggaccccggagcagtattatcagaccttcagcccatcatcctcacattcccctgctaggtctgtgggccggtcaccatcatattcttctacaccttccccattgatgcccaatttagagaactttccctactcccagcagccactctctaccggggctttcccggccggaatcacagatcattcacattttatgccactcctaaatccatccccgactgacgcaacatctagtgtcgatacccaggccggaaattgcaaaccccttcagaaagacaagcttccagaaaatctgcttagtgatctgtctcttcagagccttaccgcactgacaagccaggttgagaatatatcaaacaccgtccaacagcttctcctctcaaaggcagccgtccctcagaagaaaggggtgaaaaatctggtgtctagaacacccgagcagcataagtctcagcactgtagtcctgaagggagtggctactcagcagaacctgcagggacaccgctaagcgaaccgccttcaagcacccctcaaagtacacacgccgagccccaagaggccgactacttaagcggctctgaggatccattggagaggtctttcctgtactgcaatcaagctagggggtcccctgcacgtgtcaattctaattcgaaggccaaacctgaaagcgtgtcgacatgttccgtcacttcccccgacgatatgtctaccaagtctgacgactcttttcaaagcctacatggctcccttccccttgattcttttagcaaattcgtcgctggggagcgtgattgcccacggcttttgctgtcagctctcgctcaagaagatcttgccagcgagatcctgggactacaggaggctataggggagaaggccgataaggcctgggcagaagcaccatcccttgtcaaagactcttccaagccgccctttagcctcgagaaccactctgcttgtctagacagcgttgctaagtctgcctggcctcggccaggcgagcccgaggctctgccggactccctccaactggacaaaggggggaatgccaaggatttcagccctggtctgtttgaggatccctccgttgccttcgcaacacccgaccccaagaagactaccggccccttgagcttcggtacaaagcctaccctgggcgtccccgccccagatccaaccaccgccgcttttgactgctttccagacacgaccgccgctagttctgccgactccgccaatccgttcgcttggcctgaggaaaatcttggtgacgcttgccctcggtggggcctgcatcccggggaactgacgaagggcctagaacaggggggtaaagctagtgacggaattagcaagggggacactcacgaggccagtgcatgtctcggattccaggaggaggatccgcccggggaaaaggtggcctctctcccaggggactttaaacaggaggaagtaggtggtgtgaaagaagaggctggcggactgcttcagtgtcccgaggtggctaaggcggacaggtggctggaagacagtcgccactgctgctctactgccgatttcggcgatctcccactgctaccccctacttctcggaaggaagacctggaggccgaagaagaatattctagtctttgtgagcttcttggctctcctgagcagcgccccggaatgcaggaccccctctcaccaaaggcccccctcatctgcacaaaagaggaggtcgaggaggtgctggactcaaaagcaggatgggggtctccttgtcacctctccggcgagtctgtgatcctcctcggtcccacagtgggtacagaatctaaggttcaatcgtggtttgaagccagtctatacagcgtttatatttgcatccacatccatatctataatatttatgaggattgcaagtgttag

SEQ ID NO: 219703 - DNA, 2829 bp, Artificial Sequence
  derived and/or modified sequence
atgcagagcttccgggagcggtgcggcttccacggcaagcagcagaactaccaacagacctcacaggagacatctcgattggagaattaccggcagcccagtcaggccggcctgagctgcgaccgacagcgccttttggccaaagattattacaatccccagccatacccctcttacgagggtggtgccggcactccctccgggaccgctgcggccgtggccgccgacaagtaccatagaggctctaaggccctccccactcagcagggtctccaaggccgacccgcattccctggttacggcgtgcaagatagctcgccttaccctggccgctacgccggagaagagagtttgcaggcgtggggtgccccgcaaccacctccccctcaacctcaaccactccccgcgggcgtggccaaatacgacgagaatctgatgaaaaagactgccgtgcctccctcacggcagtatgcagaacaaggcgcacaggtaccgttccgaactcattcgttgcacgtccaacagcctccacctccacagcagcctctagcttaccccaaactccagaggcaaaagcttcaaaacgacatcgcctctcccctcccctttcctcagggcacccactttccacaacattcgcaaagcttcccaacaagctccacctatagctcgtcagtccagggcgggggccagggagcccactcctataaatcctgtaccgcgccaaccgcccagccccatgacaggccgttgaccgcatctagttccttagcaccaggtcagagggtccagaatctgcatgcctatcagagtggcaggttgtcatacgaccaacagcagcagcaacagcaacagcaacagcagcagcagcaggcccttcagagcaggcaccacgctcaggagactctgcattaccagaatctcgctaagtatcaacactacgggcagcaaggccagggttactgccagccggacgctgccgtgaggacacccgaacagtactaccaaactttctccccatcttcatcccactcacccgccagatccgtgggcagaagcccctcatacagttcgaccccttcccccttgatgccaaacctggagaatttcccctactctcagcaaccattaagcacgggggcattccctgccggtatcaccgaccactcacatttcatgccactcctcaatcccagccctactgacgctactagttctgtcgacacccaggccggtaactgtaagcccctccaaaaggataagctacccgaaaacctgttatccgacctaagcctacagtcactgacagcactaacttctcaggtggaaaatatttccaacacagtccagcagctgctgttgagcaaagcggccgtccctcagaaaaagggagtgaagaacctggtttcaaggaccccggaacagcacaagtcccagcactgttcccctgagggcagtggttactccgccgaaccagctggcaccccgctcagcgaacctccaagcagcaccccacagtctactcacgcagaaccgcaagaagcagactacctgtctggtagtgaggatcccttggaaagatctttcctgtattgcaatcaggctcgtgggtcccctgctcgagtgaacagtaactccaaggccaaacccgagtctgtttcaacatgctccgtgacttcgccagacgacatgtcaaccaagagtgatgatagttttcagtcacttcatggctctttgccattagactcattttccaaatttgtggcaggggaaagagactgcccccgtctgctgctttccgctctagcccaggaagacttggcttctgaaatcctgggattgcaggaagccatcggggagaaagctgataaggcatgggcggaggctccaagtctcgtcaaagacagctcaaaacctcctttctctctggagaaccacagcgcctgcttggactctgtcgcgaagtccgcttggcctcgcccaggagaacccgaagcactacccgatagcctgcaactcgacaaaggcggcaatgccaaagatttctctcctggcctgtttgaagaccctagcgtggccttcgcaacgcccgatcctaagaagacaactggtccgctttcttttgggaccaagccgacactcggtgtgccagcccccgatcccacaactgccgccttcgattgcttccccgacacaacagccgcctcctcagccgatagtgcaaatccattcgcttggcctgaggagaacctgggcgacgcatgtccacgctggggcctgcatcctggcgagttaacaaaaggccttgagcaagggggtaaggcaagtgacgggatcagtaaaggcgacactcatgaagctagcgcttgtctggggttccaagaagaggatccaccgggcgagaaggtcgccagtcttccaggggatttcaaacaggaagaggttggaggcgtcaaggaagaagccggaggactgctccagtgtcccgaagtggccaaggctgatcggtggctcgaagacagtcgtcactgctgttctacagcagattttggcgatttaccccttttgcccccgaccagccgcaaggaggatctagaagccgaggaagaatacagcagtctgtgcgagttacttggtagccccgagcagcgcccagggatgcaagatccccttagccccaaggcccccctcatatgtacaaaagaggaagttgaagaggttctggacagcaaagcaggatgggggagcccttgtcacctctccggggagtcagttatactgcttggtcccacagtgggtactgaaagcaaggtgcagagttggttttag

SEQ ID NO: 219704 - DNA, 5982 bp, Artificial Sequence
  derived and/or modified sequence
atgcagagcttccgggagcggtgcggcttccacggcaagcagcagaactatcagcagacctctcaagagacttcaaggcttgagaattatcgacagccctcccaggctgggctgagctgtgaccgccagcggttgctcgccaaggattattacaatcctcaaccctatccctcgtatgaagggggcgctggtacaccctctggaactgccgcggccgtggcagcagacaaataccaccggggttcaaaagccctgcccacccagcaggggttgcagggccgccctgcattccccggatacggcgtgcaggattcctcaccatatcccggacggtacgcaggcgaggagagtcttcaagcttggggagcaccccagccgccacctcctcagccgcagcccctcccagccggcgtggctaaatacgacgaaaatctcatgaagaagaccgctgttccgccctcacggcagtatgcggaacaaggcgcccaggtgccattcagaactcactccctccacgttcagcagcctcctcctcctcagcaacctctggcatatccgaagctacagaggcaaaagctgcagaacgacatcgccagcccactaccattccctcagggcacccattttcctcagcattcacaaagttttcccacgtccagcacgtatagttcctccgtccagggaggtggccagggggcacacagttacaaaagttgtaccgcaccaaccgcacagccccacgatcggcctctgactgcaagctccagtcttgctcctgggcaaagagtccagaacctacacgcttaccagagcggcagactgtcatacgatcagcagcaacagcagcaacagcagcagcagcagcagcagcaagccctgcaaagcaggcatcatgcccaggaaacccttcattatcaaaacctcgccaagtaccagcattacggccagcaaggacagggctactgtcagcctgatgccgccgtgcgcactcccgagcagtattaccagactttctccccctccagctcacacagtcctgctagatctgttggaagatccccttcttattctagcactcctagccccttgatgccgaacttagagaatttcccctatagccagcagccactcagcaccggggcgttcccagccgggatcaccgatcactcccattttatgcccttgctgaacccaagcccaactgatgcaacaagttctgtggatacgcaggctggcaattgtaaacctctccagaaagataaattgccagagaacctgctcagtgacctcagcctgcaaagcctcaccgctttgacatctcaggttgagaacatctccaacacagtgcagcagctgctgctgagtaaggccgccgtgcctcaaaagaagggggtgaagaacctcgtgtcccgaacccccgagcagcacaagagccaacattgcagtccagaaggctccggctatagcgcagagcctgcgggcacgcctttgtcagagccaccctcttcgacacctcagtcaacgcacgccgaaccccaggaggcagattatctgtccggctctgaagacccattggaacgatcattcttgtattgcaatcaggctaggggctcccccgcccgggtgaattcgaacagtaaggccaaacccgaatctgtctccacatgtagcgtgacttcaccggacgacatgtctactaaatctgatgacagcttccaatccctccatggctcgctgcctctcgactctttctcaaagtttgtggccggggaaagagactgtcctcgtctcctgctatccgctctggcacaggaagacctggcctctgaaatcctcggattgcaggaagccattggtgagaaagctgataaggcctgggcggaagctccctcactagtgaaggattcttcaaagccccctttttctctggaaaaccattccgcctgtctggactccgttgctaaatctgcctggcccaggcccggcgagcctgaggctcttccagacagcctccagttggacaaagggggcaacgctaaggacttctcacccgggctcttcgaagacccttccgtggccttcgcgactcccgatccgaagaagacaactggccctcttagtttcggaactaagccaactttaggcgttcctgcaccagatccaaccactgctgctttcgattgttttccagacactaccgctgctagttccgccgattcagccaatccttttgcctggcctgaggagaatttaggcgacgcatgccctcgatggggtctgcaccctggtgaactgactaagggactggagcagggtgggaaggcgtctgacggtatctctaaaggagacactcacgaggccagcgcatgcctcggttttcaagaagaggaccctcccggtgagaaagttgcctctctaccaggtgactttaaacaggaagaagtcgggggggttaaagaggaggctggcggtctgctgcagtgcccagaagtcgccaaagccgatcgctggcttgaggattctcgtcattgctgttccaccgcggatttcggcgacctacctttgttgccacctacgagtaggaaggaagacctcgaagcagaggaggaatatagtagcctctgcgagctgcttggatctcccgaacagcggcccggtatgcaggatcccctgagccctaaagcccccctgatctgcactaaggaggaggttgaggaagtactcgatagcaaggctggctggggaagcccatgccatctctcgggtgagagtgtcatactgcttggaccaacagtcggaacggaaagcaaagtgcagtcctggtttgaaagcagcttgagccatatgaaacccggcgaggagggacccgacggcgaaagagcacctggggatagcactacttccgatgcaagcttggctcagaaaccaaataaacccgccgtccccgaggctcccatcgctaaaaaagagccggtccctaggggcaaatccctgcgtagtcgccgcgtccatagggggttacccgaggccgaggactccccctgccgcgcacctgtactcccaaaagacctcttactgccggagtcttgtacagggcccccccaaggccagatggagggggcaggcgctcctggccggggggcaagtgagggactgcctaggatgtgcacgaggtccttgacagccctgtcagaaccccggacgccaggaccacctggccttacaaccactcccgcccccccggacaagctgggggggaagcagcgagcagcttttaaatcaggcaagcgcgttggcaagccatccccaaaagccgcctcaagcccgtcgaacccagctgccttaccagtggcctcagattccagccctatggggtctaagaccaaggaaaccgactctccctccaccccaggtaaggatcagcgctctatgatcctgcggagtcgcaccaaaacgcaggagatttttcatagcaaacggaggaggccaagcgaggggaggctgcccaactgtcgggccacaaaaaaactactggataacagtcacctccccgccaccttcaaggtctcttcctctccacaaaaagagggaagagtctctcagcgcgctcgtgtacctaaaccgggcgcagggagtaaactctccgacagacctctccacgccctaaaaagaaaatcagcattcatggcgcccgtgcccactaagaaaaggaacctggtgctgcggagccgcagctcgtccagcagtaacgcatccgggaatggcggggacggcaaagaagaaagacctgaaggctcaccaaccctgttcaagcggatgtcctcaccaaagaaagctaagccaacaaagggaaatggtgagcctgctaccaagctgcctccccctgagaccccggacgcatgcctgaaattggccagcagggctgctttccagggcgctatgaaaacaaaagtcttaccacctcgtaagggccgaggcttaaaactcgaggctatcgtgcagaaaattaccagcccatctttgaagaaatttgcctgtaaggcgccgggcgccagtcccggtaaccccctcagtccgtcactctctgacaaagataggggcctcaagggagcagggggctcgcccgtgggtgttgaagagggccttgttaatgtcggcaccggccagaagctgccaacctcaggggcagatcctctgtgtcgtaatcctaccaataggagcctgaaaggcaaacttatgaactcgaaaaaattgtcaagtacggactgttttaaaaccgaagcgtttaccagtcctgaggctttgcagccagggggcactgccctagctccaaagaagcgtagccgcaaagggagagctggagcccatgggctatccaagggccctctcgagaaaaggccatatctcggcccagctctcctcctaaccccccgggaccgtgctagcggtacgcagggggcgtcagaagacaattcgggcggcggtggtaagaagcctaagatggaagaactgggactggcaagccagcccccggagggccggccctgtcaaccacagacgagagcccagaaacagcctggtcacaccaactacagctcctatagtaagagaaagaggctcacccggggacgggcaaagaacaccacatcctccccctgcaagggcagagccaagaggcggaggcaacagcaagttttgcccttagaccctgccgagcctgaaatcagactcaaatatatctcctcctgtaaacgccttcgaagcgactccaggacccccgctttctctcctttcgtaagggtcgaaaagagagatgccttcacaaccatctgcacagtggttaatagtcctggggatgctccaaagcctcaccgaaagcctagcagttctgctagctctagttccagcagcagcagcttttccctagatgctgccggagcttcactggcaacactccctggcgggagcattctgcagcctaggccttccctgccactgagctcaacgatgcatctgggccctgtggtctctaaggccctgtcgacgagctgtctcgtgtgttgcctgtgtcagaaccctgctaacttcaaagatctcggtgacctttgtgggccatattaccctgagcactgtctgccaaagaaaaagcctaagctgaaagagaaagtacgccctgagggaacgtgcgaagaggcctcgctgccattggagcgcactctgaaggggcctgagtgtgccgccgctgccaccgccgggaagccccctcgacccgatggaccagcagaccccgctaaacagggcccccttcggacctccgctaggggactatcgcgtcgcctgcaatcatgctactgctgcgatggaagggaagatggaggcgaagaagccgcccctgcagataaaggaagaaagcatgagtgtagtaaagaagcgcccgccgaaccggggggagaagcccaggagcattgggtacatgaggcctgtgccgtatggaccggaggtgtatatctcgttgccggcaaactctttggacttcaggaggccatgaaggttgcagtggacatgcatggtggcaccgtcgccctggctcctggggatttttcgctcccagggctgcggttcgctagcctcttccagggcccctcttggtgcgattgcccagtgctggccacttctactcccagctcatggtcaagatgcgtaccagccgccaaaaaacccggtccccccctgggagccgctacaaaagacgcgtcaactccaaccacaacacgggttccggctatgcaggttcgcgcccggcctgggaccggaggccactggtctccgtccaaacagagtcgcggaacattgccaggacactcttcccccaatcccggtcctatatccctgtttagcttccccccccttttgccccaacaattcttttacccgagtgtgtgtcttgacctttgttgggctatgccaggaacgtggaagtag

SEQ ID NO: 219705 - DNA, 4923 bp, Artificial Sequence
  derived and/or modified sequence
atgcagagctttagagagaggtgcggattccacggaaaacagcagaattaccagcagactagccaagaaacgtccaggctggagaactacaggcagccctcgcaagccggtctttcgtgcgaccggcagcggctactggcaaaggattattacaaccctcagccctaccctagctacgagggcggagccggaactccatctggcaccgccgctgccgtggccgcagacaaatatcacagggggtctaaggctcttcccacccaacaagggctgcaaggtcgccctgcttttcccggttacggggtccaggatagctctccctatccaggacgctacgcaggagaagagtcactgcaggcttggggagccccacagcccccacccccacagccacaacccctgcccgcaggagtggcgaaatatgacgagaatctcatgaaaaaaactgcggttcctccatccaggcagtacgcagaacagggagctcaagtgccctttaggacacactctctacatgttcagcaaccacctccaccacagcagcctttggcatatcccaaactgcaacggcaaaagctgcagaacgatatcgcatcccccctgccttttccacaggggacccatttcccccaacattctcagtctttccccacctcttcgacatattcatctagtgttcagggcggaggtcagggggctcatagctacaaatcttgcacggcccctaccgcccaaccccatgatcggccattgacagcgtcatctagtctcgcgccaggacagcgcgtccagaacctccatgcttaccagagcggtcgactctcgtacgaccagcaacagcagcagcaacagcagcagcaacagcagcagcaggctttgcagagcaggcatcatgcccaagaaacactccactaccagaatctggccaagtaccagcactacgggcagcaggggcaaggctattgtcagcccgacgctgccgtcaggacacctgagcagtattaccagacattctccccctcctcctcacacagcccagcacggagcgtgggaagatcaccaagctatagctcaacccccagccctcttatgccaaatctggagaattttccatattcgcagcagcccctatccactggagctttccccgcaggtattaccgatcacagtcatttcatgcccctgttgaatcccagccccactgatgctaccagttccgtcgacacacaagccggaaattgcaaacccctgcagaaagataagttgccagaaaatctccttagtgacctctctctacaaagcctgaccgccctgacgagccaggtggagaatattagtaatactgtgcagcagctgcttctgagcaaggccgcagtgcctcagaagaagggtgtcaagaacctagtctcacgcacacccgaacaacataaaagccagcactgcagccccgaaggaagcggctattctgcagaaccggctggaaccccactgtctgagccgccatcttccactccccagagcactcacgcagaacctcaggaagccgactatttaagcggctctgaagaccctctggagaggtcctttctctactgcaaccaagccagaggaagtcctgctagggtgaacagtaattcaaaggccaagccggaaagtgtatcaacatgtagcgtgactagcccagacgacatgtctaccaagtccgatgacagtttccagtctttacatggctctcttcccttggactcatttagtaagtttgtggcaggcgaacgggactgtccacgtttactcctgagcgccctagcccaagaggatctcgcttcggagattttagggctgcaggaagcaatcggagagaaggcagataaggcctgggccgaggctccatcactggtaaaagatagttcaaaaccaccttttagtctggaaaaccacagcgcttgtcttgattcggtcgctaagtccgcctggcctaggccaggggagcctgaggctctgcccgacagcctccagctggataaaggcggtaatgccaaagacttctcgcctggcctgtttgaggatccttccgtggcttttgcgacgcctgatccgaaaaagaccaccggtccactgtccttcgggacaaaacctaccctgggtgttcccgctccagatcctaccaccgccgcattcgattgtttccctgatacaacggctgcttccagtgcagactctgccaaccctttcgcttggccagaagagaacctgggagatgcgtgccctaggtggggattacaccccggagaacttaccaaggggctcgaacaaggcggtaaggcatcagatggtatatctaaaggagacacgcatgaggcatctgcctgcctgggattccaggaggaggatcctccaggggaaaaagtcgcttctcttcctggagacttcaagcaagaggaagtggggggtgtcaaagaggaagcaggcggtctgctgcaatgccccgaggtggccaaagccgacaggtggctggaggattctaggcattgctgctctacagccgacttcggggacctcccattactcccacctacaagccgtaaagaagacttagaagccgaggaggagtattcatccctgtgtgaactcctggggtctcctgaacaacgccctgggatgcaggaccctctgtcccccaaagcccctcttatctgtacaaaggaagaagtcgaggaggtgttggattctaaggcgggatggggatcaccctgccacctgagcggcgagtcagtaatactcctgggaccaaccgtcggaaccgagtcgaaggtccaatcttggttcgaatccagcctgagccacatgaagcccggagaagaagggccagatggagaacgcgctcccggagattccaccacaagcgacgctagcctcgctcaaaaacctaacaaaccagccgtgccggaagcgcctatagccaagaaagagccagtgccaagggggaaatccctgaggtccaggcgagtgcacaggggcctgccagaggctgaagatagcccttgcagggcgccagttctcccaaaagacctactgcttccggagagttgtaccggccctccacagggacaaatggagggagctggcgcacctggaaggggggcttccgagggacttccgagaatgtgtaccaggtctctgacagctctttctgaacctcgaacccccggaccacccggactgactactacacccgctccacctgacaaactggggggaaagcagagagccgctttcaaaagcggcaagcgtgtggggaaaccctcgccgaaggcggcaagcagccctagcaaccctgcagcgttacctgtggcgtcagattcctcccccatgggatcgaaaacaaaggagactgactcaccatctacccctggaaaagaccaacgctctatgattctgcgctccagaactaagactcaggagattttccacagcaagaggagaaggcccagcgaaggccgactgcccaactgcagggctacaaagaaactgctcgacaactcacatttgcccgctaccttcaaagtctcctctagcccacagaaagaagggagggtgagtcagcgggctcgcgtacctaagcccggagcgggatctaaactgagtgatcggcctctgcatgctcttaagcgcaagagtgcctttatggcacccgtccccactaagaaacgaaacctggtattaaggtcgaggagctcgagctcaagcaacgcgtccggaaatggcggagacggaaaagaggaacggcctgagggcagcccaacactgttcaaacgaatgtcctcacctaagaaggccaaacccacaaagggtaatggggaacccgcaaccaagctgccccctcctgagacccccgacgcctgcctgaaactcgcgagccgagcagcatttcagggagcaatgaagacaaaggtgctacctcctcggaagggacgtggattaaaactcgaagccatagtgcagaaaattaccagcccgtccctgaaaaaatttgcttgcaaggcacccggtgccagcccaggcaatcctcttagtcctagcctttctgataaggataggggcctaaaaggagccggaggatcccctgtcggagtggaagaggggctcgttaacgtgggtaccggacagaaactcccgaccagcggagcagaccccctgtgtcggaatccgacaaatcgcagccttaaaggaaagctgatgaactctaagaaattaagttccaccgattgctttaaaaccgaagccttcacaagcccagaagcgctccagcccggtggcacggcgctggctcctaagaagaggagtcgcaaagggagggctggagcccacggcctgagcaagggtccgctcgaaaaacggccatacctgggacctgccctgttgctgacccccagagacagggccagcggaacacagggagcctctgaagacaacagcgggggtgggggtaagaagcccaaaatggaggagctgggccttgcctcccaacccccagaagggagaccctgccagccacagaccagggcacaaaaacagcccggtcacacaaactatagttcatactcaaaaagaaagcgactcacacgaggaagggccaagaatactaccagcagtccttgcaagggcagagcaaagagacgccgtcaacagcaggtactacctcttgacccagctgaaccagagatccgtctgaaatatataagttcgtgcaaaaggttgaggagcgacagccgtactcccgcatttagcccttttgaacccagtctcggcgcacagaatcctagaagtggccagaacgcgcctcccgcaccagccgacgccagacccctctgtactacccgggataggagggcctattcagcgcgagagcagggacagcgttag

SEQ ID NO: 219706 - DNA, 5588 bp, Artificial Sequence
  derived and/or modified sequence
atgcaatcttttcgcgaaagatgcgggtttcatggaaaacagcagaattaccagcagacatcacaagagactagccgacttgagaactaccgacagccgagtcaggctgggctgagttgtgacagacagcgattacttgctaaagactactacaacccacaaccttacccgtcctatgaaggaggggctggcaccccctccgggacagccgcagcagtggctgctgataaatatcatagagggagcaaagcgctcccaactcaacaaggcctgcagggcagaccagcttttcccggttacggtgtgcaggactcgtcaccgtatccagggagatatgctggcgaggaatctctgcaagcttggggggcaccacagcccccaccccctcaaccgcagcccttgccagctggtgtggcaaagtatgacgaaaatctcatgaagaaaaccgcagtgccgcctagccgccagtacgctgagcagggagcacaagtcccattccgcacacattccttacacgtgcaacagcctcctccccctcagcagcctctcgcttacccaaaactacagagacagaaactgcaaaatgatattgcctccccattgccgttccctcaaggatggtgggccggacacagctacaaatcctgcactgccccaacggctcaaccacacgacagacccctgactgccagcagctccttggcacccggacagagagtgcagaatctccacgcatatcaaagcggaagattgtcttacgatcaacagcaacagcagcaacagcagcaacagcagcaacaacaggcgctgcaaagtcggcaccacgcccaggagacactgcactatcaaaaccttgccaagtaccagcactatggccagcaaggccagggatattgtcagcctgacgcagctgtgcgtacaccggaacagtactaccagacatttagccctagcagtagccactcacctgccagatcagtcggacgttccccttcttactcatccaccccatcccctctgatgccaaacctcgagaatttcccctacagtcaacagccattgtcaactggagcttttcctgctggtatcacagaccattcgcattttatgcccctactcaacccgtctcccactgatgccacgtctagcgtggatagcctgacagccttgacctcccaggtggaaaacatatctaatacagtacagcagctgctgctctctaaggctgccgtgccccaaaaaaagggcgtgaagaacctcgtttccagaacccccgaacagcacaaatctcagcactgctccccggagggctcaggttactctgccgagcctgcaggaacaccgctgtctgaacccccttcaagcacccctcaatcaacacacgccgagccccaggaagcagattacctcagtggctcagaggatccactggagcggtctttcctgtattgcaatcaagcacgcggatctcctgcacgggtcaattctaactctaaagccaaacccgaaagcgtgagcacctgttctgtgacatccccggacgacatgagcactaagagtgacgacagcttccagtctctccatggctctctgcctctcgactcattctctaagtttgtggccggagaacgcgattgtcctagactgctcctctccgcattagcccaagaggacttggcaagcgagatccttggactgcaggaggcgattggagagaaagctgacaaggcctgggcagaggccccttccctcgtcaaagattcctcaaagccacccttctctctggagaaccattcggcctgcctggacagtgtagcgaaaagtgcatggcccaggccaggagagccagaggccctcccggattcgctgcagctagacaaaggcggtaatgctaaggacttctctcccggtttgttcgaggacccatcagtcgccttcgccacccccgaccctaagaagaccactggcccattaagcttcggaacaaagccaactctgggtgttccagctcctgatccaacaacagcagcttttgattgcttcccagataccactgcggctagttccgccgattctgctaatcccttcgcgtggccagaggaaaatttgggcgatgcctgcccgaggtgggggctgcaccccggtgagctgactaaggggctggaacaggggggtaaagctagtgatggtatttctaagggggatactcacgaagcctcagcatgccttggcttccaggaagaggatcctccaggggagaaagtagcttccttaccaggcgactttaagcaagaggaggttggtggagtcaaggaggaagctggcggtctcctgcaatgtcccgaggtcgccaaagccgacaggtggctggaggattcaagacactgttgtagtactgctgacttcggcgatctgcccctgttgccacctacctctcggaaggaagatctcgaggccgaagaggagtactcctcactctgtgagctgctgggctctcctgaacagcgtccgggaatgcaggacccactctcccccaaggccccactgatctgtaccaaggaagaggttgaggaggttcttgatagcaaggccggatggggatctccttgccacttgtctggggagtctgttatcttactgggacccactgtaggcacagaaagcaaagtgcagtcatggttcgagagctcacttagccatatgaagcccggagaggaggggccagacggtgaacgggctcccggagactccacaacatcggatgcaagtctcgctcagaaaccaaacaagccggctgtgcctgaagctccaatcgctaaaaaagagccagtcccacgcggtaaaagcttgaggtctcggagggttcatcgagggctgccagaggccgaggatagtccgtgtagagcgccagtcctccctaaggacctgctcctcccggaaagctgcacaggtcctccacaagggcagatggaaggcgctggagcacctgggcgaggcgcttctgaagggctaccacgaatgtgcactcggtccttaactgcactctccgagccccgaacgcccggtcccccagggcttacaacgactcctgctccacctgacaagttaggaggaaagcagcgagccgcattcaagagtgggaagagggtgggaaagccctcccctaaggccgcttcctcacccagtaaccccgcagctctcccggtggccagcgattcatcccccatggggtcaaagactaaggaaacagacagtccctctacaccaggtaaggatcagcgctcaatgatcctgagatcacgaacaaaaacacaggaaatattccactctaagcgcaggcgcccaagcgaaggacggctgcctaattgcagggccaccaagaagctcctggataactctcaccttcctgccacctttaaagtgagctcttctccacagaaggaaggaagggtgagccaacgtgcacgagtgcctaaacctggtgccggaagcaaactctcagatcggccactacacgctctcaagcggaaaagcgcatttatggctcctgtgccaacgaagaagcggaatctggttctgcgcagtcgctccagctcaagttctaacgccagcggtaacgggggtgatggaaaggaagagcggccagagggttcccccacactgttcaaacggatgtcctcacccaaaaaggctaaacctacgaagggaaatggtgagcctgccaccaagcttcctccacccgaaacacccgacgcctgcctgaagctggcaagtcgcgctgctttccagggtgctatgaagacaaaggtgctgccccctcgaaagggccgtggtctcaaacttgaagctattgtgcagaaaatcaccagtcccagcctcaagaagttcgcttgcaaggctcctggagctagtccgggaaatccactttcaccatccttgagcgacaaggatagagggctgaagggggcaggtggatcccctgtgggcgtcgaagaaggcctcgtgaatgtaggaaccggccaaaaacttcccacatctggcgctgaccctctgtgtagaaatcctacgaacagatcactgaaaggaaagttaatgaataaccgcgctagcggaacccaaggggcatcagaggacaactccggcggtggaggtaagaaacctaagatggaagagttggggctcgcttcccagccacccgagggacgtccgtgtcagcctcagacccgagctcaaaagcagccgggacataccaattattcctcatatagcaaacggaaaagactgaccagaggcagagctaaaaatacaaccagtagcccttgcaaaggccgagccaaaaggaggcggcaacaacaagtgctccccttggatccggctgagcccgagattaggttgaaatatatttctagttgtaagagactgagatcagattccaggacacctgctttctcaccgttcgtgcgagtcgagaagcgcgatgctttcacgaccatttgtaccgttgtcaattcgcccggagacgcacctaaaccccataggaaaccgtcatcatctgcctcatcatcttcttcctcatcgagcttctctctggatgctgcaggcgcaagccttgccaccctgcctgggggttcgatcctgcagcccaggcccagcctccccctcagctccaccatgcacctggggccagtcgtgagtaaagccctctcaaccagctgtctagtatgttgtctctgtcaaaaccccgctaattttaaggatctaggtgacctgtgtggcccatactaccccgagcactgtctgcccaaaaaaaagcctaagctgaaagaaaaagtgcgtccagagggtacgtgcgaagaagcttcactgccattggaacgtaccctcaagggtccggagtgtgccgcagccgcaaccgctggcaagccgcctcgccctgatggcccagctgatccagcaaaacaaggcccacttaggacaagtgccaggggactgagccgacgcctccagtcctgttattgctgtgacggacgtgaggacgggggtgaggaagcggctcctgctgacaagggtcactgggtccatgaggcctgcgctgtttggacaggtggagtttaccttgtagctgggaaacttttcggactccaggaggcaatgaaagtggcagtcgatatgcatggagggacagttgcactcgcacctggggatttttcccttcccggattgaggtttgcaagtctgttccagggcccatcttggtgtgactgtcctgtactggcaacttctaccccttcatcatggtcccgatgcgtgcccgctgccaagaaacccggaccacctctgggcgcagcaaccaaggacgcttccacgcctactacgacacgcgtccccgcaatgcaagtgcgggcacgcccaggaacaggcggtcactggagccctagtaaacagtcacgcggaacactgcccggacactccagtcctaaccctggtcctatctccttgttcagctttcctccactcctgccccaacagttcttctatccatccgtttgtcttgacctgtgctgggcgatgccaggcacctggaagta

SEQ ID NO: 219707 - DNA, 5720 bp, Artificial Sequence
  derived and/or modified sequence
atgcagagtttccgcgagcgatgcgggttccacggcaagcaacagaattatcagcaaacctctcaggaaacgtctcgcttggagaattacagacaaccatctcaagcagggctatcatgtgaccgccaacgccttctggccaaagactattataatcctcagccatacccatcctatgaggggggtgcaggcacccccagcggcaccgcagccgctgtcgccgctgataagtatcatcgcggatcgaaagccctcccaacacagcaagggctgcagggaaggcccgcatttcctggttatggggtgcaagatagttcaccttaccctgggcgatatgcgggtgaggaatcgctgcaggcctggggcgctcctcagccccctccccctcagcctcagcccctgccagctggcgtggctaaatacgacgagaatctgatgaaaaaaacagccgtccccccatctcgacagtacgctgagcagggtgcacaagtccctttcaggacgcacagcctgcacgttcagcaacctccaccaccacagcaaccgctggcttatccaaagcttcagcggcaaaagcttcagaatgatatcgcatccccgcttccctttccccagggtactcacttccctcagcacagccagtcgttccccactagttcgacgtatagctcttctgtacaggggggtgggcagggcgctcacagttataaatcatgcacagcaccaactgcccagcctcacgaccgaccgttgaccgcatcctcttctcttgcacccggacagagagtgcagaatttgcatgcctaccagagtggacgcttgtcctatgatcagcagcaacaacagcagcagcagcagcagcagcagcagcaagccctgcagagcagacatcacgcgcaggaaaccctccactatcagaatttggccaagtaccaacactacgggcagcaggggcaaggatactgccagcccgatgccgctgtgaggacacccgagcagtactaccagaccttttccccttcaagtagccacagtcccgcacggtctgtcggacgaagtcccagctattcaagtactcccagtccactcatgccaaacctggagaacttcccgtacagccagcagcccttaagcactggcgctttcccagccggaataacagaccactcgcattttatgccccttcttaatcctagccctacagacgccacgtcatcagtggacacgcaggccggaaactgcaaacccctgcaaaaagataagctccccgagaatctgctgagcgacctgagcctgcagagtttaaccgcgctaacttctcaggttgagaatatcagcaacaccgtccaacaactactgctttccaaagctgcggttccgcagaagaaaggagtgaaaaacctggtctcacggacaccggaacagcataagagtcaacactgtagccctgaggggagcggctacagcgcagagcccgcaggcacccccctgtctgagccgccttcatccaccccacagtcgacgcacgccgaaccccaggaagcagattacttgagtggctccgaagaccctctggagcgctcatttctgtattgcaaccaggctagaggttcccccgcacgggtcaactctaatagtaaagccaaacccgagtccgtgagtacatgtagcgtgaccagccccgatgacatgtctacaaaaagtgatgactcttttcagtccttgcatgggagtttgcctctggattctttctcaaaattcgttgcgggagaacgtgattgcccacgtctgcttctctccgccctggcccaggaggatctggcaagcgaaattcttgggctgcaggaagcaatcggagaaaaagctgacaaagcatgggcggaggccccatccttagtgaaggattcctctaagccgcctttttctttggaaaatcacagcgcatgcctggacagcgttgctaaatcggcgtggcctcgccctggggaacccgaagcgctcccggattccttacagctggataaaggaggcaatgccaaagacttcagtcccggactgttcgaggacccaagcgttgcgttcgctactcccgatcccaaaaaaaccacaggaccacttagcttcggcaccaaacccaccctgggggtgccggcacctgatcccacgacagcagctttcgattgcttcccggacacaaccgcggcaagctccgccgactccgctaacccctttgcctggccagaagagaatttgggagatgcttgcccacgttggggcctccatcctggggaactgaccaaaggactggagcagggaggaaaggccagcgatggaatttccaagggggatacacacgaggcatcagcctgcctcggctttcaagaggaggatccgcctggagagaaggtggcatcgttaccgggtgacttcaaacaggaagaagtaggcggagtcaaggaggaggcaggtggactcctgcaatgtcctgaggttgcaaaagccgaccgatggttagaggattcccggcattgttgtagcacagccgacttcggggatctacctctgctgccaccgacaagccggaaggaggatttggaggccgaggaggagtattcttctctttgtgagttgctgggctctcctgaacaaaggccaggtatgcaagaccctctgagccccaaggcaccactcatctgcaccaaggaagaagtggaggaagtgttggatagcaaggccggatggggttcaccctgtcacctgagcggcgaatctgttatcctgttgggcccaaccgttggtacggaatccaaagttcaatcgtggtttgaatcgtctctgtctcacatgaaaccaggcgaagagggaccggatggcgagagggcccctggcgactctacaaccagcgacgcatccttggcacagaagccaaataagcctgcggtgccagaggcccctatcgcaaagaaggaacccgtacccagaggcaaatctctgaggtccaggcgagtccacagaggacttcccgaagccgaagattccccttgccgcgcacctgtgctacccaaggatctgttactgcctgagagctgcacaggccctcctcaaggtcagatggaaggcgcaggcgctcccggacggggtgcttcagaggggctgcctcgtatgtgtactagatcccttacggcattgtcagaacctagaactcccggacccccaggacttacgacaactcccgctccccctgacaaactgggaggcaaacagagggctgccttcaaatcgggcaaacgcgtgggcaagcccagcccaaaagccgctagtagtcctagtaatccagcagctttacctgtggcaagtgacagctctcctatgggttcaaaaacgaaggaaacagattctccgtcaaccccaggcaaggatcagaggagtatgattctccgatctagaaccaagacccaggaaatcttccatagtaagaggcggaggccctctgagggacgcctgcctaactgccgcgctaccaagaaattactcgacaactcccatctcccggcaacatttaaggtgtcctcttctccccagaaagagggccgtgtgagccagcgagctagggtacctaagcctggggctgggtctaaactgagcgaccgcccactccacgcactcaagaggaagtccgcatttatggctcccgtccccacaaagaagcggaatctggtgctcagaagccgttcctcatccagttctaatgctagtggcaacgggggagatggcaaggaggagcgccctgaagggagccctaccctgttcaaaaggatgagttcacccaagaaagcaaaaccaacgaagggcaacggagagcccgctacaaagctccctccacccgagactccagacgcttgtctcaaacttgcgtctagggccgctttccagggggctatgaagactaaagtcctgccccctcggaagggcagggggctaaaactcgaggcaatcgtgcagaagattacaagcccgtccctcaaaaagttcgcttgcaaggcaccaggtgcctcacctggaaatcccctgtctccaagcctttcagacaaagacagaggcttgaaaggtgccggaggatcccctgtgggtgtggaagagggcttagtcaacgtggggaccggccagaaactgcccacatcaggggcagaccccttatgtagaaaccctaccaataggtcactcaagggtaagttgatgaatagtaagaaactcagcagcacagactgctttaaaactgaggccttcacctccccggaagccctccagcccggaggcacagccctcgcaccaaaaaagcgtagccggaagggaagggccggagcgcacggcctcagcaagggtccgcttgaaaagcggccatacttgggacccgctctccttctaaccccccgagatcgtgccagcggcacacagggagcatccgaagataacagtgggggaggaggtaagaagccaaaaatggaggaactcggcctggcttctcagccacccgagggcaggccttgccagccccaaacgcgggctcagaaacagccaggccacaccaactatagctcctattccaagcggaagaggttgactcgcggacgggcaaaaaatacaactagctcaccatgcaaaggtagagcgaagcgaaggcggcagcagcaagttctgccactggacccggctgagcccgaaatcagactaaagtatatatcgtcatgcaaacggttgaggtcggattcacgcactccggcattttctcctttcgtgcgggtggagaagcgggatgcctttacaacaatctgcactgtagtgaacagccctggcgacgcccctaaacctcacaggaaaccgtccagcagcgcttcatcatcttcatcatcaagctctttctccttggatgctgcaggggcaagcctggccaccctgccgggagggagcatcttgcagccacggccatcgttaccactgagtagcacgatgcatctggggcctgttgtttctaaagcactgagtacttcttgcctcgtgtgctgcctgtgtcagaacccagccaactttaaggacctgggagatttatgtggcccttattatccagagcactgcttgcccaaaaagaagcctaagttaaaagaaaaggtccgtcctgagggcacatgcgaggaggcctcccttccactagagcgcacactcaagggccctgagtgcgccgcagctgctactgccggtaagccacccagaccagacggaccagccgatccggctaagcagggaccgcttcgcaccagcgcaaggggcctgagccggcgattgcagtcttgttattgttgcgacggcagggaagacgggggagaggaggccgcacccgcagacaagggtagaaaacacgagtgctccaaagaggcaccagccgagccgggaggcgaggctcaggagcactgggtacacgaggcgtgtgctgtgtggacaggtggggtgtatctagtagctggaaagctgttcggccttcaagaggccatgaaggtcgcagttgacatgatgtgtagttcttgtcaggaggccggagccaccatcggctgttgccacaaaggctgcctgcacacgtatcactacccttgcgccagcgatgctgggtgcatatttattgaagaaaacttttccttgaagtgccccaagcataagaggctccccta

SEQ ID NO: 219708 - DNA, 2901 bp, Artificial Sequence
  derived and/or modified sequence
atgcagagctttcgggagagatgtggattccatggaaaacagcagaattaccagcagacatctcaagaaacaagccgtctagaaaattaccgacagcccagccaggcgggattgtcctgtgaccgccagaggcttctcgcaaaagattactataatccacaaccctatccatcttatgagggcggagccggaacgccaagcggtacagccgcagctgtagccgctgataaatatcatagagggtccaaagccttaccaacccagcaagggcttcagggcaggccggcttttccgggatatggcgtgcaggactcaagcccttaccccggtcggtacgcgggagaggagtccctccaggcttggggcgctccgcagccccctccaccccagcctcagccgctgcctgccggtgtcgctaaatacgatgagaacttgatgaagaagactgctgtccctccaagtcggcagtatgcggagcaaggagcccaagttccattcaggacccactctctccacgtacagcagccccctccaccccagcagcccttagcttacccaaagcttcagcggcaaaagcttcagaatgacatagcttctccgctgccctttccccaagggacgcatttccctcaacacagtcagtctttccctactagctccacgtacagcagcagcgtccagggaggagggcaaggggcacattcgtataaatcctgtacggccccaactgctcaaccccatgaccggcctctgaccgcgtcatcaagtctagctccaggccagcgagttcagaatctgcacgcctaccagagtggacgactcagctatgaccagcagcagcagcagcagcagcagcagcagcaacagcagcaggccctgcagtctaggcaccacgctcaagagactttgcactaccaaaacctggccaagtaccagcactacggccagcagggccagggttactgtcagccggatgcagcggtgaggacccctgagcagtattatcagactttctctccctcatcatcgcactcccccgcacgctcggtagggcgaagccccagctacagttccaccccatccccactgatgcctaatctggagaacttcccttattcgcagcagccactgtccactggcgcatttcccgctggcattacagaccattctcactttatgccacttctcaacccatcaccaacagacgcaacgagctccgttgatacccaggctgggaactgcaagcctctgcagaaggacaaactgcctgaaaatttgctgagcgacctgtccctgcagtccttgacagccttgacctcacaagttgagaatatcagcaacaccgtgcagcagctgctgctttcaaaggccgctgtcccgcagaaaaagggagtcaagaatttagtgagtcggacacctgaacagcacaaatcacagcattgtagtccagaaggcagcggatacagtgctgaacccgctggtacccccctatcggagccaccatcttcaactcctcaatctacacatgctgaacctcaggaagcagactatctgagtggctcagaggatcccctcgaaagatcatttttatactgcaaccaggcacgcggtagccctgcaagagttaactccaatagtaaagccaaacccgagtccgtttcaacgtgttccgtgacctccccagatgatatgagcaccaagtctgatgactcgtttcaatctctccacggaagcctgccattagacagcttttctaagtttgtggctggggagcgcgattgtcctaggctcctactaagcgcgctcgcccaggaagatctcgcaagcgaaatcttaggactgcaggaggccatcggagaaaaggcggataaggcctgggctgaggcccctagcctggtgaaggacagttccaagccccctttcagcctggagaatcactctgcttgtctcgacagtgtggctaaaagcgcgtggccgagacctggggagcctgaggcccttccggactctctgcagctcgataaggggggaaatgccaaggatttctctccgggactgtttgaagatccaagcgtggctttcgcgacaccagatccaaagaagaccaccgggcctctgtctttcggaactaaaccgaccctaggcgtaccggctcccgatccaacaactgccgctttcgattgctttccggacacgacggcagcctcgtccgcagatagcgcgaacccatttgcctggccagaagaaaatttgggcgacgcttgtcccaggtggggcttacaccctggcgagttaaccaagggcttggaacaggggggaaaagcgagtgacggaatttcgaaaggcgatacacacgaggcctccgcatgcctcggatttcaggaggaggatccccctggcgagaaagtggcatccttaccaggcgatttcaaacaggaagaggtcggaggggtcaaggaggaagccggaggactcttgcagtgccctgaggtcgccaaggccgaccggtggctggaggacagcaggcattgctgcagcactgccgactttggtgatctaccgctgttgccccctactagccggaaagaagatctcgaggccgaggaagagtattcctcactgtgcgagcttctcggatccccagagcagagacccggtatgcaagatccgctgtccccaaaggcgcctctgatctgcacgaaagaggaagtagaagaagtcctcgacagcaaagcaggctgggggagcccatgccatctgagcggggagtctgtgattctcttggggcctacagtgggcacagaatcaaaagtccagagctggtttgaagcctcactctacagcgtctacatctgcatccacatccacatttataacatctacgaggactgtaagtgctag

SEQ ID NO: 219709 - DNA, 2829 bp, Artificial Sequence
  derived and/or modified sequence
atgcaatcttttagggagaggtgcggttttcatgggaaacagcagaattaccagcaaacatcccaggagacaagtcggttggagaactatagacagccttctcaggccggactgagttgcgatagacagagactgctcgcaaaggactattacaacccgcaaccctatccttcgtatgagggaggggctggaaccccgagcggaactgccgctgccgtggctgccgacaagtatcatagaggctccaaggccctccctacccaacagggactccaaggacgtccagctttcccaggctatggagtccaggacagctctccctatcctggaaggtatgctggagaggagtcactgcaagcttggggcgctccacaacctccaccccctcagccacagccgctgcccgcaggagtggctaaatacgatgaaaacctgatgaagaagacagcagtacccccatccagacagtacgcggaacaaggggctcaagtgcccttcagaacccattctctccacgtgcagcaaccaccacccccacagcaaccattggcttaccctaaattgcagcgacagaagctgcaaaatgacatagccagtcctttgccattcccccagggtacgcacttcccccagcacagccaatccttccctacaagttcaacatacagcagctctgtccagggagggggacagggtgcacatagctataagagttgtaccgccccaactgctcagcctcatgataggccactgactgcaagcagttcactagccccagggcagcgtgtgcagaatcttcatgcctatcaatccggccgactgtcttacgaccagcagcagcagcaacagcagcagcagcagcagcagcagcaggcccttcagagtcggcaccatgcccaggagaccctccactatcagaacctggctaagtaccagcactatggccagcaaggacagggctattgccagcccgatgccgcagtccgaacccctgaacagtattatcagaccttctctcccagctcatcccacagccctgctaggagtgtcgggagatccccaagttacagtagtacaccttctcctctgatgccaaatctcgagaatttcccgtacagccagcagcctctgtccactggcgcatttcctgccggaattactgaccacagtcatttcatgcccctgctcaatccgtcccccactgacgctacctcttctgtggacacccaggccggaaactgcaagcccctccagaaggacaagctgcccgagaaccttctctcagatctcagtcttcagtcacttacagccttgacatctcaggtggaaaacatttctaacacggtgcagcagttgcttctgtcgaaggctgccgtgccacagaagaaaggagtgaagaaccttgtctctcgcacccctgaacaacataagtcccaacactgctcccctgaaggctccggatactctgccgagcctgctggaacacccctcagtgagccaccatcttctacgccacagtcaactcatgcagaaccgcaagaggcggattatctgtccggctcggaggaccccctggaacgctccttcctgtactgtaatcaggcacgcggttcccccgctcgcgtgaattcaaactccaaggccaagcctgagtccgtctctacatgtagcgtgacttcccctgacgacatgtccaccaaaagcgacgacagcttccagtcactgcacggatctctacccctggactcattttccaagttcgtcgctggtgaacgagactgtcccaggctgctcctcagcgctctggcccaagaggacctggccagcgagattctgggcctgcaggaggcaatcggcgaaaaggctgataaggcctgggcagaagcgccttccctggtgaaagacagctccaaaccaccatttagccttgaaaatcatagcgcttgcctggacagcgtagccaaaagcgcctggcctcgacctggagagcccgaagccctgccggacagtctgcagcttgacaaggggggaaacgcaaaggacttctctccgggtctgtttgaggacccctcggtcgccttcgctacccccgaccctaaaaagacgaccgggccactgtcatttggcaccaagcctaccctcggagtcccagcacccgaccctacaacagccgcatttgattgtttccctgacactacggcggcaagttccgccgattccgcgaacccatttgcctggccagaggagaacctaggcgacgcctgcccacgttggggactgcaccctggggagctgaccaagggactggaacagggtggtaaagcgtcagacggcatcagtaagggcgatacccacgaagcttctgcttgcctgggctttcaggaggaagaccccccaggagaaaaggtagctagcctcccaggagacttcaaacaagaggaggtaggaggtgtcaaggaagaggccggaggacttctgcagtgcccagaggttgctaaggctgatagatggctggaagacagccggcactgttgttctaccgctgacttcggagatttacctctcctgccacccactagccgcaaggaggatctggaagccgaggaggaatattcatccctgtgtgaattgctgggatctcccgaacaacgtcctgggatgcaggaccccctctcgcccaaggcaccactgatctgtactaaggaggaggtggaggaggtgctcgactctaaagcagggtggggatcaccttgtcatctgagcggagaaagtgtgattctcctggggccaactgtgggtaccgagagcaaagtgcaatcctggttttag

SEQ ID NO: 219710 - DNA, 5981 bp, Artificial Sequence
  derived and/or modified sequence
atgcagtcattcagggagaggtgcggattccacggaaaacaacagaactaccagcaaacttcccaggagaccagccggttggaaaattaccgccagccatcacaggcaggtctctcttgtgacaggcaaagactccttgccaaagattactacaacccccagccctacccctcctatgagggcggtgctggaactcccagcggcacagcagcagctgtcgctgccgacaagtaccaccgtggctctaaggcacttccaactcaacagggactgcagggcaggcccgcattccctggctatggcgtgcaggatagttccccatacccaggcagatacgctggagaggagtcactacaggcttggggcgcaccccaaccacccccaccacaaccccaaccgctgcctgcaggggtggctaaatatgacgaaaatctgatgaaaaagacagcagttccacccagcaggcagtatgcagagcagggagcccaggtgccgtttagaacgcatagtctgcacgtccaacaaccgcctccaccacagcagcccctcgcctaccctaagctccaacgtcagaaattgcagaacgacatcgccagccccctacctttcccacaggggacccatttccctcagcattctcagagcttccccacttcaagtacgtacagctccagcgtccaaggaggtggacagggggctcactcatacaaaagctgcacagcacccactgcacaaccacacgaccggcctttgacagcatccagcagcctggcgccaggtcaacgcgtgcagaacctccatgcctaccagtcggggagacttagttatgaccagcagcagcagcagcagcaacaacaacaacagcaacaacaggcgctgcagtcgcggcaccacgcccaggagactctccattatcagaatcttgccaagtaccaacactatggacaacagggccagggctactgccagcccgacgccgcagtgcggaccccagaacagtactaccagacctttagcccctcgtccagccatagccccgcaagaagcgtcgggagatcccccagttattccagcaccccctctcctcttatgccaaacctcgaaaacttcccatattctcagcaaccgctgagtactggcgcatttccagctggaattactgatcactctcactttatgccattgctgaatccatctcctaccgacgctacaagttccgtggacacacaggccggtaattgtaaacctttgcaaaaggataaactgcctgaaaacctcctatctgacctcagtttacagagcctgacagcacttaccagccaggtggaaaatatcagcaacacagtccaacagttgctgctctcaaaggccgcagtcccacagaagaaaggcgtgaaaaatctcgtgtcccgcactccagaacagcataaaagccagcattgctctccagaaggttccgggtactcagcggagcctgcaggcaccccactctcggaaccgccaagtagcacaccgcaatccacccacgcagagccccaggaagctgattacctttctggctctgaggaccctcttgaaaggagttttttatattgtaaccaggctcgaggtagtcccgctagggtgaatagcaattctaaggcaaagccagaatccgtcagcacatgttccgtgaccagcccagacgatatgtccactaagtccgacgacagctttcagtctttgcacggaagtctcccgctggattccttttctaagttcgtagccggtgagcgtgactgtccaagactgctgctttctgcccttgcccaggaagatctagccagcgaaatattaggcctgcaagaggccattggggagaaagcggacaaggcctgggcagaggctccatcactggttaaagacagctcaaaaccaccattttccctggaaaatcactccgcatgcctagactccgtcgcaaagagcgcctggccacgccctggagagcccgaggccctgccagatagcctgcagctggataagggtggcaatgcgaaagatttttctcccggtctatttgaggatccatcagtggcgttcgcaaccccagaccccaaaaagactactggccctctgtccttcgggaccaagcccacactgggagtgccagcaccggatcctaccactgcggctttcgactgcttcccagacaccaccgccgcttcctcggccgattcagcaaacccatttgcatggcctgaggagaatctcggggatgcttgcccacggtggggtctgcatccgggtgagcttaccaagggactggaacaggggggaaaagcctccgacggcatatcaaaaggggatacacatgaggcttccgcgtgcctcgggttccaggaagaggacccccctggagagaaagttgcaagcctgcctggggacttcaagcaagaggaagtagggggtgtaaaggaagaggcaggcggtctgctgcagtgccccgaggttgctaaggctgatcgttggttggaagacagccggcactgttgttccaccgctgacttcggcgacctgcccctccttcctccgacgtcgcgtaaggaagatttagaagccgaagaggagtacagttccttatgtgaactccttgggtcccctgagcaacgcccaggcatgcaagatcctctttcccctaaagcaccccttatttgcaccaaagaggaggtggaagaggtgctggacagcaaggcaggatggggaagcccctgccacttgtccggcgagagcgtgatcctcttgggtcctaccgtgggcaccgagtccaaagtgcagagctggttcgaatcttcgctttctcacatgaagcccggagaggaaggccctgatggcgaaagagccccaggggattccacgaccagcgatgccagcctcgcacagaagcccaataaaccagctgtgcctgaggctcccatcgccaaaaaggaacctgtgcctcgcggaaaaagcctgcggtcccgccgagttcaccgcggattacccgaggcggaggacagcccttgtagggcccctgtcctcccaaaggaccttctcttacccgagagctgcaccggccctccacagggtcaaatggagggtgcgggtgcccctgggagaggcgctagcgaggggcttcccagaatgtgcacccgctctcttacagccttatctgaacccagaacacctggccctccaggcctgacaaccacccctgcaccccctgataaactgggcggaaagcagcgggctgcctttaaaagcgggaagagggttggcaagccatccccaaaggcagcctcctcgccctccaatcccgctgctctccctgtggcaagcgactcctcacccatgggatccaagactaaggaaacagacagtccttccacccctggcaaagaccagagatccatgatacttcggagcaggaccaagacccaggagatttttcacagtaaacggagacgccctagtgaagggagacttccgaattgtcgggctactaaaaaacttttagacaacagccatctgccagcaactttcaaggtgagctcgtcccctcaaaaagaggggcgagtctcccagagggcgagggtgcccaagcctggggctggcagcaaactgtcagacagaccgttgcacgcactgaaacggaagagtgcgtttatggcacccgtgcctactaaaaaacgtaaccttgtcctgcggagccggtctagctcttctagtaatgctagtgggaacggcggtgatggaaaggaggaaaggcctgaaggctctcctactctgtttaagcggatgtcttcccctaagaaagctaagccaaccaagggtaatggtgagcctgcaactaaactccctcctccagaaacgcctgacgcttgtctaaagctcgccagccgcgcagctttccaaggcgcaatgaaaaccaaagtcctgcccccaagaaaagggagaggacttaagctggaagcgatagtgcagaaaataacctccccgtctttgaagaagttcgcatgcaaagcacctggagcctcgcccggaaatcccctatcgccttccctgtcagataaggatcggggattgaagggcgcaggaggttccccagtcggcgtggaggaaggcctggtgaatgttggcaccggtcagaagctgccaacgtctggcgcagatccactctgccgcaaccctacaaatagaagcctgaagggcaagttaatgaactctaagaaactgtcttcaacagactgctttaaaacagaggcattcacctcccccgaggctctccaaccaggtgggaccgctctcgcacctaagaagcgcagtcggaaaggtagagcaggcgctcatgggctgagcaaggggccattggagaaaaggccatacctgggcccagctctcttgttaacccctcgcgatcgggcatccggaactcagggcgcatcagaggacaactcaggcggtgggggtaaaaagcctaagatggaagagctgggcctggcctcccagcctccagaaggccgaccatgtcagccacagacgcgggcacagaaacagcccggacacacaaactactccagttactctaagcgaaagcgtctgacaaggggtagggccaagaacacaacttcgagcccttgcaaaggaagagccaagcgtagacgacagcagcaggtgctgcctctggaccccgctgagccagaaatccggttgaaatacatcagttcatgcaagcgattacgcagcgactccagaactcctgcattttcacccttcgtacgagtcgagaagagagacgcatttactacaatctgcaccgttgtgaactctcctggtgatgcaccaaagccacacaggaagcccagctcatctgccagttcgtcatctagtagttcaagtttctcactggatgcggctggcgcttcactagcaaccctgccaggcggatctatcctccagcccaggcccagccttccccttagtagcaccatgcatttgggaccagtagtttcgaaagccctgagcaccagctgtctcgtctgttgcctgtgtcaaaatccagctaacttcaaagacttaggagatctctgtggcccttactaccctgagcactgcctgcctaagaaaaagccaaaattgaaagagaaagtgcgtccagaggggacatgcgaggaggctagtctccccctggaacggacacttaagggacccgaatgtgccgctgcggctacagcgggaaagcctccacggcctgacggtcccgcagaccctgccaagcagggccctctccggaccagcgccaggggattatcaagaaggttacaaagttgttattgctgcgacggaagggaggacgggggagaggaggctgcgcctgcagataagggaagaaagcatgagtgttctaaagaggcccctgctgaaccaggtggcgaggcccaggagcactgggtacatgaagcgtgtgccgtctggaccggtggagtgtaccttgtggcaggaaagttgtttgggttgcaggaggccatgaaggtcgccgtggacatgcacggcggtacagttgctctcgcgccaggagatttcagcttgcctggcttgagattcgcgtccctgtttcagggaccctcctggtgtgattgcccagtgctggctacgtccacgccttcctcttggtctcggtgtgtacctgccgctaagaaaccagggcctcctctcggtgccgctaccaaggacgcctcaacacctaccaccactcgcgtccccgcaatgcaggtacgggctcgcccaggtaccggaggccactggagtccatctaaacagagtaggggcaccctgcccggacattcatcacccaatcctgggccaataagtttgttcagttttccgccactactccctcagcagtttttctacccttctgtgtgcctcgacctctgttgggccatgcccggaacctggaaata

SEQ ID NO: 219711 - DNA, 4923 bp, Artificial Sequence
  derived and/or modified sequence
atgcagtcttttcgagaaaggtgtggtttccatggcaaacaacagaactaccagcagacctcgcaggaaacatcacgcctagagaattacaggcagccgagtcaggccgggctaagctgcgaccggcagcggctgctcgccaaggactattataacccgcagccttacccgagctatgagggtggcgctggcacgccctctggcactgcagccgcggtggccgccgacaagtaccaccgaggcagcaaggccctgcccacacagcaaggcctgcaggggaggccggctttccctggctacggcgtccaggacagcagcccctacccaggccgctatgctggtgaggagagccttcaggcttggggggccccacagccaccacccccacagccgcagccactacctgcaggggtggccaagtatgatgagaacttgatgaaaaagacagcagtgccccccagcaggcagtatgcagagcagggcgcccaggtgccctttcggactcactccctgcacgtccagcagccaccgccgccccagcagcccctggcataccccaagctccaaaggcagaagctgcagaacgacattgcctcccctctgcccttcccccagggtacccactttcctcagcattcccagtccttccccacctcctccacctactcctcctctgtccagggtggtgggcagggggcccactcctataagagttgcacagcaccgactgcccagccccatgacaggccgctgactgccagctccagcctggccccggggcagcgggtccagaatcttcatgcctaccagtcgggccgcctcagctatgaccagcagcagcagcagcagcagcagcagcagcagcagcagcaagcccttcagagccggcaccatgcccaggaaaccctccattaccaaaacctcgccaagtatcagcactacgggcagcaaggccagggctactgccagccggacgcagccgtccggaccccagagcagtactaccagaccttcagccccagctccagccactcacccgcccgctccgtgggccgctcaccttcctacagttccacaccgtcgccgctgatgccaaacctggagaactttccctacagccagcagccgctcagcaccggggccttccccgcagggatcactgaccacagccacttcatgcccctgctcaatccctccccaacggatgccaccagctctgtggacacccaggctggcaactgcaagccccttcagaaggacaagctccctgagaacctgctgtcggatctcagcctgcagagcctcacggcgctgacctcacaggtggagaacatctccaacaccgtccagcagctgctgctctccaaggctgctgtgccgcagaagaaaggtgtcaagaacctcgtgtccaggaccccagagcagcataaaagccagcactgcagccccgaagggagcggctactcagccgagcccgcaggcacaccgctgtcagagccgccgagcagcacgccacagtccacgcatgcggagccgcaggaggccgactacctgagcggctccgaggacccactggagcgcagcttcctctactgcaaccaggcccgtggcagccctgccagggtcaacagcaactcgaaggccaagcccgagtccgtgtccacctgttctgtgacctctcctgacgacatgtccaccaaatctgacgactccttccagagcctacacggcagtctgccgctcgacagcttctccaagttcgtggcgggtgagcgggactgtccgcggctgctgctcagcgccctggcacaggaggacctggcctccgagatcctggggctgcaggaagccatcggtgagaaggccgacaaagcttgggctgaagcacccagcctggtcaaggacagcagcaagccacccttctcgctggagaaccacagcgcctgcctggactctgtggccaagagtgcgtggccccggcctggggagccggaggccctgcccgactccttgcagctggacaagggcggcaatgccaaggacttcagcccagggctgtttgaagacccttccgtggccttcgctacgcctgaccccaaaaagacaactggtcctctctcctttggtaccaagcccacccttggggttcctgctccagaccccactacagcagcttttgactgtttcccggacacaaccgctgccagctcagcggacagcgccaacccctttgcctggccagaggaaaacctgggggatgcttgtcccaggtggggattgcaccctggcgagcttaccaagggcctggagcagggtgggaaggcctcagatggcatcagcaaaggggacacccatgaggcttcggcctgcctgggcttccaggaggaggacccccctggggagaaggtggcctcgttgcccggggacttcaagcaggaggaggtgggtggggtgaaggaggaggcaggtgggctgctgcagtgccccgaggtggccaaggctgaccggtggctggaggacagccggcactgctgttccaccgccgacttcggggacctcccactgctgccacccaccagcaggaaggaggacctggaagctgaggaggagtactcctccctatgtgagctcctgggcagccccgagcagaggcctggcatgcaggacccgctgtcacccaaggccccactcatctgcaccaaggaggaggtggaggaggtgctggactccaaggccggctggggctctccgtgccacctctcaggggagtccgtcatcctgctgggccctacagtgggcaccgagtcaaaggtccagagctggtttgagtcctctctgtcacacatgaagccaggtgaagaggggcctgatggggagcgagctccaggggattccaccacctcggacgcctctctggcccagaagcccaacaagcctgctgtgcccgaggcgcccatcgcaaagaaagagcctgtgccacggggcaaaagcttacggagccgtcgggtgcaccgggggctgcccgaggccgaggactccccatgcagggcaccagtgctgcccaaagacctcttgctccctgaatcctgcacagggcccccccagggacagatggaaggggctggagccccaggccggggggcctcggaagggctccccaggatgtgtactcgttctctcacggccctgagtgagccccgcacgcccggacccccaggcctgaccaccacccctgcacccccagacaaactggggggcaagcagcgagccgccttcaagtcgggcaagcgggtggggaagccctcacccaaggctgcctccagccccagcaacccggccgccctgcctgtggcctccgacagcagcccgatgggctccaagaccaaggagacagactcacccagcacgcctggcaaggaccagcgctccatgatccttcggtcacgcaccaaaacccaggagatcttccactccaagcggcggaggccctctgagggccggctccccaactgccgtgccaccaagaagctcctcgacaacagccacttgcccgccacattcaaggtctccagcagcccccagaaggagggcagggtgagccagcgggcaagggtccccaaacctggtgcaggcagcaagctctctgaccggcccctccatgcgctcaaaaggaagtcggccttcatggcgccggtccccaccaagaagcggaacctggtcttgcggagccgcagcagcagcagcagcaacgccagtggcaatgggggagatgggaaggaggagaggcctgagggttcccccaccctcttcaagaggatgtcttctcccaagaaagccaagcccaccaagggcaatggcgagcctgccacaaagctcccacccccggagacccccgatgcctgcctcaagctcgcctctcgggcagccttccagggggccatgaagaccaaggtgctgccaccccggaagggccggggcctgaagctggaagccatcgtgcagaagatcacctcgcccagcctcaagaagttcgcatgtaaagcgccaggggcctctcctggtaatcctctgagcccatccctttccgacaaagaccgtgggctcaagggtgctgggggcagcccagtgggggtggaagaaggcctggtaaatgtgggcaccgggcagaagctcccaacttctggggctgatccgttatgcagaaatccaaccaacagatccttaaaaggcaaactcatgaacagtaagaaactgtcttctactgactgtttcaaaaccgaggccttcacatccccggaggccctgcagcctggggggactgccctggcgcctaagaagaggagccggaaaggccgggcaggggcccatggactctccaaaggcccgctggagaagcggccctatcttggcccggctctgctcctgactccccgagacagggccagtggcacacaaggggccagtgaggacaactctggtggaggaggcaagaagccaaagatggaggagctgggcctggcctcccagcccccggagggcaggccctgccagccccagacaagggcacagaaacagccaggccacaccaactacagcagctattccaagcggaagcgcctcactcggggccgggccaagaacaccacctcttcaccctgtaaggggcgtgccaagcgacgacgacagcagcaggtgctgcccctggatcccgcagagcctgaaatccgcctcaagtacatttcctcttgcaagcggctgaggtcagacagccggacccccgccttctcacccttcgagcccagcctgggagcgcaaaacccaagaagcggccagaacgcacctccggctccggcggacgcgcgaccgttgtgcaccaccagggaccgccgcgcctactctgcacgggagcagggacagcgctag

SEQ ID NO: 219712 - DNA, 5662 bp, Artificial Sequence
  derived and/or modified sequence
atgcagtcttttcgagaaaggtgtggtttccatggcaaacaacagaactaccagcagacctcgcaggaaacatcacgcctagagaattacaggcagccgagtcaggccgggctaagctgcgaccggcagcggctgctcgccaaggactattataacccgcagccttacccgagctatgagggtggcgctggcacgccctctggcactgcagccgcggtggccgccgacaagtaccaccgaggcagcaaggccctgcccacacagcaaggcctgcaggggaggccggctttccctggctacggcgtccaggacagcagcccctacccaggccgctatgctggtgaggagagccttcaggcttggggggccccacagccaccacccccacagccgcagccactacctgcaggggtggccaagtatgatgagaacttgatgaaaaagacagcagtgccccccagcaggcagtatgcagagcagggcgcccaggtgccctttcggactcactccctgcacgtccagcagccaccgccgccccagcagcccctggcataccccaagctccaaaggcagaagctgcagaacgacattgcctcccctctgcccttcccccaggggtggtgggcagggcactcctataagagttgcacagcaccgactgcccagccccatgacaggccgctgactgccagctccagcctggccccggggcagcgggtccagaatcttcatgcctaccagtcgggccgcctcagctatgaccagcagcagcagcagcagcagcagcagcagcagcagcagcaagcccttcagagccggcaccatgcccaggaaaccctccattaccaaaacctcgccaagtatcagcactacgggcagcaaggccagggctactgccagccggacgcagccgtccggaccccagagcagtactaccagaccttcagccccagctccagccactcacccgcccgctccgtgggccgctcaccttcctacagttccacaccgtcgccgctgatgccaaacctggagaactttccctacagccagcagccgctcagcaccggggccttccccgcagggatcactgaccacagccacttcatgcccctgctcaatccctccccaacggatgccaccagctctgtggacagcctcacggcgctgacctcacaggtggagaacatctccaacaccgtccagcagctgctgctctccaaggctgctgtgccgcagaagaaaggtgtcaagaacctcgtgtccaggaccccagagcagcataaaagccagcactgcagccccgaagggagcggctactcagccgagcccgcaggcacaccgctgtcagagccgccgagcagcacgccacagtccacgcatgcggagccgcaggaggccgactacctgagcggctccgaggacccactggagcgcagcttcctctactgcaaccaggcccgtggcagccctgccagggtcaacagcaactcgaaggccaagcccgagtccgtgtccacctgttctgtgacctctcctgacgacatgtccaccaaatctgacgactccttccagagcctacacggcagtctgccgctcgacagcttctccaagttcgtggcgggtgagcgggactgtccgcggctgctgctcagcgccctggcacaggaggacctggcctccgagatcctggggctgcaggaagccatcggtgagaaggccgacaaagcttgggctgaagcacccagcctggtcaaggacagcagcaagccacccttctcgctggagaaccacagcgcctgcctggactctgtggccaagagtgcgtggccccggcctggggagccggaggccctgcccgactccttgcagctggacaagggcggcaatgccaaggacttcagcccagggctgtttgaagacccttccgtggccttcgctacgcctgaccccaaaaagacaactggtcctctctcctttggtaccaagcccacccttggggttcctgctccagaccccactacagcagcttttgactgtttcccggacacaaccgctgccagctcagcggacagcgccaacccctttgcctggccagaggaaaacctgggggatgcttgtcccaggtggggattgcaccctggcgagcttaccaagggcctggagcagggtgggaaggcctcagatggcatcagcaaaggggacacccatgaggcttcggcctgcctgggcttccaggaggaggacccccctggggagaaggtggcctcgttgcccggggacttcaagcaggaggaggtgggtggggtgaaggaggaggcaggtgggctgctgcagtgccccgaggtggccaaggctgaccggtggctggaggacagccggcactgctgttccaccgccgacttcggggacctcccactgctgccacccaccagcaggaaggaggacctggaagctgaggaggagtactcctccctatgtgagctcctgggcagccccgagcagaggcctggcatgcaggacccgctgtcacccaaggccccactcatctgcaccaaggaggaggtggaggaggtgctggactccaaggccggctggggctctccgtgccacctctcaggggagtccgtcatcctgctgggccctacagtgggcaccgagtcaaaggtccagagctggtttgagtcctctctgtcacacatgaagccaggtgaagaggggcctgatggggagcgagctccaggggattccaccacctcggacgcctctctggcccagaagcccaacaagcctgctgtgcccgaggcgcccatcgcaaagaaagagcctgtgccacggggcaaaagcttacggagccgtcgggtgcaccgggggctgcccgaggccgaggactccccatgcagggcaccagtgctgcccaaagacctcttgctccctgaatcctgcacagggcccccccagggacagatggaaggggctggagccccaggccggggggcctcggaagggctccccaggatgtgtactcgttctctcacggccctgagtgagccccgcacgcccggacccccaggcctgaccaccacccctgcacccccagacaaactggggggcaagcagcgagccgccttcaagtcgggcaagcgggtggggaagccctcacccaaggctgcctccagccccagcaacccggccgccctgcctgtggcctccgacagcagcccgatgggctccaagaccaaggagacagactcacccagcacgcctggcaaggaccagcgctccatgatccttcggtcacgcaccaaaacccaggagatcttccactccaagcggcggaggccctctgagggccggctccccaactgccgtgccaccaagaagctcctcgacaacagccacttgcccgccacattcaaggtctccagcagcccccagaaggagggcagggtgagccagcgggcaagggtccccaaacctggtgcaggcagcaagctctctgaccggcccctccatgcgctcaaaaggaagtcggccttcatggcgccggtccccaccaagaagcggaacctggtcttgcggagccgcagcagcagcagcagcaacgccagtggcaatgggggagatgggaaggaggagaggcctgagggttcccccaccctcttcaagaggatgtcttctcccaagaaagccaagcccaccaagggcaatggcgagcctgccacaaagctcccacccccggagacccccgatgcctgcctcaagctcgcctctcgggcagccttccagggggccatgaagaccaaggtgctgccaccccggaagggccggggcctgaagctggaagccatcgtgcagaagatcacctcgcccagcctcaagaagttcgcatgtaaagcgccaggggcctctcctggtaatcctctgagcccatccctttccgacaaagaccgtgggctcaagggtgctgggggcagcccagtgggggtggaagaaggcctggtaaatgtgggcaccgggcagaagctcccaacttctggggctgatccgttatgcagaaatccaaccaacagatccttaaaaggcaaactcatgaacaacagggccagtggcacacaaggggccagtgaggacaactctggtggaggaggcaagaagccaaagatggaggagctgggcctggcctcccagcccccggagggcaggccctgccagccccagacaagggcacagaaacagccaggccacaccaactacagcagctattccaagcggaagcgcctcactcggggccgggccaagaacaccacctcttcaccctgtaaggggcgtgccaagcgacgacgacagcagcaggtgctgcccctggatcccgcagagcctgaaatccgcctcaagtacatttcctcttgcaagcggctgaggtcagacagccggacccccgccttctcacccttcgtgcgggtggagaagcgagacgcgttcaccaccatatgcactgttgtcaactcccctggagatgcgcccaagccccacaggaagccttcctcctctgcctcctcttcctcatcctcgtcctcgttctccttggatgcagccggggcctccctggccacactccctggaggctccatcctgcagccgcggccctccttgcccctctcctccacgatgcacttggggcctgtggtttccaaggccctgagtacctcttgccttgtttgctgcctctgccaaaacccggccaacttcaaggaccttggggacctctgtgggccctactaccctgaacactgcctccccaaaaagaagccaaaactcaaggagaaggtgcggccagaaggcacctgtgaggaggcctcgctgccgcttgagagaacactcaaaggtcccgagtgtgcagctgccgccactgccgggaagccccccaggcctgacggcccagctgacccggccaagcagggcccactgcgcaccagtgcccggggcctgtcccggaggctgcagagctgctactgctgtgatggccgggaggatgggggcgaggaggcagccccagccgacaagggtcactgggtgcatgaggcctgtgccgtgtggaccggcggcgtctacctggtggccgggaagctctttgggctgcaggaggccatgaaggtggccgtggacatgcacggtggcactgtggctctggcgcctggtgacttctccctccccggcctcaggtttgcttcactcttccaagggccttcttggtgtgactgtcctgtcctggccacgtccactccaagcagctggtccagatgtgttccagctgccaagaagccggggccaccattgggtgctgccacaaaggatgcctccacacctaccactacccgtgtgccagcgatgcaggtacgagcccgcccaggaacaggagggcattggagcccatccaagcagtccagggggaccctccctgggcacagctccccaaacccaggccccatctcactcttcagtttccctcctctcttgccccagcaattcttttatccttctgtctgcctagacctctgctgggcaatgccagggacatggaaatgaggcattccccaggcacctgcttgaggagtgcccagagcagtgagggaagatagaagcataaattacaatgtgg

SEQ ID NO: 219713 - DNA, 7662 bp, Artificial Sequence
  derived and/or modified sequence
cccgcggacaccaggcaggcccggccgggtgcgcggccaaggcccgctccccgcgtccccgggcgccgcccccgcccgcggctgggctccgagagacgagtgggagagcgagtgcagcgagggcgagaggcgagccgagcaggccgccctgcccgcggccctagcgccggcgcgaggagggggcgccgcggcccaccctccttcctgcctggccgcgggccggccgggccgccgcgccccgacccccatggccacccaggcctccgggccgcgaagtcgcagcgccagacccaaggcccccgagtgagcgcgggcgccgaggatctcatctggccaccgcgttctggaagaggcgagagggagagcgtgcgcgagaggagagagacggcgggggaaagggagacggcgagacgcgcagcgccggcgcccgggagacccaggaggagcccgcagataaccagcccgagtcatgcagtcttttcgagaaaggtgtggtttccatggcaaacaacagaactaccagcagacctcgcaggaaacatcacgcctagagaattacaggcagccgagtcaggccgggctaagctgcgaccggcagcggctgctcgccaaggactattataacccgcagccttacccgagctatgagggtggcgctggcacgccctctggcactgcagccgcggtggccgccgacaagtaccaccgaggcagcaaggccctgcccacacagcaaggcctgcaggggaggccggctttccctggctacggcgtccaggacagcagcccctacccaggccgctatgctggtgaggagagccttcaggcttggggggccccacagccaccacccccacagccgcagccactacctgcaggggtggccaagtatgatgagaacttgatgaaaaagacagcagtgccccccagcaggcagtatgcagagcagggcgcccaggtgccctttcggactcactccctgcacgtccagcagccaccgccgccccagcagcccctggcataccccaagctccaaaggcagaagctgcagaacgacattgcctcccctctgcccttcccccagggtacccactttcctcagcattcccagtccttccccacctcctccacctactcctcctctgtccagggtggtgggcagggggcccactcctataagagttgcacagcaccgactgcccagccccatgacaggccgctgactgccagctccagcctggccccggggcagcgggtccagaatcttcatgcctaccagtcgggccgcctcagctatgaccagcagcagcagcagcagcagcagcagcagcagcagcagcaagcccttcagagccggcaccatgcccaggaaaccctccattaccaaaacctcgccaagtatcagcactacgggcagcaaggccagggctactgccagccggacgcagccgtccggaccccagagcagtactaccagaccttcagccccagctccagccactcacccgcccgctccgtgggccgctcaccttcctacagttccacaccgtcgccgctgatgccaaacctggagaactttccctacagccagcagccgctcagcaccggggccttccccgcagggatcactgaccacagccacttcatgcccctgctcaatccctccccaacggatgccaccagctctgtggacacccaggctggcaactgcaagccccttcagaaggacaagctccctgagaacctgctgtcggatctcagcctgcagagcctcacggcgctgacctcacaggtggagaacatctccaacaccgtccagcagctgctgctctccaaggctgctgtgccgcagaagaaaggtgtcaagaacctcgtgtccaggaccccagagcagcataaaagccagcactgcagccccgaagggagcggctactcagccgagcccgcaggcacaccgctgtcagagccgccgagcagcacgccacagtccacgcatgcggagccgcaggaggccgactacctgagcggctccgaggacccactggagcgcagcttcctctactgcaaccaggcccgtggcagccctgccagggtcaacagcaactcgaaggccaagcccgagtccgtgtccacctgttctgtgacctctcctgacgacatgtccaccaaatctgacgactccttccagagcctacacggcagtctgccgctcgacagcttctccaagttcgtggcgggtgagcgggactgtccgcggctgctgctcagcgccctggcacaggaggacctggcctccgagatcctggggctgcaggaagccatcggtgagaaggccgacaaagcttgggctgaagcacccagcctggtcaaggacagcagcaagccacccttctcgctggagaaccacagcgcctgcctggactctgtggccaagagtgcgtggccccggcctggggagccggaggccctgcccgactccttgcagctggacaagggcggcaatgccaaggacttcagcccagggctgtttgaagacccttccgtggccttcgctacgcctgaccccaaaaagacaactggtcctctctcctttggtaccaagcccacccttggggttcctgctccagaccccactacagcagcttttgactgtttcccggacacaaccgctgccagctcagcggacagcgccaacccctttgcctggccagaggaaaacctgggggatgcttgtcccaggtggggattgcaccctggcgagcttaccaagggcctggagcagggtgggaaggcctcagatggcatcagcaaaggggacacccatgaggcttcggcctgcctgggcttccaggaggaggacccccctggggagaaggtggcctcgttgcccggggacttcaagcaggaggaggtgggtggggtgaaggaggaggcaggtgggctgctgcagtgccccgaggtggccaaggctgaccggtggctggaggacagccggcactgctgttccaccgccgacttcggggacctcccactgctgccacccaccagcaggaaggaggacctggaagctgaggaggagtactcctccctatgtgagctcctgggcagccccgagcagaggcctggcatgcaggacccgctgtcacccaaggccccactcatctgcaccaaggaggaggtggaggaggtgctggactccaaggccggctggggctctccgtgccacctctcaggggagtccgtcatcctgctgggccctacagtgggcaccgagtcaaaggtccagagctggtttgagtcctctctgtcacacatgaagccaggtgaagaggggcctgatggggagcgagctccaggggattccaccacctcggacgcctctctggcccagaagcccaacaagcctgctgtgcccgaggcgcccatcgcaaagaaagagcctgtgccacggggcaaaagcttacggagccgtcgggtgcaccgggggctgcccgaggccgaggactccccatgcagggcaccagtgctgcccaaagacctcttgctccctgaatcctgcacagggcccccccagggacagatggaaggggctggagccccaggccggggggcctcggaagggctccccaggatgtgtactcgttctctcacggccctgagtgagccccgcacgcccggacccccaggcctgaccaccacccctgcacccccagacaaactggggggcaagcagcgagccgccttcaagtcgggcaagcgggtggggaagccctcacccaaggctgcctccagccccagcaacccggccgccctgcctgtggcctccgacagcagcccgatgggctccaagaccaaggagacagactcacccagcacgcctggcaaggaccagcgctccatgatccttcggtcacgcaccaaaacccaggagatcttccactccaagcggcggaggccctctgagggccggctccccaactgccgtgccaccaagaagctcctcgacaacagccacttgcccgccacattcaaggtctccagcagcccccagaaggagggcagggtgagccagcgggcaagggtccccaaacctggtgcaggcagcaagctctctgaccggcccctccatgcgctcaaaaggaagtcggccttcatggcgccggtccccaccaagaagcggaacctggtcttgcggagccgcagcagcagcagcagcaacgccagtggcaatgggggagatgggaaggaggagaggcctgagggttcccccaccctcttcaagaggatgtcttctcccaagaaagccaagcccaccaagggcaatggcgagcctgccacaaagctcccacccccggagacccccgatgcctgcctcaagctcgcctctcgggcagccttccagggggccatgaagaccaaggtgctgccaccccggaagggccggggcctgaagctggaagccatcgtgcagaagatcacctcgcccagcctcaagaagttcgcatgtaaagcgccaggggcctctcctggtaatcctctgagcccatccctttccgacaaagaccgtgggctcaagggtgctgggggcagcccagtgggggtggaagaaggcctggtaaatgtgggcaccgggcagaagctcccaacttctggggctgatccgttatgcagaaatccaaccaacagatccttaaaaggcaaactcatgaacagtaagaaactgtcttctactgactgtttcaaaaccgaggccttcacatccccggaggccctgcagcctggggggactgccctggcgcctaagaagaggagccggaaaggccgggcaggggcccatggactctccaaaggcccgctggagaagcggccctatcttggcccggctctgctcctgactccccgagacagggccagtggcacacaaggggccagtgaggacaactctggtggaggaggcaagaagccaaagatggaggagctgggcctggcctcccagcccccggagggcaggccctgccagccccagacaagggcacagaaacagccaggccacaccaactacagcagctattccaagcggaagcgcctcactcggggccgggccaagaacaccacctcttcaccctgtaaggggcgtgccaagcgacgacgacagcagcaggtgctgcccctggatcccgcagagcctgaaatccgcctcaagtacatttcctcttgcaagcggctgaggtcagacagccggacccccgccttctcacccttcgtgcgggtggagaagcgagacgcgttcaccaccatatgcactgttgtcaactcccctggagatgcgcccaagccccacaggaagccttcctcctctgcctcctcttcctcatcctcgtcctcgttctccttggatgcagccggggcctccctggccacactccctggaggctccatcctgcagccgcggccctccttgcccctctcctccacgatgcacttggggcctgtggtttccaaggccctgagtacctcttgccttgtttgctgcctctgccaaaacccggccaacttcaaggaccttggggacctctgtgggccctactaccctgaacactgcctccccaaaaagaagccaaaactcaaggagaaggtgcggccagaaggcacctgtgaggaggcctcgctgccgcttgagagaacactcaaaggtcccgagtgtgcagctgccgccactgccgggaagccccccaggcctgacggcccagctgacccggccaagcagggcccactgcgcaccagtgcccggggcctgtcccggaggctgcagagctgctactgctgtgatggccgggaggatgggggcgaggaggcagccccagccgacaagggtcgcaaacatgagtgcagcaaggaggctccggcagagcccggcggggaggcccaggagcactgggtgcatgaggcctgtgccgtgtggaccggcggcgtctacctggtggccgggaagctctttgggctgcaggaggccatgaaggtggccgtggacatgatgtgttccagctgccaagaagccggggccaccattgggtgctgccacaaaggatgcctccacacctaccactacccgtgtgccagcgatgcaggttgcatattcatcgaagagaacttttctttgaaatgtcccaaacataagaggctgccgtagtaatccaccccaacggccggaggagccgccggagcccgcctgcccgcccgccgccgaaggagaggagccgcctgcgcagcccccgggcctttgagctgctcccagcgctggtccagagccgatccttgatccgggtcccggatcgtggatccggccgcctagggctcagacttgcggccccgggttgggaggaaaacccgttccggagccgcctgctcccggaaccggacggcacagggcgttcttgcccaccccaggggccaggcttgcggagggggagcccgcggagcggccagactccccggggcgctcagcctccggcgagggtgggagacggctttgtcctggggacactttccctctggaatctcaagacgacgtggcacacattccacgtgggtgctgccgccaccccagtcggtcgtggcgtgcagctgggagccctgggcttgggggtgggggtcgaaacagtactggaagaggcggagggcggctcctagctccgtggactaggcgggggagaaaggaagcctttctgagagcgggctaggccggcactggagaggccggagcctttggaacaaaccgtgcggaacgcgtccaggggccttcccgcccagcctttgccagatctctcgtgcggttcgggcaaagccggggtagacctgggctatgctcagttaggggttgcgggatccccgagtgtgggcgggactgggacaccctttggcctctgtttgtcccctttccagtcctccaccccacccctggagcccagcctgggagcgcaaaacccaagaagcggccagaacgcacctccggctccggcggacgcgcgaccgttgtgcaccaccagggaccgccgcgcctactctgcacgggagcagggacagcgctagatttcgtgtacaaaacctgtgtacccctctatatatatgttacatagaatgtatatatgttgggaacatgctcgcttctcccgtgtgtcgccgccgtgcgtcgtgcgcccgcaacagagccccaaccgggcctttgccgggtaaggggctaccgcgacgccacttgtccacgcagccaccaccggcccgggccagtccctgccagtccgtccgcctgtccgtccgtgtcctcagctctgtccacgcttcgataggcctgacgcagcccccagcccagggccgccctagcaacttcctgtacatatgactgtaaaatggtaaacgtgtgtattatatctggcctcgttatatagtgtatatatatgtatacatatacatatatataatatatatgaagactgtaaatgttaagacgactagtgttcttattagtatattgcttcacactgaagattgtgtgtatcgagctgtttctaaaagatgtttattttccttaagagtaaaaaacagtcattgcattcagaaaaaaaaaaaaaaaaaagtcaataaagatacaacgattgttttggaaaa

SEQ ID NO: 219714 - DNA, 2901 bp, Artificial Sequence
  derived and/or modified sequence
atgcagtcttttcgagaaaggtgtggtttccatggcaaacaacagaactaccagcagacctcgcaggaaacatcacgcctagagaattacaggcagccgagtcaggccgggctaagctgcgaccggcagcggctgctcgccaaggactattataacccgcagccttacccgagctatgagggtggcgctggcacgccctctggcactgcagccgcggtggccgccgacaagtaccaccgaggcagcaaggccctgcccacacagcaaggcctgcaggggaggccggctttccctggctacggcgtccaggacagcagcccctacccaggccgctatgctggtgaggagagccttcaggcttggggggccccacagccaccacccccacagccgcagccactacctgcaggggtggccaagtatgatgagaacttgatgaaaaagacagcagtgccccccagcaggcagtatgcagagcagggcgcccaggtgccctttcggactcactccctgcacgtccagcagccaccgccgccccagcagcccctggcataccccaagctccaaaggcagaagctgcagaacgacattgcctcccctctgcccttcccccagggtacccactttcctcagcattcccagtccttccccacctcctccacctactcctcctctgtccagggtggtgggcagggggcccactcctataagagttgcacagcaccgactgcccagccccatgacaggccgctgactgccagctccagcctggccccggggcagcgggtccagaatcttcatgcctaccagtcgggccgcctcagctatgaccagcagcagcagcagcagcagcagcagcagcagcagcagcaagcccttcagagccggcaccatgcccaggaaaccctccattaccaaaacctcgccaagtatcagcactacgggcagcaaggccagggctactgccagccggacgcagccgtccggaccccagagcagtactaccagaccttcagccccagctccagccactcacccgcccgctccgtgggccgctcaccttcctacagttccacaccgtcgccgctgatgccaaacctggagaactttccctacagccagcagccgctcagcaccggggccttccccgcagggatcactgaccacagccacttcatgcccctgctcaatccctccccaacggatgccaccagctctgtggacacccaggctggcaactgcaagccccttcagaaggacaagctccctgagaacctgctgtcggatctcagcctgcagagcctcacggcgctgacctcacaggtggagaacatctccaacaccgtccagcagctgctgctctccaaggctgctgtgccgcagaagaaaggtgtcaagaacctcgtgtccaggaccccagagcagcataaaagccagcactgcagccccgaagggagcggctactcagccgagcccgcaggcacaccgctgtcagagccgccgagcagcacgccacagtccacgcatgcggagccgcaggaggccgactacctgagcggctccgaggacccactggagcgcagcttcctctactgcaaccaggcccgtggcagccctgccagggtcaacagcaactcgaaggccaagcccgagtccgtgtccacctgttctgtgacctctcctgacgacatgtccaccaaatctgacgactccttccagagcctacacggcagtctgccgctcgacagcttctccaagttcgtggcgggtgagcgggactgtccgcggctgctgctcagcgccctggcacaggaggacctggcctccgagatcctggggctgcaggaagccatcggtgagaaggccgacaaagcttgggctgaagcacccagcctggtcaaggacagcagcaagccacccttctcgctggagaaccacagcgcctgcctggactctgtggccaagagtgcgtggccccggcctggggagccggaggccctgcccgactccttgcagctggacaagggcggcaatgccaaggacttcagcccagggctgtttgaagacccttccgtggccttcgctacgcctgaccccaaaaagacaactggtcctctctcctttggtaccaagcccacccttggggttcctgctccagaccccactacagcagcttttgactgtttcccggacacaaccgctgccagctcagcggacagcgccaacccctttgcctggccagaggaaaacctgggggatgcttgtcccaggtggggattgcaccctggcgagcttaccaagggcctggagcagggtgggaaggcctcagatggcatcagcaaaggggacacccatgaggcttcggcctgcctgggcttccaggaggaggacccccctggggagaaggtggcctcgttgcccggggacttcaagcaggaggaggtgggtggggtgaaggaggaggcaggtgggctgctgcagtgccccgaggtggccaaggctgaccggtggctggaggacagccggcactgctgttccaccgccgacttcggggacctcccactgctgccacccaccagcaggaaggaggacctggaagctgaggaggagtactcctccctatgtgagctcctgggcagccccgagcagaggcctggcatgcaggacccgctgtcacccaaggccccactcatctgcaccaaggaggaggtggaggaggtgctggactccaaggccggctggggctctccgtgccacctctcaggggagtccgtcatcctgctgggccctacagtgggcaccgagtcaaaggtccagagctggtttgaggcctcgttatatagtgtatatatatgtatacatatacatatatataatatatatgaagactgtaaatgttaa

SEQ ID NO: 219715 - DNA, 2928 bp, Artificial Sequence
  derived and/or modified sequence
ctgagatttagccgtgcgatgcccgcgcaggggcgggggccgcgggccaggggaggcgctcagagtccggagccgccgagcgagataaccagcccgagtcatgcagtcttttcgagaaaggtgtggtttccatggcaaacaacagaactaccagcagacctcgcaggaaacatcacgcctagagaattacaggcagccgagtcaggccgggctaagctgcgaccggcagcggctgctcgccaaggactattataacccgcagccttacccgagctatgagggtggcgctggcacgccctctggcactgcagccgcggtggccgccgacaagtaccaccgaggcagcaaggccctgcccacacagcaaggcctgcaggggaggccggctttccctggctacggcgtccaggacagcagcccctacccaggccgctatgctggtgaggagagccttcaggcttggggggccccacagccaccacccccacagccgcagccactacctgcaggggtggccaagtatgatgagaacttgatgaaaaagacagcagtgccccccagcaggcagtatgcagagcagggcgcccaggtgccctttcggactcactccctgcacgtccagcagccaccgccgccccagcagcccctggcataccccaagctccaaaggcagaagctgcagaacgacattgcctcccctctgcccttcccccagggtacccactttcctcagcattcccagtccttccccacctcctccacctactcctcctctgtccagggtggtgggcagggggcccactcctataagagttgcacagcaccgactgcccagccccatgacaggccgctgactgccagctccagcctggccccggggcagcgggtccagaatcttcatgcctaccagtcgggccgcctcagctatgaccagcagcagcagcagcagcagcagcagcagcagcagcagcaagcccttcagagccggcaccatgcccaggaaaccctccattaccaaaacctcgccaagtatcagcactacgggcagcaaggccagggctactgccagccggacgcagccgtccggaccccagagcagtactaccagaccttcagccccagctccagccactcacccgcccgctccgtgggccgctcaccttcctacagttccacaccgtcgccgctgatgccaaacctggagaactttccctacagccagcagccgctcagcaccggggccttccccgcagggatcactgaccacagccacttcatgcccctgctcaatccctccccaacggatgccaccagctctgtggacacccaggctggcaactgcaagccccttcagaaggacaagctccctgagaacctgctgtcggatctcagcctgcagagcctcacggcgctgacctcacaggtggagaacatctccaacaccgtccagcagctgctgctctccaaggctgctgtgccgcagaagaaaggtgtcaagaacctcgtgtccaggaccccagagcagcataaaagccagcactgcagccccgaagggagcggctactcagccgagcccgcaggcacaccgctgtcagagccgccgagcagcacgccacagtccacgcatgcggagccgcaggaggccgactacctgagcggctccgaggacccactggagcgcagcttcctctactgcaaccaggcccgtggcagccctgccagggtcaacagcaactcgaaggccaagcccgagtccgtgtccacctgttctgtgacctctcctgacgacatgtccaccaaatctgacgactccttccagagcctacacggcagtctgccgctcgacagcttctccaagttcgtggcgggtgagcgggactgtccgcggctgctgctcagcgccctggcacaggaggacctggcctccgagatcctggggctgcaggaagccatcggtgagaaggccgacaaagcttgggctgaagcacccagcctggtcaaggacagcagcaagccacccttctcgctggagaaccacagcgcctgcctggactctgtggccaagagtgcgtggccccggcctggggagccggaggccctgcccgactccttgcagctggacaagggcggcaatgccaaggacttcagcccagggctgtttgaagacccttccgtggccttcgctacgcctgaccccaaaaagacaactggtcctctctcctttggtaccaagcccacccttggggttcctgctccagaccccactacagcagcttttgactgtttcccggacacaaccgctgccagctcagcggacagcgccaacccctttgcctggccagaggaaaacctgggggatgcttgtcccaggtggggattgcaccctggcgagcttaccaagggcctggagcagggtgggaaggcctcagatggcatcagcaaaggggacacccatgaggcttcggcctgcctgggcttccaggaggaggacccccctggggagaaggtggcctcgttgcccggggacttcaagcaggaggaggtgggtggggtgaaggaggaggcaggtgggctgctgcagtgccccgaggtggccaaggctgaccggtggctggaggacagccggcactgctgttccaccgccgacttcggggacctcccactgctgccacccaccagcaggaaggaggacctggaagctgaggaggagtactcctccctatgtgagctcctgggcagccccgagcagaggcctggcatgcaggacccgctgtcacccaaggccccactcatctgcaccaaggaggaggtggaggaggtgctggactccaaggccggctggggctctccgtgccacctctcaggggagtccgtcatcctgctgggccctacagtgggcaccgagtcaaaggtccagagctggtttga

SEQ ID NO: 219716 - DNA, 6060 bp, Artificial Sequence
  derived and/or modified sequence
atgcagtcttttcgagaaaggtgtggtttccatggcaaacaacagaactaccagcagacctcgcaggaaacatcacgcctagagaattacaggcagccgagtcaggccgggctaagctgcgaccggcagcggctgctcgccaaggactattataacccgcagccttacccgagctatgagggtggcgctggcacgccctctggcactgcagccgcggtggccgccgacaagtaccaccgaggcagcaaggccctgcccacacagcaaggcctgcaggggaggccggctttccctggctacggcgtccaggacagcagcccctacccaggccgctatgctggtgaggagagccttcaggcttggggggccccacagccaccacccccacagccgcagccactacctgcaggggtggccaagtatgatgagaacttgatgaaaaagacagcagtgccccccagcaggcagtatgcagagcagggcgcccaggtgccctttcggactcactccctgcacgtccagcagccaccgccgccccagcagcccctggcataccccaagctccaaaggcagaagctgcagaacgacattgcctcccctctgcccttcccccagggtacccactttcctcagcattcccagtccttccccacctcctccacctactcctcctctgtccagggtggtgggcagggggcccactcctataagagttgcacagcaccgactgcccagccccatgacaggccgctgactgccagctccagcctggccccggggcagcgggtccagaatcttcatgcctaccagtcgggccgcctcagctatgaccagcagcagcagcagcagcagcagcagcagcagcagcagcaagcccttcagagccggcaccatgcccaggaaaccctccattaccaaaacctcgccaagtatcagcactacgggcagcaaggccagggctactgccagccggacgcagccgtccggaccccagagcagtactaccagaccttcagccccagctccagccactcacccgcccgctccgtgggccgctcaccttcctacagttccacaccgtcgccgctgatgccaaacctggagaactttccctacagccagcagccgctcagcaccggggccttccccgcagggatcactgaccacagccacttcatgcccctgctcaatccctccccaacggatgccaccagctctgtggacacccaggctggcaactgcaagccccttcagaaggacaagctccctgagaacctgctgtcggatctcagcctgcagagcctcacggcgctgacctcacaggtggagaacatctccaacaccgtccagcagctgctgctctccaaggctgctgtgccgcagaagaaaggtgtcaagaacctcgtgtccaggaccccagagcagcataaaagccagcactgcagccccgaagggagcggctactcagccgagcccgcaggcacaccgctgtcagagccgccgagcagcacgccacagtccacgcatgcggagccgcaggaggccgactacctgagcggctccgaggacccactggagcgcagcttcctctactgcaaccaggcccgtggcagccctgccagggtcaacagcaactcgaaggccaagcccgagtccgtgtccacctgttctgtgacctctcctgacgacatgtccaccaaatctgacgactccttccagagcctacacggcagtctgccgctcgacagcttctccaagttcgtggcgggtgagcgggactgtccgcggctgctgctcagcgccctggcacaggaggacctggcctccgagatcctggggctgcaggaagccatcggtgagaaggccgacaaagcttgggctgaagcacccagcctggtcaaggacagcagcaagccacccttctcgctggagaaccacagcgcctgcctggactctgtggccaagagtgcgtggccccggcctggggagccggaggccctgcccgactccttgcagctggacaagggcggcaatgccaaggacttcagcccagggctgtttgaagacccttccgtggccttcgctacgcctgaccccaaaaagacaactggtcctctctcctttggtaccaagcccacccttggggttcctgctccagaccccactacagcagcttttgactgtttcccggacacaaccgctgccagctcagcggacagcgccaacccctttgcctggccagaggaaaacctgggggatgcttgtcccaggtggggattgcaccctggcgagcttaccaagggcctggagcagggtgggaaggcctcagatggcatcagcaaaggggacacccatgaggcttcggcctgcctgggcttccaggaggaggacccccctggggagaaggtggcctcgttgcccggggacttcaagcaggaggaggtgggtggggtgaaggaggaggcaggtgggctgctgcagtgccccgaggtggccaaggctgaccggtggctggaggacagccggcactgctgttccaccgccgacttcggggacctcccactgctgccacccaccagcaggaaggaggacctggaagctgaggaggagtactcctccctatgtgagctcctgggcagccccgagcagaggcctggcatgcaggacccgctgtcacccaaggccccactcatctgcaccaaggaggaggtggaggaggtgctggactccaaggccggctggggctctccgtgccacctctcaggggagtccgtcatcctgctgggccctacagtgggcaccgagtcaaaggtccagagctggtttgagtcctctctgtcacacatgaagccaggtgaagaggggcctgatggggagcgagctccaggggattccaccacctcggacgcctctctggcccagaagcccaacaagcctgctgtgcccgaggcgcccatcgcaaagaaagagcctgtgccacggggcaaaagcttacggagccgtcgggtgcaccgggggctgcccgaggccgaggactccccatgcagggcaccagtgctgcccaaagacctcttgctccctgaatcctgcacagggcccccccagggacagatggaaggggctggagccccaggccggggggcctcggaagggctccccaggatgtgtactcgttctctcacggccctgagtgagccccgcacgcccggacccccaggcctgaccaccacccctgcacccccagacaaactggggggcaagcagcgagccgccttcaagtcgggcaagcgggtggggaagccctcacccaaggctgcctccagccccagcaacccggccgccctgcctgtggcctccgacagcagcccgatgggctccaagaccaaggagacagactcacccagcacgcctggcaaggaccagcgctccatgatccttcggtcacgcaccaaaacccaggagatcttccactccaagcggcggaggccctctgagggccggctccccaactgccgtgccaccaagaagctcctcgacaacagccacttgcccgccacattcaaggtctccagcagcccccagaaggagggcagggtgagccagcgggcaagggtccccaaacctggtgcaggcagcaagctctctgaccggcccctccatgcgctcaaaaggaagtcggccttcatggcgccggtccccaccaagaagcggaacctggtcttgcggagccgcagcagcagcagcagcaacgccagtggcaatgggggagatgggaaggaggagaggcctgagggttcccccaccctcttcaagaggatgtcttctcccaagaaagccaagcccaccaagggcaatggcgagcctgccacaaagctcccacccccggagacccccgatgcctgcctcaagctcgcctctcgggcagccttccagggggccatgaagaccaaggtgctgccaccccggaagggccggggcctgaagctggaagccatcgtgcagaagatcacctcgcccagcctcaagaagttcgcatgtaaagcgccaggggcctctcctggtaatcctctgagcccatccctttccgacaaagaccgtgggctcaagggtgctgggggcagcccagtgggggtggaagaaggcctggtaaatgtgggcaccgggcagaagctcccaacttctggggctgatccgttatgcagaaatccaaccaacagatccttaaaaggcaaactcatgaacagtaagaaactgtcttctactgactgtttcaaaaccgaggccttcacatccccggaggccctgcagcctggggggactgccctggcgcctaagaagaggagccggaaaggccgggcaggggcccatggactctccaaaggcccgctggagaagcggccctatcttggcccggctctgctcctgactccccgagacagggccagtggcacacaaggggccagtgaggacaactctggtggaggaggcaagaagccaaagatggaggagctgggcctggcctcccagcccccggagggcaggccctgccagccccagacaagggcacagaaacagccaggccacaccaactacagcagctattccaagcggaagcgcctcactcggggccgggccaagaacaccacctcttcaccctgtaaggggcgtgccaagcgacgacgacagcagcaggtgctgcccctggatcccgcagagcctgaaatccgcctcaagtacatttcctcttgcaagcggctgaggtcagacagccggacccccgccttctcacccttcgtgcgggtggagaagcgagacgcgttcaccaccatatgcactgttgtcaactcccctggagatgcgcccaagccccacaggaagccttcctcctctgcctcctcttcctcatcctcgtcctcgttctccttggatgcagccggggcctccctggccacactccctggaggctccatcctgcagccgcggccctccttgcccctctcctccacgatgcacttggggcctgtggtttccaaggccctgagtacctcttgccttgtttgctgcctctgccaaaacccggccaacttcaaggaccttggggacctctgtgggccctactaccctgaacactgcctccccaaaaagaagccaaaactcaaggagaaggtgcggccagaaggcacctgtgaggaggcctcgctgccgcttgagagaacactcaaaggtcccgagtgtgcagctgccgccactgccgggaagccccccaggcctgacggcccagctgacccggccaagcagggcccactgcgcaccagtgcccggggcctgtcccggaggctgcagagctgctactgctgtgatggccgggaggatgggggcgaggaggcagccccagccgacaagggtcgcaaacatgagtgcagcaaggaggctccggcagagcccggcggggaggcccaggagcactgggtgcatgaggcctgtgccgtgtggaccggcggcgtctacctggtggccgggaagctctttgggctgcaggaggccatgaaggtggccgtggacatgcacggtggcactgtggctctggcgcctggtgacttctccctccccggcctcaggtttgcttcactcttccaagggccttcttggtgtgactgtcctgtcctggccacgtccactccaagcagctggtccagatgtgttccagctgccaagaagccggggccaccattgggtgctgccacaaaggatgcctccacacctaccactacccgtgtgccagcgatgcaggtacgagcccgcccaggaacaggagggcattggagcccatccaagcagtccagggggaccctccctgggcacagctccccaaacccaggccccatctcactcttcagtttccctcctctcttgccccagcaattcttttatccttctgtctgcctagacctctgctgggcaatgccagggacatggaaatgaggcattccccaggcacctgcttgaggagtgcccagagcagtgagggaagatagaagcataaattacaatgtggaatgc

SEQ ID NO: 219717 - DNA, 4923 bp, Artificial Sequence
  derived and/or modified sequence
atgcagagcttcagagagagatgcggcttccacggcaagcagcagaactaccagcagaccagccaggagaccagcagactggagaactacagacagcccagccaggccggcctgagctgcgacagacagagactgctggccaaggactactacaacccccagccctaccccagctacgagggcggcgccggcacccccagcggcaccgccgccgccgtggccgccgacaagtaccacagaggcagcaaggccctgcccacccagcagggcctgcagggcagacccgccttccccggctacggcgtgcaggacagcagcccctaccccggcagatacgccggcgaggagagcctgcaggcctggggcgccccccagcccccccccccccagccccagcccctgcccgccggcgtggccaagtacgacgagaacctgatgaagaagaccgccgtgccccccagcagacagtacgccgagcagggcgcccaggtgcccttcagaacccacagcctgcacgtgcagcagcccccccccccccagcagcccctggcctaccccaagctgcagagacagaagctgcagaacgacatcgccagccccctgcccttcccccagggcacccacttcccccagcacagccagagcttccccaccagcagcacctacagcagcagcgtgcagggcggcggccagggcgcccacagctacaagagctgcaccgcccccaccgcccagccccacgacagacccctgaccgccagcagcagcctggcccccggccagagagtgcagaacctgcacgcctaccagagcggcagactgagctacgaccagcagcagcagcagcagcagcagcagcagcagcagcagcaggccctgcagagcagacaccacgcccaggagaccctgcactaccagaacctggccaagtaccagcactacggccagcagggccagggctactgccagcccgacgccgccgtgagaacccccgagcagtactaccagaccttcagccccagcagcagccacagccccgccagaagcgtgggcagaagccccagctacagcagcacccccagccccctgatgcccaacctggagaacttcccctacagccagcagcccctgagcaccggcgccttccccgccggcatcaccgaccacagccacttcatgcccctgctgaaccccagccccaccgacgccaccagcagcgtggacacccaggccggcaactgcaagcccctgcagaaggacaagctgcccgagaacctgctgagcgacctgagcctgcagagcctgaccgccctgaccagccaggtggagaacatcagcaacaccgtgcagcagctgctgctgagcaaggccgccgtgccccagaagaagggcgtgaagaacctggtgagcagaacccccgagcagcacaagagccagcactgcagccccgagggcagcggctacagcgccgagcccgccggcacccccctgagcgagccccccagcagcaccccccagagcacccacgccgagccccaggaggccgactacctgagcggcagcgaggaccccctggagagaagcttcctgtactgcaaccaggccagaggcagccccgccagagtgaacagcaacagcaaggccaagcccgagagcgtgagcacctgcagcgtgaccagccccgacgacatgagcaccaagagcgacgacagcttccagagcctgcacggcagcctgcccctggacagcttcagcaagttcgtggccggcgagagagactgccccagactgctgctgagcgccctggcccaggaggacctggccagcgagatcctgggcctgcaggaggccatcggcgagaaggccgacaaggcctgggccgaggcccccagcctggtgaaggacagcagcaagccccccttcagcctggagaaccacagcgcctgcctggacagcgtggccaagagcgcctggcccagacccggcgagcccgaggccctgcccgacagcctgcagctggacaagggcggcaacgccaaggacttcagccccggcctgttcgaggaccccagcgtggccttcgccacccccgaccccaagaagaccaccggccccctgagcttcggcaccaagcccaccctgggcgtgcccgcccccgaccccaccaccgccgccttcgactgcttccccgacaccaccgccgccagcagcgccgacagcgccaaccccttcgcctggcccgaggagaacctgggcgacgcctgccccagatggggcctgcaccccggcgagctgaccaagggcctggagcagggcggcaaggccagcgacggcatcagcaagggcgacacccacgaggccagcgcctgcctgggcttccaggaggaggacccccccggcgagaaggtggccagcctgcccggcgacttcaagcaggaggaggtgggcggcgtgaaggaggaggccggcggcctgctgcagtgccccgaggtggccaaggccgacagatggctggaggacagcagacactgctgcagcaccgccgacttcggcgacctgcccctgctgccccccaccagcagaaaggaggacctggaggccgaggaggagtacagcagcctgtgcgagctgctgggcagccccgagcagagacccggcatgcaggaccccctgagccccaaggcccccctgatctgcaccaaggaggaggtggaggaggtgctggacagcaaggccggctggggcagcccctgccacctgagcggcgagagcgtgatcctgctgggccccaccgtgggcaccgagagcaaggtgcagagctggttcgagagcagcctgagccacatgaagcccggcgaggagggccccgacggcgagagagcccccggcgacagcaccaccagcgacgccagcctggcccagaagcccaacaagcccgccgtgcccgaggcccccatcgccaagaaggagcccgtgcccagaggcaagagcctgagaagcagaagagtgcacagaggcctgcccgaggccgaggacagcccctgcagagcccccgtgctgcccaaggacctgctgctgcccgagagctgcaccggccccccccagggccagatggagggcgccggcgcccccggcagaggcgccagcgagggcctgcccagaatgtgcaccagaagcctgaccgccctgagcgagcccagaacccccggcccccccggcctgaccaccacccccgccccccccgacaagctgggcggcaagcagagagccgccttcaagagcggcaagagagtgggcaagcccagccccaaggccgccagcagccccagcaaccccgccgccctgcccgtggccagcgacagcagccccatgggcagcaagaccaaggagaccgacagccccagcacccccggcaaggaccagagaagcatgatcctgagaagcagaaccaagacccaggagatcttccacagcaagagaagaagacccagcgagggcagactgcccaactgcagagccaccaagaagctgctggacaacagccacctgcccgccaccttcaaggtgagcagcagcccccagaaggagggcagagtgagccagagagccagagtgcccaagcccggcgccggcagcaagctgagcgacagacccctgcacgccctgaagagaaagagcgccttcatggcccccgtgcccaccaagaagagaaacctggtgctgagaagcagaagcagcagcagcagcaacgccagcggcaacggcggcgacggcaaggaggagagacccgagggcagccccaccctgttcaagagaatgagcagccccaagaaggccaagcccaccaagggcaacggcgagcccgccaccaagctgcccccccccgagacccccgacgcctgcctgaagctggccagcagagccgccttccagggcgccatgaagaccaaggtgctgccccccagaaagggcagaggcctgaagctggaggccatcgtgcagaagatcaccagccccagcctgaagaagttcgcctgcaaggcccccggcgccagccccggcaaccccctgagccccagcctgagcgacaaggacagaggcctgaagggcgccggcggcagccccgtgggcgtggaggagggcctggtgaacgtgggcaccggccagaagctgcccaccagcggcgccgaccccctgtgcagaaaccccaccaacagaagcctgaagggcaagctgatgaacagcaagaagctgagcagcaccgactgcttcaagaccgaggccttcaccagccccgaggccctgcagcccggcggcaccgccctggcccccaagaagagaagcagaaagggcagagccggcgcccacggcctgagcaagggccccctggagaagagaccctacctgggccccgccctgctgctgacccccagagacagagccagcggcacccagggcgccagcgaggacaacagcggcggcggcggcaagaagcccaagatggaggagctgggcctggccagccagccccccgagggcagaccctgccagccccagaccagagcccagaagcagcccggccacaccaactacagcagctacagcaagagaaagagactgaccagaggcagagccaagaacaccaccagcagcccctgcaagggcagagccaagagaagaagacagcagcaggtgctgcccctggaccccgccgagcccgagatcagactgaagtacatcagcagctgcaagagactgagaagcgacagcagaacccccgccttcagccccttcgagcccagcctgggcgcccagaaccccagaagcggccagaacgccccccccgcccccgccgacgccagacccctgtgcaccaccagagacagaagagcctacagcgccagagagcagggccagagatag

SEQ ID NO: 219718 - DNA, 5589 bp, Artificial Sequence
  derived and/or modified sequence
atgcagagcttcagagagagatgcggcttccacggcaagcagcagaactaccagcagaccagccaggagaccagcagactggagaactacagacagcccagccaggccggcctgagctgcgacagacagagactgctggccaaggactactacaacccccagccctaccccagctacgagggcggcgccggcacccccagcggcaccgccgccgccgtggccgccgacaagtaccacagaggcagcaaggccctgcccacccagcagggcctgcagggcagacccgccttccccggctacggcgtgcaggacagcagcccctaccccggcagatacgccggcgaggagagcctgcaggcctggggcgccccccagcccccccccccccagccccagcccctgcccgccggcgtggccaagtacgacgagaacctgatgaagaagaccgccgtgccccccagcagacagtacgccgagcagggcgcccaggtgcccttcagaacccacagcctgcacgtgcagcagcccccccccccccagcagcccctggcctaccccaagctgcagagacagaagctgcagaacgacatcgccagccccctgcccttcccccagggctggtgggccggccacagctacaagagctgcaccgcccccaccgcccagccccacgacagacccctgaccgccagcagcagcctggcccccggccagagagtgcagaacctgcacgcctaccagagcggcagactgagctacgaccagcagcagcagcagcagcagcagcagcagcagcagcagcaggccctgcagagcagacaccacgcccaggagaccctgcactaccagaacctggccaagtaccagcactacggccagcagggccagggctactgccagcccgacgccgccgtgagaacccccgagcagtactaccagaccttcagccccagcagcagccacagccccgccagaagcgtgggcagaagccccagctacagcagcacccccagccccctgatgcccaacctggagaacttcccctacagccagcagcccctgagcaccggcgccttccccgccggcatcaccgaccacagccacttcatgcccctgctgaaccccagccccaccgacgccaccagcagcgtggacagcctgaccgccctgaccagccaggtggagaacatcagcaacaccgtgcagcagctgctgctgagcaaggccgccgtgccccagaagaagggcgtgaagaacctggtgagcagaacccccgagcagcacaagagccagcactgcagccccgagggcagcggctacagcgccgagcccgccggcacccccctgagcgagccccccagcagcaccccccagagcacccacgccgagccccaggaggccgactacctgagcggcagcgaggaccccctggagagaagcttcctgtactgcaaccaggccagaggcagccccgccagagtgaacagcaacagcaaggccaagcccgagagcgtgagcacctgcagcgtgaccagccccgacgacatgagcaccaagagcgacgacagcttccagagcctgcacggcagcctgcccctggacagcttcagcaagttcgtggccggcgagagagactgccccagactgctgctgagcgccctggcccaggaggacctggccagcgagatcctgggcctgcaggaggccatcggcgagaaggccgacaaggcctgggccgaggcccccagcctggtgaaggacagcagcaagccccccttcagcctggagaaccacagcgcctgcctggacagcgtggccaagagcgcctggcccagacccggcgagcccgaggccctgcccgacagcctgcagctggacaagggcggcaacgccaaggacttcagccccggcctgttcgaggaccccagcgtggccttcgccacccccgaccccaagaagaccaccggccccctgagcttcggcaccaagcccaccctgggcgtgcccgcccccgaccccaccaccgccgccttcgactgcttccccgacaccaccgccgccagcagcgccgacagcgccaaccccttcgcctggcccgaggagaacctgggcgacgcctgccccagatggggcctgcaccccggcgagctgaccaagggcctggagcagggcggcaaggccagcgacggcatcagcaagggcgacacccacgaggccagcgcctgcctgggcttccaggaggaggacccccccggcgagaaggtggccagcctgcccggcgacttcaagcaggaggaggtgggcggcgtgaaggaggaggccggcggcctgctgcagtgccccgaggtggccaaggccgacagatggctggaggacagcagacactgctgcagcaccgccgacttcggcgacctgcccctgctgccccccaccagcagaaaggaggacctggaggccgaggaggagtacagcagcctgtgcgagctgctgggcagccccgagcagagacccggcatgcaggaccccctgagccccaaggcccccctgatctgcaccaaggaggaggtggaggaggtgctggacagcaaggccggctggggcagcccctgccacctgagcggcgagagcgtgatcctgctgggccccaccgtgggcaccgagagcaaggtgcagagctggttcgagagcagcctgagccacatgaagcccggcgaggagggccccgacggcgagagagcccccggcgacagcaccaccagcgacgccagcctggcccagaagcccaacaagcccgccgtgcccgaggcccccatcgccaagaaggagcccgtgcccagaggcaagagcctgagaagcagaagagtgcacagaggcctgcccgaggccgaggacagcccctgcagagcccccgtgctgcccaaggacctgctgctgcccgagagctgcaccggccccccccagggccagatggagggcgccggcgcccccggcagaggcgccagcgagggcctgcccagaatgtgcaccagaagcctgaccgccctgagcgagcccagaacccccggcccccccggcctgaccaccacccccgccccccccgacaagctgggcggcaagcagagagccgccttcaagagcggcaagagagtgggcaagcccagccccaaggccgccagcagccccagcaaccccgccgccctgcccgtggccagcgacagcagccccatgggcagcaagaccaaggagaccgacagccccagcacccccggcaaggaccagagaagcatgatcctgagaagcagaaccaagacccaggagatcttccacagcaagagaagaagacccagcgagggcagactgcccaactgcagagccaccaagaagctgctggacaacagccacctgcccgccaccttcaaggtgagcagcagcccccagaaggagggcagagtgagccagagagccagagtgcccaagcccggcgccggcagcaagctgagcgacagacccctgcacgccctgaagagaaagagcgccttcatggcccccgtgcccaccaagaagagaaacctggtgctgagaagcagaagcagcagcagcagcaacgccagcggcaacggcggcgacggcaaggaggagagacccgagggcagccccaccctgttcaagagaatgagcagccccaagaaggccaagcccaccaagggcaacggcgagcccgccaccaagctgcccccccccgagacccccgacgcctgcctgaagctggccagcagagccgccttccagggcgccatgaagaccaaggtgctgccccccagaaagggcagaggcctgaagctggaggccatcgtgcagaagatcaccagccccagcctgaagaagttcgcctgcaaggcccccggcgccagccccggcaaccccctgagccccagcctgagcgacaaggacagaggcctgaagggcgccggcggcagccccgtgggcgtggaggagggcctggtgaacgtgggcaccggccagaagctgcccaccagcggcgccgaccccctgtgcagaaaccccaccaacagaagcctgaagggcaagctgatgaacaacagagccagcggcacccagggcgccagcgaggacaacagcggcggcggcggcaagaagcccaagatggaggagctgggcctggccagccagccccccgagggcagaccctgccagccccagaccagagcccagaagcagcccggccacaccaactacagcagctacagcaagagaaagagactgaccagaggcagagccaagaacaccaccagcagcccctgcaagggcagagccaagagaagaagacagcagcaggtgctgcccctggaccccgccgagcccgagatcagactgaagtacatcagcagctgcaagagactgagaagcgacagcagaacccccgccttcagccccttcgtgagagtggagaagagagacgccttcaccaccatctgcaccgtggtgaacagccccggcgacgcccccaagccccacagaaagcccagcagcagcgccagcagcagcagcagcagcagcagcttcagcctggacgccgccggcgccagcctggccaccctgcccggcggcagcatcctgcagcccagacccagcctgcccctgagcagcaccatgcacctgggccccgtggtgagcaaggccctgagcaccagctgcctggtgtgctgcctgtgccagaaccccgccaacttcaaggacctgggcgacctgtgcggcccctactaccccgagcactgcctgcccaagaagaagcccaagctgaaggagaaggtgagacccgagggcacctgcgaggaggccagcctgcccctggagagaaccctgaagggccccgagtgcgccgccgccgccaccgccggcaagccccccagacccgacggccccgccgaccccgccaagcagggccccctgagaaccagcgccagaggcctgagcagaagactgcagagctgctactgctgcgacggcagagaggacggcggcgaggaggccgcccccgccgacaagggccactgggtgcacgaggcctgcgccgtgtggaccggcggcgtgtacctggtggccggcaagctgttcggcctgcaggaggccatgaaggtggccgtggacatgcacggcggcaccgtggccctggcccccggcgacttcagcctgcccggcctgagattcgccagcctgttccagggccccagctggtgcgactgccccgtgctggccaccagcacccccagcagctggagcagatgcgtgcccgccgccaagaagcccggcccccccctgggcgccgccaccaaggacgccagcacccccaccaccaccagagtgcccgccatgcaggtgagagccagacccggcaccggcggccactggagccccagcaagcagagcagaggcaccctgcccggccacagcagccccaaccccggccccatcagcctgttcagcttcccccccctgctgccccagcagttcttctaccccagcgtgtgcctggacctgtgctgggccatgcccggcacctggaagtag

SEQ ID NO: 219719 - DNA, 5721 bp, Artificial Sequence
  derived and/or modified sequence
atgcagagcttcagagagagatgcggcttccacggcaagcagcagaactaccagcagaccagccaggagaccagcagactggagaactacagacagcccagccaggccggcctgagctgcgacagacagagactgctggccaaggactactacaacccccagccctaccccagctacgagggcggcgccggcacccccagcggcaccgccgccgccgtggccgccgacaagtaccacagaggcagcaaggccctgcccacccagcagggcctgcagggcagacccgccttccccggctacggcgtgcaggacagcagcccctaccccggcagatacgccggcgaggagagcctgcaggcctggggcgccccccagcccccccccccccagccccagcccctgcccgccggcgtggccaagtacgacgagaacctgatgaagaagaccgccgtgccccccagcagacagtacgccgagcagggcgcccaggtgcccttcagaacccacagcctgcacgtgcagcagcccccccccccccagcagcccctggcctaccccaagctgcagagacagaagctgcagaacgacatcgccagccccctgcccttcccccagggcacccacttcccccagcacagccagagcttccccaccagcagcacctacagcagcagcgtgcagggcggcggccagggcgcccacagctacaagagctgcaccgcccccaccgcccagccccacgacagacccctgaccgccagcagcagcctggcccccggccagagagtgcagaacctgcacgcctaccagagcggcagactgagctacgaccagcagcagcagcagcagcagcagcagcagcagcagcagcaggccctgcagagcagacaccacgcccaggagaccctgcactaccagaacctggccaagtaccagcactacggccagcagggccagggctactgccagcccgacgccgccgtgagaacccccgagcagtactaccagaccttcagccccagcagcagccacagccccgccagaagcgtgggcagaagccccagctacagcagcacccccagccccctgatgcccaacctggagaacttcccctacagccagcagcccctgagcaccggcgccttccccgccggcatcaccgaccacagccacttcatgcccctgctgaaccccagccccaccgacgccaccagcagcgtggacacccaggccggcaactgcaagcccctgcagaaggacaagctgcccgagaacctgctgagcgacctgagcctgcagagcctgaccgccctgaccagccaggtggagaacatcagcaacaccgtgcagcagctgctgctgagcaaggccgccgtgccccagaagaagggcgtgaagaacctggtgagcagaacccccgagcagcacaagagccagcactgcagccccgagggcagcggctacagcgccgagcccgccggcacccccctgagcgagccccccagcagcaccccccagagcacccacgccgagccccaggaggccgactacctgagcggcagcgaggaccccctggagagaagcttcctgtactgcaaccaggccagaggcagccccgccagagtgaacagcaacagcaaggccaagcccgagagcgtgagcacctgcagcgtgaccagccccgacgacatgagcaccaagagcgacgacagcttccagagcctgcacggcagcctgcccctggacagcttcagcaagttcgtggccggcgagagagactgccccagactgctgctgagcgccctggcccaggaggacctggccagcgagatcctgggcctgcaggaggccatcggcgagaaggccgacaaggcctgggccgaggcccccagcctggtgaaggacagcagcaagccccccttcagcctggagaaccacagcgcctgcctggacagcgtggccaagagcgcctggcccagacccggcgagcccgaggccctgcccgacagcctgcagctggacaagggcggcaacgccaaggacttcagccccggcctgttcgaggaccccagcgtggccttcgccacccccgaccccaagaagaccaccggccccctgagcttcggcaccaagcccaccctgggcgtgcccgcccccgaccccaccaccgccgccttcgactgcttccccgacaccaccgccgccagcagcgccgacagcgccaaccccttcgcctggcccgaggagaacctgggcgacgcctgccccagatggggcctgcaccccggcgagctgaccaagggcctggagcagggcggcaaggccagcgacggcatcagcaagggcgacacccacgaggccagcgcctgcctgggcttccaggaggaggacccccccggcgagaaggtggccagcctgcccggcgacttcaagcaggaggaggtgggcggcgtgaaggaggaggccggcggcctgctgcagtgccccgaggtggccaaggccgacagatggctggaggacagcagacactgctgcagcaccgccgacttcggcgacctgcccctgctgccccccaccagcagaaaggaggacctggaggccgaggaggagtacagcagcctgtgcgagctgctgggcagccccgagcagagacccggcatgcaggaccccctgagccccaaggcccccctgatctgcaccaaggaggaggtggaggaggtgctggacagcaaggccggctggggcagcccctgccacctgagcggcgagagcgtgatcctgctgggccccaccgtgggcaccgagagcaaggtgcagagctggttcgagagcagcctgagccacatgaagcccggcgaggagggccccgacggcgagagagcccccggcgacagcaccaccagcgacgccagcctggcccagaagcccaacaagcccgccgtgcccgaggcccccatcgccaagaaggagcccgtgcccagaggcaagagcctgagaagcagaagagtgcacagaggcctgcccgaggccgaggacagcccctgcagagcccccgtgctgcccaaggacctgctgctgcccgagagctgcaccggccccccccagggccagatggagggcgccggcgcccccggcagaggcgccagcgagggcctgcccagaatgtgcaccagaagcctgaccgccctgagcgagcccagaacccccggcccccccggcctgaccaccacccccgccccccccgacaagctgggcggcaagcagagagccgccttcaagagcggcaagagagtgggcaagcccagccccaaggccgccagcagccccagcaaccccgccgccctgcccgtggccagcgacagcagccccatgggcagcaagaccaaggagaccgacagccccagcacccccggcaaggaccagagaagcatgatcctgagaagcagaaccaagacccaggagatcttccacagcaagagaagaagacccagcgagggcagactgcccaactgcagagccaccaagaagctgctggacaacagccacctgcccgccaccttcaaggtgagcagcagcccccagaaggagggcagagtgagccagagagccagagtgcccaagcccggcgccggcagcaagctgagcgacagacccctgcacgccctgaagagaaagagcgccttcatggcccccgtgcccaccaagaagagaaacctggtgctgagaagcagaagcagcagcagcagcaacgccagcggcaacggcggcgacggcaaggaggagagacccgagggcagccccaccctgttcaagagaatgagcagccccaagaaggccaagcccaccaagggcaacggcgagcccgccaccaagctgcccccccccgagacccccgacgcctgcctgaagctggccagcagagccgccttccagggcgccatgaagaccaaggtgctgccccccagaaagggcagaggcctgaagctggaggccatcgtgcagaagatcaccagccccagcctgaagaagttcgcctgcaaggcccccggcgccagccccggcaaccccctgagccccagcctgagcgacaaggacagaggcctgaagggcgccggcggcagccccgtgggcgtggaggagggcctggtgaacgtgggcaccggccagaagctgcccaccagcggcgccgaccccctgtgcagaaaccccaccaacagaagcctgaagggcaagctgatgaacagcaagaagctgagcagcaccgactgcttcaagaccgaggccttcaccagccccgaggccctgcagcccggcggcaccgccctggcccccaagaagagaagcagaaagggcagagccggcgcccacggcctgagcaagggccccctggagaagagaccctacctgggccccgccctgctgctgacccccagagacagagccagcggcacccagggcgccagcgaggacaacagcggcggcggcggcaagaagcccaagatggaggagctgggcctggccagccagccccccgagggcagaccctgccagccccagaccagagcccagaagcagcccggccacaccaactacagcagctacagcaagagaaagagactgaccagaggcagagccaagaacaccaccagcagcccctgcaagggcagagccaagagaagaagacagcagcaggtgctgcccctggaccccgccgagcccgagatcagactgaagtacatcagcagctgcaagagactgagaagcgacagcagaacccccgccttcagccccttcgtgagagtggagaagagagacgccttcaccaccatctgcaccgtggtgaacagccccggcgacgcccccaagccccacagaaagcccagcagcagcgccagcagcagcagcagcagcagcagcttcagcctggacgccgccggcgccagcctggccaccctgcccggcggcagcatcctgcagcccagacccagcctgcccctgagcagcaccatgcacctgggccccgtggtgagcaaggccctgagcaccagctgcctggtgtgctgcctgtgccagaaccccgccaacttcaaggacctgggcgacctgtgcggcccctactaccccgagcactgcctgcccaagaagaagcccaagctgaaggagaaggtgagacccgagggcacctgcgaggaggccagcctgcccctggagagaaccctgaagggccccgagtgcgccgccgccgccaccgccggcaagccccccagacccgacggccccgccgaccccgccaagcagggccccctgagaaccagcgccagaggcctgagcagaagactgcagagctgctactgctgcgacggcagagaggacggcggcgaggaggccgcccccgccgacaagggcagaaagcacgagtgcagcaaggaggcccccgccgagcccggcggcgaggcccaggagcactgggtgcacgaggcctgcgccgtgtggaccggcggcgtgtacctggtggccggcaagctgttcggcctgcaggaggccatgaaggtggccgtggacatgatgtgcagcagctgccaggaggccggcgccaccatcggctgctgccacaagggctgcctgcacacctaccactacccctgcgccagcgacgccggctgcatcttcatcgaggagaacttcagcctgaagtgccccaagcacaagagactgccctag

SEQ ID NO: 219720 - DNA, 2901 bp, Artificial Sequence
  derived and/or modified sequence
atgcagagcttcagagagagatgcggcttccacggcaagcagcagaactaccagcagaccagccaggagaccagcagactggagaactacagacagcccagccaggccggcctgagctgcgacagacagagactgctggccaaggactactacaacccccagccctaccccagctacgagggcggcgccggcacccccagcggcaccgccgccgccgtggccgccgacaagtaccacagaggcagcaaggccctgcccacccagcagggcctgcagggcagacccgccttccccggctacggcgtgcaggacagcagcccctaccccggcagatacgccggcgaggagagcctgcaggcctggggcgccccccagcccccccccccccagccccagcccctgcccgccggcgtggccaagtacgacgagaacctgatgaagaagaccgccgtgccccccagcagacagtacgccgagcagggcgcccaggtgcccttcagaacccacagcctgcacgtgcagcagcccccccccccccagcagcccctggcctaccccaagctgcagagacagaagctgcagaacgacatcgccagccccctgcccttcccccagggcacccacttcccccagcacagccagagcttccccaccagcagcacctacagcagcagcgtgcagggcggcggccagggcgcccacagctacaagagctgcaccgcccccaccgcccagccccacgacagacccctgaccgccagcagcagcctggcccccggccagagagtgcagaacctgcacgcctaccagagcggcagactgagctacgaccagcagcagcagcagcagcagcagcagcagcagcagcagcaggccctgcagagcagacaccacgcccaggagaccctgcactaccagaacctggccaagtaccagcactacggccagcagggccagggctactgccagcccgacgccgccgtgagaacccccgagcagtactaccagaccttcagccccagcagcagccacagccccgccagaagcgtgggcagaagccccagctacagcagcacccccagccccctgatgcccaacctggagaacttcccctacagccagcagcccctgagcaccggcgccttccccgccggcatcaccgaccacagccacttcatgcccctgctgaaccccagccccaccgacgccaccagcagcgtggacacccaggccggcaactgcaagcccctgcagaaggacaagctgcccgagaacctgctgagcgacctgagcctgcagagcctgaccgccctgaccagccaggtggagaacatcagcaacaccgtgcagcagctgctgctgagcaaggccgccgtgccccagaagaagggcgtgaagaacctggtgagcagaacccccgagcagcacaagagccagcactgcagccccgagggcagcggctacagcgccgagcccgccggcacccccctgagcgagccccccagcagcaccccccagagcacccacgccgagccccaggaggccgactacctgagcggcagcgaggaccccctggagagaagcttcctgtactgcaaccaggccagaggcagccccgccagagtgaacagcaacagcaaggccaagcccgagagcgtgagcacctgcagcgtgaccagccccgacgacatgagcaccaagagcgacgacagcttccagagcctgcacggcagcctgcccctggacagcttcagcaagttcgtggccggcgagagagactgccccagactgctgctgagcgccctggcccaggaggacctggccagcgagatcctgggcctgcaggaggccatcggcgagaaggccgacaaggcctgggccgaggcccccagcctggtgaaggacagcagcaagccccccttcagcctggagaaccacagcgcctgcctggacagcgtggccaagagcgcctggcccagacccggcgagcccgaggccctgcccgacagcctgcagctggacaagggcggcaacgccaaggacttcagccccggcctgttcgaggaccccagcgtggccttcgccacccccgaccccaagaagaccaccggccccctgagcttcggcaccaagcccaccctgggcgtgcccgcccccgaccccaccaccgccgccttcgactgcttccccgacaccaccgccgccagcagcgccgacagcgccaaccccttcgcctggcccgaggagaacctgggcgacgcctgccccagatggggcctgcaccccggcgagctgaccaagggcctggagcagggcggcaaggccagcgacggcatcagcaagggcgacacccacgaggccagcgcctgcctgggcttccaggaggaggacccccccggcgagaaggtggccagcctgcccggcgacttcaagcaggaggaggtgggcggcgtgaaggaggaggccggcggcctgctgcagtgccccgaggtggccaaggccgacagatggctggaggacagcagacactgctgcagcaccgccgacttcggcgacctgcccctgctgccccccaccagcagaaaggaggacctggaggccgaggaggagtacagcagcctgtgcgagctgctgggcagccccgagcagagacccggcatgcaggaccccctgagccccaaggcccccctgatctgcaccaaggaggaggtggaggaggtgctggacagcaaggccggctggggcagcccctgccacctgagcggcgagagcgtgatcctgctgggccccaccgtgggcaccgagagcaaggtgcagagctggttcgaggccagcctgtacagcgtgtacatctgcatccacatccacatctacaacatctacgaggactgcaagtgctag

SEQ ID NO: 219721 - DNA, 2829 bp, Artificial Sequence
  derived and/or modified sequence
atgcagagcttcagagagagatgcggcttccacggcaagcagcagaactaccagcagaccagccaggagaccagcagactggagaactacagacagcccagccaggccggcctgagctgcgacagacagagactgctggccaaggactactacaacccccagccctaccccagctacgagggcggcgccggcacccccagcggcaccgccgccgccgtggccgccgacaagtaccacagaggcagcaaggccctgcccacccagcagggcctgcagggcagacccgccttccccggctacggcgtgcaggacagcagcccctaccccggcagatacgccggcgaggagagcctgcaggcctggggcgccccccagcccccccccccccagccccagcccctgcccgccggcgtggccaagtacgacgagaacctgatgaagaagaccgccgtgccccccagcagacagtacgccgagcagggcgcccaggtgcccttcagaacccacagcctgcacgtgcagcagcccccccccccccagcagcccctggcctaccccaagctgcagagacagaagctgcagaacgacatcgccagccccctgcccttcccccagggcacccacttcccccagcacagccagagcttccccaccagcagcacctacagcagcagcgtgcagggcggcggccagggcgcccacagctacaagagctgcaccgcccccaccgcccagccccacgacagacccctgaccgccagcagcagcctggcccccggccagagagtgcagaacctgcacgcctaccagagcggcagactgagctacgaccagcagcagcagcagcagcagcagcagcagcagcagcagcaggccctgcagagcagacaccacgcccaggagaccctgcactaccagaacctggccaagtaccagcactacggccagcagggccagggctactgccagcccgacgccgccgtgagaacccccgagcagtactaccagaccttcagccccagcagcagccacagccccgccagaagcgtgggcagaagccccagctacagcagcacccccagccccctgatgcccaacctggagaacttcccctacagccagcagcccctgagcaccggcgccttccccgccggcatcaccgaccacagccacttcatgcccctgctgaaccccagccccaccgacgccaccagcagcgtggacacccaggccggcaactgcaagcccctgcagaaggacaagctgcccgagaacctgctgagcgacctgagcctgcagagcctgaccgccctgaccagccaggtggagaacatcagcaacaccgtgcagcagctgctgctgagcaaggccgccgtgccccagaagaagggcgtgaagaacctggtgagcagaacccccgagcagcacaagagccagcactgcagccccgagggcagcggctacagcgccgagcccgccggcacccccctgagcgagccccccagcagcaccccccagagcacccacgccgagccccaggaggccgactacctgagcggcagcgaggaccccctggagagaagcttcctgtactgcaaccaggccagaggcagccccgccagagtgaacagcaacagcaaggccaagcccgagagcgtgagcacctgcagcgtgaccagccccgacgacatgagcaccaagagcgacgacagcttccagagcctgcacggcagcctgcccctggacagcttcagcaagttcgtggccggcgagagagactgccccagactgctgctgagcgccctggcccaggaggacctggccagcgagatcctgggcctgcaggaggccatcggcgagaaggccgacaaggcctgggccgaggcccccagcctggtgaaggacagcagcaagccccccttcagcctggagaaccacagcgcctgcctggacagcgtggccaagagcgcctggcccagacccggcgagcccgaggccctgcccgacagcctgcagctggacaagggcggcaacgccaaggacttcagccccggcctgttcgaggaccccagcgtggccttcgccacccccgaccccaagaagaccaccggccccctgagcttcggcaccaagcccaccctgggcgtgcccgcccccgaccccaccaccgccgccttcgactgcttccccgacaccaccgccgccagcagcgccgacagcgccaaccccttcgcctggcccgaggagaacctgggcgacgcctgccccagatggggcctgcaccccggcgagctgaccaagggcctggagcagggcggcaaggccagcgacggcatcagcaagggcgacacccacgaggccagcgcctgcctgggcttccaggaggaggacccccccggcgagaaggtggccagcctgcccggcgacttcaagcaggaggaggtgggcggcgtgaaggaggaggccggcggcctgctgcagtgccccgaggtggccaaggccgacagatggctggaggacagcagacactgctgcagcaccgccgacttcggcgacctgcccctgctgccccccaccagcagaaaggaggacctggaggccgaggaggagtacagcagcctgtgcgagctgctgggcagccccgagcagagacccggcatgcaggaccccctgagccccaaggcccccctgatctgcaccaaggaggaggtggaggaggtgctggacagcaaggccggctggggcagcccctgccacctgagcggcgagagcgtgatcctgctgggccccaccgtgggcaccgagagcaaggtgcagagctggttctag

SEQ ID NO: 219722 - DNA, 5982 bp, Artificial Sequence
  derived and/or modified sequence
atgcagagcttcagagagagatgcggcttccacggcaagcagcagaactaccagcagaccagccaggagaccagcagactggagaactacagacagcccagccaggccggcctgagctgcgacagacagagactgctggccaaggactactacaacccccagccctaccccagctacgagggcggcgccggcacccccagcggcaccgccgccgccgtggccgccgacaagtaccacagaggcagcaaggccctgcccacccagcagggcctgcagggcagacccgccttccccggctacggcgtgcaggacagcagcccctaccccggcagatacgccggcgaggagagcctgcaggcctggggcgccccccagcccccccccccccagccccagcccctgcccgccggcgtggccaagtacgacgagaacctgatgaagaagaccgccgtgccccccagcagacagtacgccgagcagggcgcccaggtgcccttcagaacccacagcctgcacgtgcagcagcccccccccccccagcagcccctggcctaccccaagctgcagagacagaagctgcagaacgacatcgccagccccctgcccttcccccagggcacccacttcccccagcacagccagagcttccccaccagcagcacctacagcagcagcgtgcagggcggcggccagggcgcccacagctacaagagctgcaccgcccccaccgcccagccccacgacagacccctgaccgccagcagcagcctggcccccggccagagagtgcagaacctgcacgcctaccagagcggcagactgagctacgaccagcagcagcagcagcagcagcagcagcagcagcagcagcaggccctgcagagcagacaccacgcccaggagaccctgcactaccagaacctggccaagtaccagcactacggccagcagggccagggctactgccagcccgacgccgccgtgagaacccccgagcagtactaccagaccttcagccccagcagcagccacagccccgccagaagcgtgggcagaagccccagctacagcagcacccccagccccctgatgcccaacctggagaacttcccctacagccagcagcccctgagcaccggcgccttccccgccggcatcaccgaccacagccacttcatgcccctgctgaaccccagccccaccgacgccaccagcagcgtggacacccaggccggcaactgcaagcccctgcagaaggacaagctgcccgagaacctgctgagcgacctgagcctgcagagcctgaccgccctgaccagccaggtggagaacatcagcaacaccgtgcagcagctgctgctgagcaaggccgccgtgccccagaagaagggcgtgaagaacctggtgagcagaacccccgagcagcacaagagccagcactgcagccccgagggcagcggctacagcgccgagcccgccggcacccccctgagcgagccccccagcagcaccccccagagcacccacgccgagccccaggaggccgactacctgagcggcagcgaggaccccctggagagaagcttcctgtactgcaaccaggccagaggcagccccgccagagtgaacagcaacagcaaggccaagcccgagagcgtgagcacctgcagcgtgaccagccccgacgacatgagcaccaagagcgacgacagcttccagagcctgcacggcagcctgcccctggacagcttcagcaagttcgtggccggcgagagagactgccccagactgctgctgagcgccctggcccaggaggacctggccagcgagatcctgggcctgcaggaggccatcggcgagaaggccgacaaggcctgggccgaggcccccagcctggtgaaggacagcagcaagccccccttcagcctggagaaccacagcgcctgcctggacagcgtggccaagagcgcctggcccagacccggcgagcccgaggccctgcccgacagcctgcagctggacaagggcggcaacgccaaggacttcagccccggcctgttcgaggaccccagcgtggccttcgccacccccgaccccaagaagaccaccggccccctgagcttcggcaccaagcccaccctgggcgtgcccgcccccgaccccaccaccgccgccttcgactgcttccccgacaccaccgccgccagcagcgccgacagcgccaaccccttcgcctggcccgaggagaacctgggcgacgcctgccccagatggggcctgcaccccggcgagctgaccaagggcctggagcagggcggcaaggccagcgacggcatcagcaagggcgacacccacgaggccagcgcctgcctgggcttccaggaggaggacccccccggcgagaaggtggccagcctgcccggcgacttcaagcaggaggaggtgggcggcgtgaaggaggaggccggcggcctgctgcagtgccccgaggtggccaaggccgacagatggctggaggacagcagacactgctgcagcaccgccgacttcggcgacctgcccctgctgccccccaccagcagaaaggaggacctggaggccgaggaggagtacagcagcctgtgcgagctgctgggcagccccgagcagagacccggcatgcaggaccccctgagccccaaggcccccctgatctgcaccaaggaggaggtggaggaggtgctggacagcaaggccggctggggcagcccctgccacctgagcggcgagagcgtgatcctgctgggccccaccgtgggcaccgagagcaaggtgcagagctggttcgagagcagcctgagccacatgaagcccggcgaggagggccccgacggcgagagagcccccggcgacagcaccaccagcgacgccagcctggcccagaagcccaacaagcccgccgtgcccgaggcccccatcgccaagaaggagcccgtgcccagaggcaagagcctgagaagcagaagagtgcacagaggcctgcccgaggccgaggacagcccctgcagagcccccgtgctgcccaaggacctgctgctgcccgagagctgcaccggccccccccagggccagatggagggcgccggcgcccccggcagaggcgccagcgagggcctgcccagaatgtgcaccagaagcctgaccgccctgagcgagcccagaacccccggcccccccggcctgaccaccacccccgccccccccgacaagctgggcggcaagcagagagccgccttcaagagcggcaagagagtgggcaagcccagccccaaggccgccagcagccccagcaaccccgccgccctgcccgtggccagcgacagcagccccatgggcagcaagaccaaggagaccgacagccccagcacccccggcaaggaccagagaagcatgatcctgagaagcagaaccaagacccaggagatcttccacagcaagagaagaagacccagcgagggcagactgcccaactgcagagccaccaagaagctgctggacaacagccacctgcccgccaccttcaaggtgagcagcagcccccagaaggagggcagagtgagccagagagccagagtgcccaagcccggcgccggcagcaagctgagcgacagacccctgcacgccctgaagagaaagagcgccttcatggcccccgtgcccaccaagaagagaaacctggtgctgagaagcagaagcagcagcagcagcaacgccagcggcaacggcggcgacggcaaggaggagagacccgagggcagccccaccctgttcaagagaatgagcagccccaagaaggccaagcccaccaagggcaacggcgagcccgccaccaagctgcccccccccgagacccccgacgcctgcctgaagctggccagcagagccgccttccagggcgccatgaagaccaaggtgctgccccccagaaagggcagaggcctgaagctggaggccatcgtgcagaagatcaccagccccagcctgaagaagttcgcctgcaaggcccccggcgccagccccggcaaccccctgagccccagcctgagcgacaaggacagaggcctgaagggcgccggcggcagccccgtgggcgtggaggagggcctggtgaacgtgggcaccggccagaagctgcccaccagcggcgccgaccccctgtgcagaaaccccaccaacagaagcctgaagggcaagctgatgaacagcaagaagctgagcagcaccgactgcttcaagaccgaggccttcaccagccccgaggccctgcagcccggcggcaccgccctggcccccaagaagagaagcagaaagggcagagccggcgcccacggcctgagcaagggccccctggagaagagaccctacctgggccccgccctgctgctgacccccagagacagagccagcggcacccagggcgccagcgaggacaacagcggcggcggcggcaagaagcccaagatggaggagctgggcctggccagccagccccccgagggcagaccctgccagccccagaccagagcccagaagcagcccggccacaccaactacagcagctacagcaagagaaagagactgaccagaggcagagccaagaacaccaccagcagcccctgcaagggcagagccaagagaagaagacagcagcaggtgctgcccctggaccccgccgagcccgagatcagactgaagtacatcagcagctgcaagagactgagaagcgacagcagaacccccgccttcagccccttcgtgagagtggagaagagagacgccttcaccaccatctgcaccgtggtgaacagccccggcgacgcccccaagccccacagaaagcccagcagcagcgccagcagcagcagcagcagcagcagcttcagcctggacgccgccggcgccagcctggccaccctgcccggcggcagcatcctgcagcccagacccagcctgcccctgagcagcaccatgcacctgggccccgtggtgagcaaggccctgagcaccagctgcctggtgtgctgcctgtgccagaaccccgccaacttcaaggacctgggcgacctgtgcggcccctactaccccgagcactgcctgcccaagaagaagcccaagctgaaggagaaggtgagacccgagggcacctgcgaggaggccagcctgcccctggagagaaccctgaagggccccgagtgcgccgccgccgccaccgccggcaagccccccagacccgacggccccgccgaccccgccaagcagggccccctgagaaccagcgccagaggcctgagcagaagactgcagagctgctactgctgcgacggcagagaggacggcggcgaggaggccgcccccgccgacaagggcagaaagcacgagtgcagcaaggaggcccccgccgagcccggcggcgaggcccaggagcactgggtgcacgaggcctgcgccgtgtggaccggcggcgtgtacctggtggccggcaagctgttcggcctgcaggaggccatgaaggtggccgtggacatgcacggcggcaccgtggccctggcccccggcgacttcagcctgcccggcctgagattcgccagcctgttccagggccccagctggtgcgactgccccgtgctggccaccagcacccccagcagctggagcagatgcgtgcccgccgccaagaagcccggcccccccctgggcgccgccaccaaggacgccagcacccccaccaccaccagagtgcccgccatgcaggtgagagccagacccggcaccggcggccactggagccccagcaagcagagcagaggcaccctgcccggccacagcagccccaaccccggccccatcagcctgttcagcttcccccccctgctgccccagcagttcttctaccccagcgtgtgcctggacctgtgctgggccatgcccggcacctggaagtag

SEQ ID NO: 219723 - protein, 379 aa, Artificial Sequence
  derived and/or modified sequence
MEQLSSANTRFALDLFLALSENNPAGNIFISPFSISSAMAMVFLGTRGNTAAQLSKTFHFNTVEEVHSRFQSLNADINKRGASYILKLANRLYGEKTYNFLPEFLVSTQKTYGADLASVDFQHASEDARKTINQWVKGQTEGKIPELLASGMVDNMTKLVLVNAIYFKGNWKDKFMKEATTNAPFRLNKKDRKTVKMMYQKKKFAYGYIEDLKCRVLELPYQGEELSMVILLPDDIEDESTGLKKIEEQLTLEKLHEWTKPENLDFIEVNVSLPRFKLEESYTLNSDLARLGVQDLFNSSKADLSGMSGARDIFISKIVHKSFVEVNEEGTEAAAATAGIATFCMLMPEENFTADHPFLFFIRHNSSGSILFLGRFSSP

SEQ ID NO: 219724 - protein, 228 aa, Artificial Sequence
  derived and/or modified sequence
MVDNMTKLVLVNAIYFKGNWKDKFMKEATTNAPFRLNKKDRKTVKMMYQKKKFAYGYIEDLKCRVLELPYQGEELSMVILLPDDIEDESTGLKKIEEQLTLEKLHEWTKPENLDFIEVNVSLPRFKLEESYTLNSDLARLGVQDLFNSSKADLSGMSGARDIFISKIVHKSFVEVNEEGTEAAAATAGIATFCMLMPEENFTADHPFLFFIRHNSSGSILFLGRFSSP

SEQ ID NO: 219725 - protein, 341 aa, Artificial Sequence
  derived and/or modified sequence
MAMVFLGTRGNTAAQLSKTFHFNTVEEVHSRFQSLNADINKRGASYILKLANRLYGEKTYNFLPEFLVSTQKTYGADLASVDFQHASEDARKTINQWVKGQTEGKIPELLASGMVDNMTKLVLVNAIYFKGNWKDKFMKEATTNAPFRLNKKDRKTVKMMYQKKKFAYGYIEDLKCRVLELPYQGEELSMVILLPDDIEDESTGLKKIEEQLTLEKLHEWTKPENLDFIEVNVSLPRFKLEESYTLNSDLARLGVQDLFNSSKADLSGMSGARDIFISKIVHKSFVEVNEEGTEAAAATAGIATFCMLMPEENFTADHPFLFFIRHNSSGSILFLGRFSSP

SEQ ID NO: 219726 - DNA, 1140 bp, Artificial Sequence
  derived and/or modified sequence
atggagcagctgagcagcgccaacaccagattcgccctggacctgttcctggccctgagcgagaacaaccccgccggcaacatcttcatcagccccttcagcatcagcagcgccatggccatggtgttcctgggcaccagaggcaacaccgccgcccagctgagcaagaccttccacttcaacaccgtggaggaggtgcacagcagattccagagcctgaacgccgacatcaacaagagaggcgccagctacatcctgaagctggccaacagactgtacggcgagaagacctacaacttcctgcccgagttcctggtgagcacccagaagacctacggcgccgacctggccagcgtggacttccagcacgccagcgaggacgccagaaagaccatcaaccagtgggtgaagggccagaccgagggcaagatccccgagctgctggccagcggcatggtggacaacatgaccaagctggtgctggtgaacgccatctacttcaagggcaactggaaggacaagttcatgaaggaggccaccaccaacgcccccttcagactgaacaagaaggacagaaagaccgtgaagatgatgtaccagaagaagaagttcgcctacggctacatcgaggacctgaagtgcagagtgctggagctgccctaccagggcgaggagctgagcatggtgatcctgctgcccgacgacatcgaggacgagagcaccggcctgaagaagatcgaggagcagctgaccctggagaagctgcacgagtggaccaagcccgagaacctggacttcatcgaggtgaacgtgagcctgcccagattcaagctggaggagagctacaccctgaacagcgacctggccagactgggcgtgcaggacctgttcaacagcagcaaggccgacctgagcggcatgagcggcgccagagacatcttcatcagcaagatcgtgcacaagagcttcgtggaggtgaacgaggagggcaccgaggccgccgccgccaccgccggcatcgccaccttctgcatgctgatgcccgaggagaacttcaccgccgaccaccccttcctgttcttcatcagacacaacagcagcggcagcatcctgttcctgggcagattcagcagcccctag

SEQ ID NO: 219727 - DNA, 1026 bp, Artificial Sequence
  derived and/or modified sequence
atggccatggtgttcctgggcaccagaggcaacaccgccgcccagctgagcaagaccttccacttcaacaccgtggaggaggtgcacagcagattccagagcctgaacgccgacatcaacaagagaggcgccagctacatcctgaagctggccaacagactgtacggcgagaagacctacaacttcctgcccgagttcctggtgagcacccagaagacctacggcgccgacctggccagcgtggacttccagcacgccagcgaggacgccagaaagaccatcaaccagtgggtgaagggccagaccgagggcaagatccccgagctgctggccagcggcatggtggacaacatgaccaagctggtgctggtgaacgccatctacttcaagggcaactggaaggacaagttcatgaaggaggccaccaccaacgcccccttcagactgaacaagaaggacagaaagaccgtgaagatgatgtaccagaagaagaagttcgcctacggctacatcgaggacctgaagtgcagagtgctggagctgccctaccagggcgaggagctgagcatggtgatcctgctgcccgacgacatcgaggacgagagcaccggcctgaagaagatcgaggagcagctgaccctggagaagctgcacgagtggaccaagcccgagaacctggacttcatcgaggtgaacgtgagcctgcccagattcaagctggaggagagctacaccctgaacagcgacctggccagactgggcgtgcaggacctgttcaacagcagcaaggccgacctgagcggcatgagcggcgccagagacatcttcatcagcaagatcgtgcacaagagcttcgtggaggtgaacgaggagggcaccgaggccgccgccgccaccgccggcatcgccaccttctgcatgctgatgcccgaggagaacttcaccgccgaccaccccttcctgttcttcatcagacacaacagcagcggcagcatcctgttcctgggcagattcagcagcccctag

SEQ ID NO: 219728 - DNA, 1140 bp, Artificial Sequence
  derived and/or modified sequence
atggagcaactttccagcgctaatacaaggtttgccctagacctgtttctggctctgtctgagaataatccggcagggaatattttcatttccccattcagtattagcagcgccatggccatggtcttcctgggcacacgagggaacactgccgcacagctgtccaagaccttccatttcaacacggttgaggaagttcattcccggttccaatctctgaatgcggacattaataagcgcggtgctagttacatacttaagctagccaaccggctatatggagagaaaacgtacaatttcctccctgaattcttggtatctacgcagaagacctatggcgccgatctggctagcgtagatttccagcacgcaagtgaggacgctagaaagacaattaatcagtgggtgaagggtcagactgagggtaaaatccctgaattgctggcctctggaatggtcgacaacatgacaaagctcgttctggtgaacgccatctacttcaagggaaattggaaagataagtttatgaaagaggcaaccaccaacgctcctttcaggctcaacaagaaggatcggaaaactgtgaaaatgatgtatcagaaaaaaaaattcgcttacggatacatcgaggacctcaaatgtagggtactcgagttaccttaccagggagaagagttaagcatggttatactcctgccagacgatattgaggacgaaagcaccggactgaagaagattgaggagcagctgaccttggaaaagctgcatgagtggaccaagcccgagaacctggactttattgaggtgaatgtgtctttgccgaggttcaagctggaagagagctataccctgaattctgatcttgcccggcttggtgtgcaagatctctttaatagttccaaagccgatctgtccggtatgtcaggggccagagacatctttatttctaagattgtgcacaaatcttttgttgaagtcaacgaagagggtactgaagcagcagccgccactgctggcatcgcaaccttctgtatgctaatgcctgaagaaaatttcaccgcggatcatccgtttctgttttttatccgccataatagcagcgggagtatcctattcctaggtcgtttcagttctccttag

SEQ ID NO: 219729 - DNA, 1026 bp, Artificial Sequence
  derived and/or modified sequence
atggccatggttttcttgggcactcgcggaaacactgctgcccaactgtctaagaccttccatttcaacacagtggaggaagtccactcccggttccagtctctgaatgctgacattaataagagaggcgcgagttatattttgaaattagccaaccgactctatggcgaaaaaacctataatttcctccctgagttcctggtatccacacaaaagacctacggggccgacctcgcctctgtcgattttcagcacgctagtgaggatgcccggaagaccattaatcagtgggttaaaggacagacagagggtaagattcctgagctgctcgcctccgggatggtggataacatgaccaagttggtgcttgtgaatgcgatctatttcaaggggaattggaaagacaaattcatgaaggaggcaaccactaacgctccatttaggctcaacaagaaggacagaaaaaccgttaaaatgatgtatcagaagaagaaattcgcttatggctacatcgaggacctgaagtgtcgggtgcttgagctgccataccagggcgaagagctcagcatggtgatccttctgcccgatgatattgaagacgaatcaaccggcctcaaaaagatcgaagaacagttaaccctagagaaactgcatgaatggaccaagcctgagaatctcgatttcatcgaagtgaatgtctccctccctagatttaagctggaagagtcttatacgttgaactccgatctggctcgccttggagtgcaagatctgtttaactcatccaaagctgacctcagtgggatgtctggagcacgcgacattttcatcagtaagatcgttcataagtccttcgtagaggtgaatgaggagggtacagaagctgcagccgcgaccgccggtatcgccaccttttgtatgctgatgcccgaggagaattttactgcggaccacccatttttgttcttcattcgccacaatagtagtggatccattctttttttgggaaggttctcgagcccatag

SEQ ID NO: 219730 - DNA, 1140 bp, Artificial Sequence
  derived and/or modified sequence
atggagcagctgagcagcgccaacaccaggtttgccctggacctcttcctggccctgtctgagaacaacccagctggcaacatcttcatcagccccttcagcatcagcagcgccatggccatggtgttcctgggcacccggggcaacacagctgcccagctgagcaagaccttccacttcaacacagtggaggaggtgcacagccgcttccagagcctgaatgctgacatcaacaagagaggagccagctacatcctgaagctggccaaccggctgtatggagagaagacctacaacttcctgcctgagttcctggtgtccacccagaagacctacggggctgacctggcctctgtggacttccagcacgcctctgaagatgccaggaagaccatcaaccagtgggtgaagggccagacagagggcaagatccctgagctgctggccagcggcatggtggacaacatgaccaagctggtgctggtgaatgccatctacttcaagggcaactggaaggacaagttcatgaaggaggccaccaccaatgcccccttccggctgaacaagaaggacaggaagacagtgaagatgatgtaccagaagaagaagtttgcctacggctacatcgaggacctgaagtgccgggtgctggagctgccctaccagggcgaggagctgtccatggtgatcctgctgcctgatgacattgaagatgagagcacaggcctgaagaagattgaggagcagctgaccctggagaagctgcacgagtggaccaagccagagaacctggacttcatcgaggtgaatgtgtccctgccccgcttcaagctggaggagagctacaccctgaacagcgacctggcccggctgggcgtgcaggacctcttcaacagcagcaaggctgacctgagcggcatgtctggggcccgggacatcttcatcagcaagatcgtgcacaagagctttgtggaggtgaatgaggagggcacagaagctgctgctgccacagctggcatcgccaccttctgcatgctgatgcctgaggagaacttcaccgctgaccaccccttcctgttcttcatccgccacaacagcagcggcagcatcctcttcctgggccgcttcagcagcccctag

SEQ ID NO: 219731 - DNA, 1026 bp, Artificial Sequence
  derived and/or modified sequence
atggccatggtgttcctgggcacccggggcaacacagctgcccagctgagcaagaccttccacttcaacacagtggaggaggtgcacagccgcttccagagcctgaatgctgacatcaacaagagaggagccagctacatcctgaagctggccaaccggctgtatggagagaagacctacaacttcctgcctgagttcctggtgtccacccagaagacctacggggctgacctggcctctgtggacttccagcacgcctctgaagatgccaggaagaccatcaaccagtgggtgaagggccagacagagggcaagatccctgagctgctggccagcggcatggtggacaacatgaccaagctggtgctggtgaatgccatctacttcaagggcaactggaaggacaagttcatgaaggaggccaccaccaatgcccccttccggctgaacaagaaggacaggaagacagtgaagatgatgtaccagaagaagaagtttgcctacggctacatcgaggacctgaagtgccgggtgctggagctgccctaccagggcgaggagctgtccatggtgatcctgctgcctgatgacattgaagatgagagcacaggcctgaagaagattgaggagcagctgaccctggagaagctgcacgagtggaccaagccagagaacctggacttcatcgaggtgaatgtgtccctgccccgcttcaagctggaggagagctacaccctgaacagcgacctggcccggctgggcgtgcaggacctcttcaacagcagcaaggctgacctgagcggcatgtctggggcccgggacatcttcatcagcaagatcgtgcacaagagctttgtggaggtgaatgaggagggcacagaagctgctgctgccacagctggcatcgccaccttctgcatgctgatgcctgaggagaacttcaccgctgaccaccccttcctgttcttcatccgccacaacagcagcggcagcatcctcttcctgggccgcttcagcagcccctag

SEQ ID NO: 219732 - DNA, 1140 bp, Artificial Sequence
  derived and/or modified sequence
atggagcagctgagcagcgccaacacccggttcgccctggacctgttcctcgccctgtctgagaataatccggctggcaacatctttatcagtccattttccatcagcagcgccatggccatggtgttcttaggaacccgcggaaacacagctgcacagctttcaaaaacattccactttaatactgtggaagaggtccacagtcgctttcagagcttaaatgccgatatcaataaacgaggtgctagctatatactgaaactggcaaacaggctgtatggagagaaaacatacaatttcctgcccgagtttcttgtatccacccagaaaacatatggagctgaccttgcctctgtcgatttccagcacgcctctgaagatgcaaggaagaccattaatcagtgggtgaaggggcagacggaagggaagattcctgagctcctcgcttcaggaatggtggacaatatgaccaagctcgttctggtgaatgctatttatttcaagggcaactggaaggacaaattcatgaaagaagcaacgactaacgcccctttcaggctgaataaaaaggatcgcaaaactgtgaagatgatgtatcagaaaaagaaattcgcctatggctacatcgaggacctaaagtgcagggtgctggagctcccatatcagggagaagagctttctatggtgattctgctgccggacgatattgaagatgaatcaacaggtctgaagaaaatcgaggaacagttaacactggaaaagctgcacgaatggactaaacccgagaacctggacttcatcgaggtcaatgtctcccttccacgcttcaagctggaagagtcctacactttaaattcagatctggcacgccttggagtccaagacttattcaactcttccaaagccgacctgtctgggatgtccggagccagagatatttttatctcaaagatagttcacaagagttttgtggaagtgaacgaggaaggaaccgaggctgccgctgccacagcagggatagccactttttgcatgctcatgcccgaggaaaactttacagccgaccacccctttctgtttttcatcaggcataactcaagtgggtcaattctgttccttgggaggttctcctctccatag

SEQ ID NO: 219733 - DNA, 1026 bp, Artificial Sequence
  derived and/or modified sequence
atggccatggtgttcctgggcacccggggcaacaccgccgcccagttgagcaaaacttttcactttaacacggttgaggaagtgcactcaagattccagtcactcaatgccgacattaataaaaggggagccagttacatcctgaaactggccaatcggctgtacggtgagaaaacttacaacttcctgcccgaattccttgtctctacgcagaaaacttatggagccgacctcgcctccgtagactttcagcacgcaagcgaggacgctagaaagacaatcaatcagtgggtcaagggccagaccgagggcaaaatccctgagttgctggcctctggcatggtggataatatgacaaaactggtcctagtcaatgccatctacttcaagggaaattggaaggataaattcatgaaagaagcgaccacgaacgcaccatttaggcttaataagaaggatcgaaaaacagtgaagatgatgtatcaaaagaagaagttcgcatatggttatattgaggatctgaagtgcagggtgctggagctaccataccaaggtgaagagctttccatggtcatcctgttaccagacgacattgaagatgagtccacaggcttaaagaaaattgaggaacagctgactttagaaaaacttcacgaatggaccaaaccggaaaatttggactttatcgaggtgaacgtttcactgccccgattcaagctcgaggagtcttacactctgaacagtgatttagcccgtctgggagtgcaggatctcttcaacagcagcaaagcggatcttagcggcatgtccggagcacgggatattttcattagcaagatcgtgcataagtcgttcgtcgaggtgaacgaggaaggtactgaggctgcggctgcaacagctggcatagctaccttctgtatgctaatgccagaagaaaatttcacagctgatcatcccttcctattctttatccggcataattcgagtggctctatactctttctcggtagattctcctccccgtag

SEQ ID NO: 219734 - DNA, 1140 bp, Artificial Sequence
  derived and/or modified sequence
atggagcagctgtcttctgccaatactaggtttgccctcgacctcttcctggccctttctgaaaacaatcctgctggtaatattttcatttctccgttcagcatctcttcagctatggctatggtcttcctcggcactcgcggaaatacggccgcacagctgtccaaaacctttcactttaacaccgtcgaagaagttcattcccgctttcagtccctcaatgcagacatcaataagagaggtgcctcatacatactaaagctcgctaatcgcttgtacggagaaaagacatacaacttcttgccggaattcttggttagtacccaaaaaacgtacggtgctgacctggctagcgtggacttccagcatgcttctgaagacgccagaaagacaattaaccagtgggtcaaaggccagaccgagggaaagattcctgagctcctcgcgagcggaatggtggataatatgacgaagctcgtgcttgtaaatgcaatttatttcaaaggtaattggaaagataaatttatgaaggaagcaactacaaatgctccattcagattaaataaaaaggacagaaagaccgtcaaaatgatgtatcagaaaaagaagttcgcatatggatacatcgaggacttgaaatgccgagtactggagctgccataccagggcgaggagctgagtatggtcatcctgctgccggatgacattgaagacgaatctaccggtctaaagaaaatagaggagcagttgactttggagaagctgcacgaatggaccaagcccgaaaacctcgatttcatcgaggtcaacgttagcctgccacgatttaagctggaagaatcctacacgttaaattcagaccttgcacgccttggcgtgcaagatttgtttaacagtagtaaggctgacctgtccggcatgagtggggctagggatatctttataagcaagattgttcataagtctttcgtagaagtcaacgaagagggcacagaagccgcagccgctactgctggaatagctacattctgtatgctaatgcctgaagaaaatttcacggcagaccatcccttccttttttttatccgacataatagctctggctctatccttttcctgggacggttctctagtccctag

SEQ ID NO: 219735 - DNA, 1026 bp, Artificial Sequence
  derived and/or modified sequence
atggccatggttttcctcggaactaggggcaacacagccgcacaattgagtaagaccttccacttcaatacagtagaggaagtccactcgaggtttcagagtctgaacgccgacatcaacaagagaggggcttcatacattcttaagcttgccaacaggctctacggggaaaagacttataatttccttccagaattcctggtcagcacccaaaaaacatacggagcagacctggcctccgtggattttcaacatgcatctgaagatgcaagaaagacaattaaccagtgggtcaagggccagaccgagggaaagatacctgaactactggcctccggcatggtggataatatgacgaagctggtgcttgttaatgcgatttattttaagggtaattggaaggacaaatttatgaaggaggccacaactaacgcacccttccgactgaataagaaagataggaaaaccgtgaagatgatgtaccagaagaagaaatttgcctacggatacatcgaggacctaaagtgtcgcgtactcgagctcccataccagggcgaagaattaagcatggtgatccttctccctgatgatatagaggatgaatccacaggtctgaagaagatcgaagagcaactgactcttgagaaactgcacgaatggaccaagcccgaaaacttagacttcattgaggtcaacgtgtcactgccgaggtttaaactagaagagagctatacactgaacagcgatctagcacgccttggcgtccaggatttatttaactcatcgaaagccgatctctccggcatgagcggcgctagagacatctttatctccaagatcgtccacaagtccttcgttgaggtgaacgaagagggtaccgaagccgcagccgctacagctggcatagctacgttctgtatgctgatgccagaggaaaatttcacagcagatcatcccttcctctttttcattagacataacagctccgggagcatcctgttcctgggtcgcttcagctctccgtag

SEQ ID NO: 219736 - DNA, 1140 bp, Artificial Sequence
  derived and/or modified sequence
atggagcagctatcaagcgcaaatacacgattcgctcttgatctgttcctagcactcagtgagaataacccagccggaaacatattcatttccccctttagtattagctcggccatggctatggtgtttctgggcacccgggggaataccgctgctcagctgtctaaaacttttcacttcaatactgttgaagaagtccattcccgctttcagtccctgaacgccgatattaataagagaggagcatcttacatcctcaagctggcaaatcgactttatggagagaagacttacaactttctgccagagttcctagtatctacccaaaaaacctacggagcagacctggcatccgtcgacttccaacacgctagtgaagacgctcggaaaactattaaccagtgggtcaagggccagacagaaggtaagattcccgagctgctggcgagcgggatggtggataatatgacgaagctggtcttggtgaatgccatttattttaaaggaaactggaaagataaatttatgaaggaagcaaccacaaatgccccctttagactcaacaagaaggataggaagaccgtgaaaatgatgtaccagaagaagaagtttgcctacggatacatcgaagacctgaaatgtcgcgtcctcgaactcccatatcaaggcgaggaactctccatggtgattctcctgcctgatgatattgaagatgaatccactggtctcaaaaagatcgaggaacagctgaccctagaaaagctccatgaatggacaaaacccgaaaatttagattttattgaggttaatgtcagccttccacgttttaaactcgaagaaagctataccttaaatagcgacttagcacgtctgggcgtccaagaccttttcaattcaagcaaagcggacttgtcagggatgagcggagcacgcgacatctttatctccaagatcgtgcataagagtttcgtagaagtgaatgaagaaggcacggaagccgcggccgcgactgcaggcatagcaacattctgcatgttaatgccagaggaaaattttacagccgaccacccttttctgttctttattcgtcataactcttccggaagcatattattcctcggccgctttagtagcccgtag

SEQ ID NO: 219737 - DNA, 1026 bp, Artificial Sequence
  derived and/or modified sequence
atggctatggtttttctaggaacacggggaaacaccgccgcccaactgagcaagaccttccactttaacaccgtcgaagaagtccatagcagattccagagcttaaatgccgatataaacaaacgcggcgccagttatatccttaagcttgcaaatagactgtatggggaaaaaacatacaacttcttaccagagttcctggtctcaactcagaagacctacggagccgatctggcttctgtagattttcagcacgcatcagaggatgccaggaaaactattaaccagtgggttaagggccagaccgaaggaaagatcccggagttgctggccagcggcatggttgacaatatgacaaaactggttcttgtgaacgccatatattttaagggcaactggaaagacaagttcatgaaggaagccacaactaatgccccattccgactcaataaaaaggatcggaaaacagtcaaaatgatgtatcagaaaaaaaagtttgcctacggttacattgaagatttgaagtgccgggtgctggagctaccttaccagggagaggagttgtcaatggttattctgttgcccgacgacatcgaggacgaatctaccggactgaaaaagattgaagaacagttgacacttgaaaaactgcacgaatggacaaaacccgagaatctcgactttatcgaagtcaacgtctctctcccgcggtttaaacttgaagagtcatataccttaaatagtgatctggcccggctcggcgtccaggatttatttaattctagcaaagctgatctttccggcatgtcaggggcccgagatattttcattagtaagatcgttcataaatccttcgtggaggtaaatgaagagggcacagaggccgctgctgccactgctgggattgctactttctgcatgctcatgccagaagagaactttaccgccgatcatccctttttgtttttcatcaggcacaatagctcaggtagtattctgtttctgggccgatttagttcaccctag

SEQ ID NO: 219738 - DNA, 1140 bp, Artificial Sequence
  derived and/or modified sequence
atggagcagctgtcttccgcaaacacgcgttttgccctggaccttttcctagcacttagcgagaataatcccgccggcaatatttttatctctccattttcaatctcatccgcaatggccatggtgtttcttgggacacgcggaaacacagccgcacaactttctaagacttttcattttaatactgtggaagaagtgcactcacgtttccaatctctaaatgccgatatcaataaacggggggcaagctacattctgaaattggcgaatagactgtacggagagaaaacttataactttttacccgagtttctcgtgtcaacacaaaagacctatggagctgatcttgcctctgtcgattttcaacacgccagtgaggatgcccgcaaaactatcaaccaatgggtgaaaggacaaactgaaggaaaaatacccgagctgctggcctccggaatggtggataatatgaccaaactcgtactggtcaatgccatttattttaagggaaactggaaggacaagtttatgaaagaagcaacgaccaatgcacccttccggttaaataagaaagacaggaagaccgtaaaaatgatgtaccagaagaagaagtttgcctacggatacatcgaagacctgaaatgtcgcgtcctcgaactcccatatcaaggcgaggaactctccatggtgattctcctgcctgatgatattgaagatgaatccactggtctcaaaaagatcgaggaacagctgaccctagaaaagctccatgaatggacaaaacccgaaaatttagattttattgaggttaatgtcagccttccacgttttaaactcgaagaaagctataccttaaatagcgacttagcacgtctgggcgtccaagaccttttcaattcaagcaaagcagatctgagcgggatgtcgggggcccgggacatattcatttccaaaatcgtgcacaagtcgttcgtggaagtcaatgaggaaggcacagaagctgccgctgcaaccgccggaatagctactttttgtatgctcatgccagaggaaaacttcacagcggaccaccccttcctgttttttatcaggcacaatagttcaggatccatactttttttaggcagattctcatccccatag

SEQ ID NO: 219739 - DNA, 1026 bp, Artificial Sequence
  derived and/or modified sequence
atggctatggtctttttaggcacacggggtaatacagctgcgcagctttcaaaaacgttccatttcaatacagtcgaagaagtgcactcccggtttcagtcacttaatgccgatatcaacaagaggggtgcatcatacattctcaaactggcaaaccgcctgtatggcgagaaaacttacaactttttgcccgaattcctcgtgagtacgcagaagacttatggtgctgatctcgcctccgtggacttccagcatgcatccgaagacgccagaaaaacaattaatcagtgggtcaaaggacaaacagaaggcaagattccagaactcctggccagcggcatggtcgataacatgaccaaactggtcctggtgaacgctatttatttcaaagggaattggaaggacaagtttatgaaagaagcaacaaccaacgccccttttcggctcaacaaaaaagaccgtaaaactgtgaaaatgatgtatcagaagaaaaaatttgcctacggttatatcgaagacctaaaatgtagagtgttggagctcccttatcagggcgaggaactgagtatggtcatcctattgcccgatgacattgaggacgaatctaccggactgaaaaagattgaagaacagttgacacttgaaaaactgcacgaatggacaaaacccgagaatctcgactttatcgaagtcaacgtctctctcccgcggtttaaacttgaagagtcatataccttaaatagtgatctggcccggctcggcgtccaggatttatttaattctagcaaagctgatctttccggcatgtcaggggcccgagatattttcattagtaagatcgttcataaatccttcgtggaggtaaatgaagagggcacagaggccgctgctgccactgctggtattgctaccttttgcatgctgatgcccgaagaaaatttcactgccgaccacccctttctcttcttcattagacataatagttccggaagcatcctgttcttaggaagattctcatccccttag

SEQ ID NO: 219740 - DNA, 2619 bp, Artificial Sequence
  derived and/or modified sequence
cgctcacttctgcttgcacttaggcgacctcgggagctcggactcctacgcagtcaccgggaagggccgccgccccgcccgcggctgctggcccgggtgacgcttccgcctgctataagagcagcggccctcggtgcctccttcctgacctcgcacccagctcggagcccggagcgtgcctcggcggcctgtcggttttcaccatggagcagctgagctcagcaaacacccgcttcgccttggacctgttcctggcgttgagtgagaacaatccggctggaaacatcttcatctctcccttcagcatttcatctgctatggccatggtttttctggggaccagaggtaacacggcagcacagctgtccaagactttccatttcaacacggttgaagaggttcattcaagattccagagtctgaatgctgatatcaacaaacgtggagcgtcttatattctgaaacttgctaatagattatatggagagaaaacttacaatttccttcctgagttcttggtttcgactcagaaaacatatggtgctgacctggccagtgtggattttcagcatgcctctgaagatgcaaggaagaccataaaccagtgggtcaaaggacagacagaaggaaaaattccggaactgttggcttcgggcatggttgataacatgaccaaacttgtgctagtaaatgccatctatttcaagggaaactggaaggataaattcatgaaagaagccacgacgaatgcaccattcagattgaataagaaagacagaaaaactgtgaaaatgatgtatcagaagaaaaaatttgcatatggctacatcgaggaccttaagtgccgtgtgctggaactgccttaccaaggcgaggagctcagcatggtcatcctgctgccggatgacattgaggacgagtccacgggcctgaagaagattgaggaacagttgactttggaaaagttgcatgagtggactaaacctgagaatctcgatttcattgaagttaatgtcagcttgcccaggttcaaactggaagagagttacactctcaactccgacctcgcccgcctaggtgtgcaggatctctttaacagtagcaaggctgatctgtctggcatgtcaggagccagagatatttttatatcaaaaattgtccacaagtcatttgtggaagtgaatgaagagggaacagaggcggcagctgccacagcaggcatcgcaactttctgcatgttgatgcccgaagaaaatttcactgccgaccatccattccttttctttattcggcataattcctcaggtagcatcctattcttggggagattttcttccccttagaagaaagagactgtagcaatacaaaaatcaagcttagtgctttattacctgagtttttaatagagccaatatgtcttatatctttaccaataaaaccactgttcagaaacaagtctttcattttctttgtaagtttggctctgttggctgtttacacccatgaattttggcatgggtatctatttttcttttttacattgaaaaaaatccagtggttgcttttgaatgcatcaagtaaagaagaagaaaagaatacatccgatgcgtagattcttgaccatgtagtaatctataaaattgctatatcctcctgatagccatgggaaaacatgataagatggtcatttattttgcagttagaattttggaagccacaaaatagacagacaccctgactgttgaagggaggtttaaaaacagatattcaattgaaatgtaagagagcaccccaattgagagcccaggttacgaagacaagcttgcctcgcctgacttttctgtcccttgttctgcaggattagtattctgttacagacctctagtttttagactcttcaattaaagggccaatggttataacctgcattcccttttttgttcttctttatgtataatatatagttcatgtggcgctgcatgaaatcaagaagtgggtgtcttaggataaaagataccaagagtctacaaaaataaccatgtagtaagataaactgctgaacaaaggttttactgttagccaccttctcatgtgttttcttttctctttttctttttctttctttctttcttttttttttttttgagacagagtcttgctctgttacccaggctggagtgcagtggcacgatctcagctcaccgcaacctctgcctcctgggttcaagtgattctcttgcttcagcctcctgagtagctgggattataggcatgcaccactaggcctggctaatttttgtatttttagtagagatggggtttttccatgttggccaggctggtcccgaactcctgacctcaggtgatccgcgcacctcagcctcccaaagtgctgggattacaggcatgagctaccatgcctggccttctcatgtgttttctgattaaggctcttgacttccaaggctgtgtggggagatggggtgggggctcttggactgatataaaactttgtcaaatgtagttctttgaatggagcttgaaacgccgcatattcttgctcccacaaggatagtgggcatcatgaattaataaaacgtcctaggattctgcaagcta

SEQ ID NO: 219741 - DNA, 1529 bp, Artificial Sequence
  derived and/or modified sequence
gacctcgcacccagctcggagcccggagcgtgcctcggcggcctgtcggttttcaccatggagcagctgagctcagcaaacacccgcttcgccttggacctgttcctggcgttgagtgagaacaatccggctggaaacatcttcatctctcccttcagcatttcatctgctatggccatggtttttctggggaccagaggtaacacggcagcacagctgtccaagggttatatcagttcctagcttgaggttttccagggactttaaaacctcagcaaagaatagttttaaggactcctcccccatttccattaaagcagatggagcataggcacagtgcaaacattccatatctcgactttccatttcaacacggttgaagaggttcattcaagattccagagtctgaatgctgatatcaacaaacgtggagcgtcttatattctgaaacttgctaatagattatatggagagaaaacttacaatttccttcctgagttcttggtttcgactcagaaaacatatggtgctgacctggccagtgtggattttcagcatgcctctgaagatgcaaggaagaccataaaccagtgggtcaaaggacagacagaaggaaaaattccggaactgttggcttcgggcatggttgataacatgaccaaacttgtgctagtaaatgccatctatttcaagggaaactggaaggataaattcatgaaagaagccacgacgaatgcaccattcagattgaataagaaagacagaaaaactgtgaaaatgatgtatcagaagaaaaaatttgcatatggctacatcgaggaccttaagtgccgtgtgctggaactgccttaccaaggcgaggagctcagcatggtcatcctgctgccggatgacattgaggacgagtccacgggcctgaagaagattgaggaacagttgactttggaaaagttgcatgagtggactaaacctgagaatctcgatttcattgaagttaatgtcagcttgcccaggttcaaactggaagagagttacactctcaactccgacctcgcccgcctaggtgtgcaggatctctttaacagtagcaaggctgatctgtctggcatgtcaggagccagagatatttttatatcaaaaattgtccacaagtcatttgtggaagtgaatgaagagggaacagaggcggcagctgccacagcaggcatcgcaactttctgcatgttgatgcccgaagaaaatttcactgccgaccatccattccttttctttattcggcataattcctcaggtagcatcctattcttggggagattttcttccccttagaagaaagagactgtagcaatacaaaaatcaagcttagtgctttattacctgagtttttaatagagccaatatgtcttatatctttaccaataaaaccactgttcagaaacaagtctttcattttctttgtaagtttggctctgttggctgtttacacccatgaattttggcatgggtatctatttttcttttttacattg

SEQ ID NO: 219742 - DNA, 1593 bp, Artificial Sequence
  derived and/or modified sequence
acttctgcttgcacttaggcgacctcgggagctcggactcctacgcagtcaccgggaagggccgccgccccgcccgcggctgctggcccgggtgacgcttccgcctgctataagagcagcggccctcggtgcctccttcctggcgttgagtgagaacaatccggctggaaacatcttcatctctcccttcagcatttcatctgctatggccatggtttttctggggaccagaggtaacacggcagcacagctgtccaagactttccatttcaacacggttgaagaggttcattcaagattccagagtctgaatgctgatatcaacaaacgtggagcgtcttatattctgaaacttgctaatagattatatggagagaaaacttacaatttccttcctgagttcttggtttcgactcagaaaacatatggtgctgacctggccagtgtggattttcagcatgcctctgaagatgcaaggaagaccataaaccagtgggtcaaaggacagacagaaggaaaaattccggaactgttggcttcgggcatggttgataacatgaccaaacttgtgctagtaaatgccatctatttcaagggaaactggaaggataaattcatgaaagaagccacgacgaatgcaccattcagattgaataagaaagacagaaaaactgtgaaaatgatgtatcagaagaaaaaatttgcatatggctacatcgaggaccttaagtgccgtgtgctggaactgccttaccaaggcgaggagctcagcatggtcatcctgctgccggatgacattgaggacgagtccacgggcctgaagaagattgaggaacagttgactttggaaaagttgcatgagtggactaaacctgagaatctcgatttcattgaagttaatgtcagcttgcccaggttcaaactggaagagagttacactctcaactccgacctcgcccgcctaggtgtgcaggatctctttaacagtagcaaggctgatctgtctggcatgtcaggagccagagatatttttatatcaaaaattgtccacaagtcatttgtggaagtgaatgaagagggaacagaggcggcagctgccacagcaggcatcgcaactttctgcatgttgatgcccgaagaaaatttcactgccgaccatccattccttttctttattcggcataattcctcaggtagcatcctattcttggggagattttcttccccttagaagaaagagactgtagcaatacaaaaatcaagcttagtgctttattacctgagtttttaatagagccaatatgtcttatatctttaccaataaaaccactgttcagaaacaagtctttcattttctttgtaagtttggctctgttggctgtttacacccatgaattttggcatgggtatctatttttcttttttacattgaaaaaaatccagtggttgcttttgaatgcatcaagtaaagaagaagaaaagaatacatccgatgcgtagattcttgaccatgtagtaatctataaaattgctatatcctcctgatagccatgggaaaacatgataagatggtcatttattttgcagttagaa

SEQ ID NO: 219743 - protein, 1216 aa, Artificial Sequence
  derived and/or modified sequence
MGHLPTGIHGARRLLPLLWLFVLFKNATAFHVTVQDDNNIVVSLEASDVISPASVYVVKITGESKNYFFEFEEFNSTLPPPVIFKASYHGLYYIITLVVVNGNVVTKPSRSITVLTKPLPVTSVSIYDYKPSPETGVLFEIHYPEKYNVFTRVNISYWEGKDFRTMLYKDFFKGKTVFNHWLPGMCYSNITFQLVSEATFNKSTLVEYSGVSHEPKQHRTAPYPPQNISVRIVNLNKNNWEEQSGNFPEESFMRSQDTIGKEKLFHFTEETPEIPSGNISSGWPDFNSSDYETTSQPYWWDSASAAPESEDEFVSVLPMEYENNSTLSETEKSTSGSFSFFPVQMILTWLPPKPPTAFDGFHIHIEREENFTEYLMVDEEAHEFVAELKEPGKYKLSVTTFSSSGSCETRKSQSAKSLSFYISPSGEWIEELTEKPQHVSVHVLSSTTALMSWTSSQENYNSTIVSVVSLTCQKQKESQRLEKQYCTQVNSSKPIIENLVPGAQYQVVIYLRKGPLIGPPSDPVTFAIVPTGIKDLMLYPLGPTAVVLSWTRPYLGVFRKYVVEMFYFNPATMTSEWTTYYEIAATVSLTASVRIANLLPAWYYNFRVTMVTWGDPELSCCDSSTISFITAPVAPEITSVEYFNSLLYISWTYGDDTTDLSHSRMLHWMVVAEGKKKIKKSVTRNVMTAILSLPPGDIYNLSVTACTERGSNTSMLRLVKLEPAPPKSLFAVNKTQTSVTLLWVEEGVADFFEVFCQQVGSSQKTKLQEPVAVSSHVVTISSLLPATAYNCSVTSFSHDSPSVPTFIAVSTMVTEMNPNVVVISVLAILSTLLIGLLLVTLIILRKKHLQMARECGAGTFVNFASLERDGKLPYNWRRSIFAFLTLLPSCLWTDYLLAFYINPWSKNGLKKRKLTNPVQLDDFDAYIKDMAKDSDYKFSLQFEELKLIGLDIPHFAADLPLNRCKNRYTNILPYDFSRVRLVSMNEEEGADYINANYIPGYNSPQEYIATQGPLPETRNDFWKMVLQQKSQIIVMLTQCNEKRRVKCDHYWPFTEEPIAYGDITVEMISEEEQDDWACRHFRINYADEMQDVMHFNYTAWPDHGVPTANAAESILQFVHMVRQQATKSKGPMIIHCSAGVGRTGTFIALDRLLQHIRDHEFVDILGLVSEMRSYRMSMVQTEEQYIFIHQCVQLMWMKKKQQFCISDVIYENVSKS

SEQ ID NO: 219744 - DNA, 3651 bp, Artificial Sequence
  derived and/or modified sequence
atgggacatttgcccacaggaatccacggagcccgcagattgctgcccttgctgtggctgtttgttctgttcaaaaacgccaccgctttccacgttaccgtccaagacgacaataatatagtcgtaagcctggaggcatcagatgtgatctctcccgcatcagtgtatgtggtaaagattactggagaaagcaagaactattttttcgagttcgaagagttcaacagtacactgccccccccggtgatctttaaggccagttatcacggtctctattacattatcactctcgtcgtggtcaatggcaatgtcgtgactaaaccctcacgtagtataaccgtgcttaccaagcccctccctgtaacgagcgtcagcatatacgactataaaccgtcccccgaaacaggcgtgttgtttgaaatccattatccggagaaatataacgtcttcacaagagttaatatttcatattgggaggggaaagatttccgcacaatgttgtacaaagatttcttcaagggaaagacagtatttaatcactggctgcccgggatgtgctactccaacataacttttcagctggtcagcgaggcaacattcaacaagagtacactggtcgaatattccggcgtgagccatgagccaaagcagcatcgtaccgcgccctaccctccgcagaatatttcagtccgcattgtgaatctcaacaagaataattgggaggagcaatccggcaacttccctgaagaatcttttatgcggagccaggatacgattggaaaggagaagctgtttcacttcactgaggaaactcccgaaattcctagcggaaatatatcctcaggatggcccgactttaactctagtgactatgaaaccacaagccagccctattggtgggactcagctagcgctgccccggagtccgaagatgagtttgtgagcgtgctgccaatggaatacgagaacaactcaacccttagtgagaccgagaagtctaccagcggctccttctcctttttccccgttcagatgattttgacctggctgccacccaaaccccctacagcctttgatggctttcatatccacattgaacgtgaggagaacttcaccgaatatctgatggtggacgaggaggcgcatgaatttgtagctgagctgaaggagcccggtaaatacaaactgtcagtgaccacgttcagttcgtcaggatcctgtgagacaaggaaaagccagtcagcaaagagtcttagcttttatatctctccatctggtgagtggatcgaggagctgacagagaagccacagcacgtgtcagtgcatgtgctgtcgagtactaccgccctgatgagctggacatccagtcaggaaaactacaactccaccatagtgtcagtggtttccctgacttgccagaaacaaaaggaatcacagcgattagagaagcagtattgcacccaggtcaacagtagcaaacccattattgagaacctagtgcctggggcacaataccaggtggtgatctatttaaggaaaggcccacttattggccctcccagcgatcctgttacctttgccattgttcctaccggtatcaaagacctaatgctgtaccccctgggccctactgctgtcgtgctgagctggacgcgcccatacctgggcgtgttccgcaaatatgtcgtcgaaatgttctattttaatccagccacgatgacatctgagtggacaacatattacgaaattgcagcaaccgtgtctctgactgccagtgtccgcattgccaacctgctgcccgcttggtattacaattttcgagtcactatggtgacctggggcgatccagagctgtcttgctgtgattccagcactatctctttcatcaccgcccccgtggctcccgagattacttccgttgagtatttcaattccctgctgtacattagttggacctacggcgacgatacgacagatctgtctcattctcgtatgcttcattggatggtggttgccgaagggaagaaaaagatcaagaagagtgtcacacggaacgtgatgactgcaatattatctctacctcccggggacatttacaatctgtccgtgacagcttgcaccgagcggggtagcaatacctccatgctgcggcttgtaaaactggaacctgccccccccaagtctctctttgctgtgaacaagacccagacgtctgtgacccttctctgggtggaagaaggagtggccgattttttcgaggtattttgtcagcaggtgggtagctcgcagaaaaccaaactgcaggaacccgttgctgtctcctcccacgtcgtgactatctcgagtctgctgcctgccacagcatacaattgctctgtgacctccttttcccacgactccccttccgtgccgaccttcattgccgtatcaaccatggtgacggaaatgaaccctaatgtcgtggtcatctcagtcctagctatactgtcaaccctgctgatcggcctgctcttggtaactctcataatcctgcggaagaaacatttacaaatggctcgagagtgtggcgccggcaccttcgttaatttcgccagcctcgaacgcgatggcaagctgccgtacaattggagacggagcattttcgcctttttaacactccttccaagctgtctgtggactgattatctcctggctttctacattaatccttggtcaaagaatgggcttaagaagcgaaaactgactaatcccgtccagttagacgactttgacgcctatatcaaagatatggcaaaggattctgactacaagttttccctgcaattcgaagaactgaaactaatcggcctggacatcccacactttgctgctgacctccccttgaaccgatgcaaaaataggtatactaatattctcccctatgatttctctcgtgttcggttggtgtctatgaatgaagaggaaggtgccgattacatcaatgctaactatatacctggctataactctccccaggagtatattgctacacagggcccactgccagagaccagaaacgacttctggaaaatggtgcttcagcaaaagagtcaaataatcgtgatgttgacccagtgcaacgaaaagagaagagtgaagtgtgaccactattggcccttcactgaggaaccgatcgcttacggcgacatcactgtcgagatgattagcgaagaggaacaggatgattgggcttgcagacacttccggatcaactatgccgacgagatgcaggatgtgatgcactttaactacaccgcttggccagatcacggggtgccaactgcaaatgccgcagaaagcatactgcaatttgtccatatggtacgccagcaggccacaaaaagcaaaggtcccatgatcatccactgctccgcaggcgtcggtaggaccggaaccttcattgctctcgacagactgctccaacatatccgagaccatgaattcgtagatattttaggcctagtgtcagagatgaggtcttaccgcatgtcaatggtgcagactgaggagcagtatattttcattcatcaatgtgtgcagttgatgtggatgaaaaagaaacaacagttttgcatttctgatgttatttacgagaacgtaagcaaatcctag

SEQ ID NO: 219745 - DNA, 3651 bp, Artificial Sequence
  derived and/or modified sequence
atgggccacctgcccaccggcatccatggagcccggcggctgctgcccctgctgtggctgtttgtgctcttcaagaatgccacagccttccacgtgacagtgcaggatgacaacaacatcgtggtgtccctggaggccagtgatgtgatcagccctgcctctgtgtatgtggtgaagatcactggagagagcaagaactacttctttgaatttgaggagttcaacagcaccctgcccccacctgtgatcttcaaggccagctaccacggcctgtactacatcatcaccctggtggtggtgaatggaaatgtggtgaccaagcccagccgcagcatcaccgtgctgaccaagcccctgcctgtgacctctgtgtccatctatgactacaagcccagccctgagactggagtgctgtttgagatccactacccagagaagtacaacgtgttcaccagggtgaacatctcctactgggagggcaaggacttccgcaccatgctgtacaaggacttcttcaagggcaagacagtgttcaaccactggctgcccggcatgtgctacagcaacatcaccttccagctggtgtctgaggccaccttcaacaagagcaccctggtggagtacagcggcgtgtcccatgagcccaagcagcacaggacagccccctacccaccccagaacatctctgtgcgcatcgtgaacctgaacaagaacaactgggaggagcagagcggcaacttccctgaggagagcttcatgaggagccaggacaccatcggcaaggagaagctgttccacttcacagaggagaccccagagatccccagcggcaacatcagcagcggctggccagacttcaacagcagtgactatgagaccaccagccagccctactggtgggacagcgccagcgctgcccctgagagtgaagatgaatttgtgtctgtgctgcccatggagtatgagaacaacagcaccctgtctgaaacagagaagagcaccagcggcagcttctccttcttccctgtgcagatgatcctgacctggctgccccccaagccacccacagcctttgatggcttccacatccacatcgagcgggaggagaacttcacagagtacctgatggtggatgaggaggcccacgagtttgtggccgagctgaaggagcccgggaagtacaagctgtctgtgaccaccttcagcagcagcggcagctgtgagaccaggaagagccagagcgccaagagcctgtccttctacatcagccccagcggggagtggattgaggagctgacagagaagccccagcacgtgtctgtgcacgtgctgagcagcaccacagccctgatgtcctggaccagcagccaggagaactacaacagcaccatcgtgtctgtggtgtccctgacctgccagaagcagaaggagagccagaggctggagaagcagtactgcacccaggtgaacagcagcaagcccatcatcgagaacctggtgcctggggcccagtaccaggtggtgatctacctgaggaagggccccctgattggccccccaagtgaccctgtgacctttgccatcgtgcccaccggcatcaaggacctgatgctgtaccccctgggccccacagctgtggtgctgtcctggacccggccctacctgggcgtcttcagaaaatatgtggtggagatgttctacttcaacccagccaccatgaccagcgagtggaccacctactatgaaattgctgccaccgtgtccctgacagcctctgtgagaattgccaacctgctgcctgcctggtactacaacttccgggtgaccatggtgacctggggagaccctgagctgagctgctgtgacagcagcaccatctccttcatcacagcccctgtggcccctgagatcacctctgtggagtacttcaacagcctgctgtacatctcctggacctatggagatgacaccacagacctgagccacagcaggatgctgcactggatggtggtggccgagggcaagaagaagatcaagaagtctgtgaccagaaatgtgatgacagccatcctgagcctgcccccaggggacatctacaacctgtctgtgacagcctgcacagagcggggcagcaacacctccatgctgcggctggtgaagctggagcccgccccacccaagagcctgtttgctgtgaacaagacccagacctctgtgaccctgctgtgggtggaggagggcgtggccgacttctttgaggtgttctgccagcaggtgggcagcagccagaagaccaagctgcaggagcctgtggccgtgagcagccacgtggtgaccatcagcagcctgctgcctgccacagcctacaactgcagcgtgaccagcttcagccatgacagccccagcgtgcccaccttcatcgctgtgtccaccatggtgacagagatgaaccccaacgtggtggtgatctctgtgctggccatcctgagcaccctgctgattggcctgctgctggtgaccctcatcatcctgaggaagaagcacctgcagatggcccgggagtgtggggccggcacctttgtgaactttgccagcctggagagagatggcaagctgccctacaactggaggaggagcatctttgccttcctgaccctgctgcccagctgcctgtggacagactacctgctggccttctacatcaacccctggagcaagaatggcctgaagaagaggaagctgaccaaccctgtgcagctggatgactttgatgcctacatcaaggacatggccaaggacagcgactacaagttcagcctgcagtttgaggagctgaagctgattggcctggacatcccccactttgctgctgacctgcccctgaaccgctgcaagaaccgctacaccaacatcctgccctatgacttcagccgggtgcggctggtgtccatgaatgaggaggagggcgctgactacatcaatgccaactacatccctggctacaacagcccccaggagtacatcgccacccagggccccctgcctgagaccagaaatgacttctggaagatggtgctgcagcagaagagccagatcatcgtgatgctgacccagtgcaatgagaagagaagagtgaagtgtgaccactactggcccttcacagaggagcccatcgcctacggggacatcaccgtggagatgatcagcgaggaggagcaggatgactgggcctgccgccacttccgcatcaactatgcagatgagatgcaggatgtgatgcacttcaactacacagcctggccagaccatggagtgcccacagccaatgctgctgagagcatcctgcagtttgtgcacatggtgcggcagcaggccaccaagagcaagggccccatgatcatccactgcagcgctggggtgggccgcacaggcaccttcatcgccctggaccggctgctgcagcacatccgggaccatgaatttgtggacatcctgggcctggtgtctgagatgaggagctacaggatgtccatggtgcagacagaggagcagtacatcttcatccaccagtgtgtgcagctgatgtggatgaagaagaagcagcagttctgcatcagtgatgtgatctatgaaaatgtgtccaagagctag

SEQ ID NO: 219746 - DNA, 3651 bp, Artificial Sequence
  derived and/or modified sequence
atgggccacctgcccaccggcatccacggcgcccggcggctgctgcccttactgtggctctttgtgctgttcaagaacgctaccgcctttcacgtgactgtccaggatgataataatattgtcgtgtccttggaggctagcgacgtgatctcgccagcgtcagtctatgtcgtcaaaattacaggagaaagcaaaaactactttttcgaatttgaggagttcaacagtacactgccccctcccgtcatattcaaagcctcgtaccatggcttgtattatatcataactctggtagtggttaacggaaacgtggtcaccaaaccgtcccgctcgatcactgtgctgactaaacccctgcccgttacgtccgtgagcatatacgactacaagccgagccccgaaaccggggtgctatttgagattcactacccagagaagtacaacgtgttcactcgggtgaacatatcttactgggagggaaaagacttccgaacaatgctgtataaggacttcttcaaaggcaaaaccgtttttaaccactggctgcccggcatgtgttactctaacatcaccttccagttggtttcggaggctaccttcaataagtctactctggttgagtatagtggtgtttcacacgagccaaaacagcataggactgcaccctacccacctcagaacatttcagtaaggatcgtaaacctgaacaagaataattgggaggaacaatccggaaactttcctgaagagtcgttcatgagatcacaggatacaatcggtaaggagaaactgtttcactttactgaggaaacccctgagatccccagcggcaacatctcttccggatggcctgattttaatagttccgattatgagacaacatcacagccatactggtgggatagcgcatcagcggcacccgagagcgaagatgaattcgtctccgtcttgcccatggagtacgaaaataactcaacactgagcgagacagagaagtcaacctctgggtccttttccttttttcccgtccagatgattctaacttggctcccccccaaaccccctacggcattcgatggattccacattcatatcgagcgagaagagaattttacagaatatctgatggtcgacgaagaggcacacgagtttgtcgcagagctcaaagaaccaggtaagtataagctgagcgtgacaacattttcatcctcaggctcatgcgaaacaaggaaatcgcagagtgcgaaatcactcagcttttacatttccccctcaggtgagtggatcgaggagctgacagaaaagcctcaacatgtctctgtgcacgttctgtcctctactactgccctcatgtcctggacctccagccaagagaactacaatagcactattgtgtctgtagtttccttaacctgtcagaagcaaaaagagagtcagcggctcgaaaaacaatattgtacccaagtcaatagctccaagcccatcatcgagaacttggtaccaggggctcagtatcaagttgttatatatcttcgcaaaggacctctgattggccccccaagcgatcctgtcacgttcgccatcgtccccaccggcattaaggaccttatgctttaccccctaggccccactgccgtcgtgcttagctggacgagaccttatttaggtgttttccggaaatacgtagtggagatgttttattttaacccggcaaccatgaccagcgaatggacaacatattatgagattgcggctactgttagtctaactgccagcgtgagaattgccaatctgctgcctgcatggtattataatttccgtgttaccatggttacatggggcgaccctgagctatcatgctgcgactcctctaccatatcttttatcaccgcacccgtagcaccggaaattacatcagtggaatatttcaacagtctcctgtacatctcatggacgtacggcgatgacacgacggatctcagtcactcacggatgctccattggatggtggtcgctgaggggaaaaagaagatcaagaagtctgtgacaaggaatgtgatgacagccatcctgtccttacctccgggcgacatttataacttatcagtcacagcttgcaccgaacgcggaagtaatacttccatgcttcgattggtcaaactcgaacccgcaccccccaaaagcctgtttgccgttaataagactcaaacctccgttaccttactgtgggtagaggagggtgtcgccgacttcttcgaggttttttgtcagcaggtcggttcttcccagaagaccaagcttcaggagcctgtggctgtttcctcgcatgtcgtgacgatttcttccttgctgcccgcgaccgcatataattgcagcgtgacatccttttcccatgatagccctagcgtgcctacgttcattgcagtttccacgatggtgacggagatgaacccaaacgtagtggtcatctcagtcttagccatcctctctacattgcttatagggctattgctggtgaccctgatcatcttgagaaagaagcatttgcaaatggcacgcgagtgtggtgccgggacgtttgtgaatttcgcgtctctggagagagatggcaaactaccatataactggcgcagatctatcttcgcattcctgacattactcccttcatgcctttggactgactacttgctcgccttttatatcaacccctggtcaaaaaacgggctgaaaaaaagaaagttaacgaatcctgtgcaactggacgatttcgatgcctatattaaggatatggctaaagactccgactataaatttagcttgcagtttgaggagctgaagctgattgggctggacattccacactttgccgcagaccttccgttaaaccgctgcaaaaacaggtacaccaatatactaccttacgacttcagcagggtgcgcctggtgtccatgaacgaagaagaaggagcagattacattaatgcgaactacatccccgggtataacagcccccaagaatacattgcgactcaggggccacttccggaaactcggaacgacttctggaaaatggtgttacaacagaagtcccaaatcatcgttatgctgactcagtgcaacgagaaacgccgagtgaaatgcgaccactattggccatttacggaggagccaatcgcatacggcgacattactgttgagatgatttccgaggaagaacaggatgattgggcgtgccgccattttagaataaactatgccgacgaaatgcaggacgtgatgcacttcaattataccgcttggcccgaccacggcgtgcccacagccaacgccgcggaatctatactgcagttcgtgcacatggtgcgacagcaggcaacaaaatctaaggggcccatgataattcattgctctgctggggttggtagaacagggacctttatcgccctggatcgtctcttacaacacatcagggaccacgagttcgtggatatacttggcctggtgagcgagatgagatcctatcgcatgagcatggtgcagactgaagagcaatacattttcatccatcagtgtgtacagctcatgtggatgaagaaaaaacaacagttttgtatctccgacgtgatatatgagaacgtgagcaaaagttag

SEQ ID NO: 219747 - DNA, 3651 bp, Artificial Sequence
  derived and/or modified sequence
atggggcatctcccaaccggcattcacggagcccgaagactgctgcctctcctgtggctcttcgtgttgtttaagaacgcaaccgcatttcacgtgacagtgcaggatgacaacaacattgttgtctccctcgaagcttcagacgttatttcacctgccagtgtctacgtggtgaagatcactggcgagtctaaaaactacttctttgaatttgaggagttcaattcaacattaccaccaccagtgatcttcaaggcgtcgtatcatgggctgtattatatcattacactggtggtggttaatggcaatgtggtcacaaagccttcccgctctataacagtgttgactaagccccttcccgtgacgtccgtgagcatctatgactacaagccctcaccagaaaccggcgtcctgttcgaaatccactaccccgagaaatacaatgtgtttactcgtgtaaacattagttattgggaaggtaaggatttccggactatgctgtacaaggacttttttaaaggtaagaccgtctttaaccactggcttcctgggatgtgctactcgaacataacctttcaacttgtctctgaagccacattcaataagtcaactctcgttgagtactcaggggtgagccacgaacccaagcaacatcgaacagcaccctatcctccccagaacattagcgtgagaattgtcaacctaaataagaacaactgggaggagcagagcggcaattttcccgaggagtctttcatgcggtcccaggatactattggaaaggaaaagctgttccacttcaccgaggaaactcccgaaattccctctggaaatatctccagcgggtggcctgactttaatagtagcgattacgaaaccacgagtcagccctattggtgggactccgcttcggccgctccagagtcggaagatgaatttgtgagcgttttgccaatggagtacgagaacaactctacactgtcggagaccgagaaatctaccagcggcagcttcagcttctttcccgttcagatgatcctcacatggctgccgcctaagcctcctaccgccttcgatggcttccacatccacatcgagagggaggaaaacttcaccgaatatctaatggtggacgaggaggcacatgagtttgtggcagagctgaaggagcccggtaaatacaagctcagcgtgacaacttttagttccagtggcagttgcgagaccaggaaatctcaatccgctaaaagcttgtccttttatataagtccttccggggaatggatcgaggagttaaccgaaaaacctcagcacgtatcagtccacgttctgagttccaccactgccctcatgtcgtggacaagctcccaggagaactataactctaccatcgtgtccgtagtgtccctcacctgccaaaaacagaaggaatctcagcgcctggagaaacagtactgcactcaggtcaatagcagcaagccaattatcgaaaatctcgtccctggcgctcaatatcaggtggtcatctaccttagaaaaggaccactgattggaccaccatccgatcccgtgacattcgcaatagtgcctacaggaattaaagatctgatgctctaccctctgggcccaactgcggtcgtgctcagttggacacgaccttaccttggagtctttcgcaaatatgtcgtcgagatgttttattttaatccagccaccatgactagtgagtggaccacttattacgagatcgccgctaccgtgagtcttacagcaagcgtccgcatcgccaatctgctgcctgcttggtactataatttccgcgtaaccatggtgacatggggagatcccgaactctcctgctgcgattcctccactataagtttcataacggccccagttgctccggagataacgagcgtggagtacttcaatagcttgctatatatctcttggacctacggtgacgacacgacggacctctctcatagcaggatgctgcactggatggtggtggcggagggaaagaagaaaattaaaaaatctgtcactaggaatgtgatgacagccatcctctcactgcccccaggggatatttacaacttatcggtgaccgcctgcacagagcgcggatcgaatacttctatgctgaggctagtcaagctcgagcctgcaccccctaaaagtctgtttgcagtaaacaaaacccaaacttcggtcacgctactctgggtagaagaaggagtagcagactttttcgaagtattctgtcagcaggtggggagttcccaaaagactaaacttcaggaacccgtggcagtctcctcgcatgttgtcacgatcagcagtctgctcccggcaacagcttacaactgtagcgtaacatctttctcccatgattccccctccgtgcctaccttcatcgccgtatccactatggttacagaaatgaaccctaacgtggtggtaatctccgtgttagccattctgagcaccctgctaattggtctcctgctggttacattaattattctaaggaagaaacatctccagatggcccgagaatgtggggcaggtacttttgtgaattttgcatctttagagagggacggcaagttaccctacaattggcgtagaagtatcttcgcctttctgacactgctgccatcttgtctgtggacggactacctgctggccttctacattaacccatggagcaaaaatggattaaagaaaaggaaactgacgaaccccgtgcagctggatgattttgacgcatatataaaggacatggcgaaagacagcgactacaagttcagcttgcagttcgaggagctaaagcttattgggctcgatattccacactttgctgcagatttgccgctgaatcggtgtaaaaacaggtacacaaatatccttccttatgatttttctcgtgttagacttgtgagtatgaacgaggaagagggtgccgactacattaacgctaactacatccctggctacaattctcctcaggaatacatagccacccagggacccctccctgaaactcgcaacgatttctggaagatggtgctacaacagaaatcccagattatcgtgatgctgacgcaatgtaacgagaaacggcgagtgaaatgcgaccattattggcccttcacagaggagcctatagcttacggcgacattacggtggagatgatctccgaagaggagcaggacgactgggcttgccggcactttcggattaattacgctgacgagatgcaggacgtgatgcattttaattatacagcatggcctgaccacggcgtcccaacggctaacgctgccgaaagcattctgcagttcgtgcatatggtcagacagcaggccaccaaaagtaaggggcctatgattattcattgcagcgctggtgtggggagaacaggaacatttattgcacttgatcgcctcctccagcatatcagggaccacgagtttgtggatatcctcggcctggtgagcgagatgcggagctaccgaatgagtatggtgcagaccgaggagcagtatatattcatccaccaatgtgtgcagctcatgtggatgaagaaaaagcaacagttctgtatatccgatgtcatctacgagaacgtctcgaagtcatag

SEQ ID NO: 219748 - DNA, 5301 bp, Artificial Sequence
  derived and/or modified sequence
cgcggggtccccgcctctcgctcaccacacagaccccgcgcctcctctggcagccgcggtggtggcggcggcagagcctcgcccactccaatccccaccctctccatccttagtcattaaagaacagcagcgcctggcacgttcttggaggaccccgggcgcagaggaggaaagggagcaggcgcagggggactggaaaggcagcatgcgctcgccaggagcaacctcggcgcccagggtctgaggctgcagccccagttcgccattgtgagccgccgccgggggagtccgctagcgcagccgtgcccccgagtccccgtccgcgcagcgatggggcacctgcccacggggatacacggcgcccgccgcctcctgcctctgctctggctctttgtgctgttcaagaatgctacagctttccatgtaactgtccaagatgataataacatcgttgtctcattagaagcttcagacgtcatcagtccagcatctgtgtatgttgtgaagataactggtgaatccaaaaattatttcttcgaatttgaggaattcaacagcactttgcctcctcctgttattttcaaggccagttatcatggcctttattatataatcactctggtagtggtaaatggaaatgtggtgaccaagccatccagatcaatcactgtgttaacaaaacctctacctgtaaccagtgtttccatatatgactataaaccttctcctgaaacaggagtcctgtttgaaatacattatccagaaaaatataacgttttcacaagagtgaacattagctactgggaaggtaaagacttccggacaatgctatataaagatttctttaagggaaaaacagtatttaatcactggctgccaggaatgtgttatagtaatatcacctttcagctggtatctgaggcaacttttaataaaagtacccttgttgagtacagtggtgtcagtcacgaacccaaacagcacagaactgccccttatccacctcaaaatatttccgttcgtatcgtaaacttgaacaaaaacaactgggaagaacagagtggcaatttcccagaagaatccttcatgagatcacaagatacaataggaaaagaaaaactcttccattttacagaagaaacccctgaaattccctcgggcaacatttcttccggttggcctgattttaatagcagtgactatgaaactacgtctcagccatattggtgggacagtgcatctgcagctcctgaaagtgaagatgaatttgtcagcgtacttcccatggaatacgaaaataacagtacactcagtgagacagagaagtcaacatcaggctctttctcctttttccctgtgcaaatgatattgacctggttaccacccaaaccacccactgcttttgatgggttccatatccatattgaacgagaagagaactttactgaatatttgatggtggatgaagaagcacatgaatttgttgcagaactgaaggaacctgggaaatataagttatctgtgacaacctttagttcctcaggatcttgtgaaactcgaaaaagtcagtcagcaaaatcactcagcttttatatcagtccttcaggagagtggattgaagaactgaccgagaagccgcagcacgtgagtgtccacgttttaagctcaaccactgccttgatgtcctggacatcttcccaagagaactacaacagcaccattgtgtctgtggtgtcgctgacctgccagaaacaaaaggagagccagaggcttgaaaagcagtactgcactcaggtgaactcaagcaaacctattattgaaaatctggttcctggtgcccagtaccaggttgtaatatacctaaggaaaggccctttgattggaccaccttcagatcctgtgacatttgctattgttcccacaggaataaaggatttaatgctctatcctttgggtcctacggccgtggttctgagctggaccagaccttatttaggcgtgttcagaaaatacgtggttgaaatgttttatttcaaccctgctacaatgacatcagagtggaccacctactatgaaatagcagcaactgtttccttaactgcatccgtgagaatagctaatctgctgccagcatggtactacaacttccgggttaccatggtgacgtggggagatccagaattgagctgctgtgacagctctaccatcagcttcataacagccccagtggctccggaaatcacttctgtggaatatttcaacagtctgttatatatcagttggacatatggggatgatacaacggacttgtcccattctagaatgcttcactggatggtggttgcagaaggaaaaaagaaaattaaaaagagtgtaacacgcaatgtcatgactgcaattctcagcttgcctccaggcgacatctataacctctcagtaactgcttgtactgaaagaggaagtaatacctccatgctccgccttgtcaagctagaaccagctccacccaaatcactcttcgcagtgaacaaaacccagacttcagtgactttgctgtgggtggaagagggagtagctgatttctttgaagttttctgtcaacaagttggctccagtcagaaaaccaaacttcaggaaccagttgctgtttcttcccatgtcgtgaccatctccagccttcttcctgccactgcctacaattgtagtgtcaccagctttagccatgacagccccagtgtccctacgttcatagccgtctcaacaatggttacagagatgaatcccaatgtggtagtgatctccgtgctggccatccttagcacacttttaattggactgttgcttgttaccctcattattcttaggaaaaagcatctgcagatggctagggagtgtggagctggtacatttgtcaattttgcatccttagagagggatggaaagcttccatacaactggcgtaggagtatatttgctttcttaaccctgctaccctcatgtctttggactgattatcttttggcattttatattaatccttggagtaaaaatggtttaaagaagaggaaactgacaaacccggttcaactggatgactttgatgcctatattaaggatatggccaaagactctgactataaattttctcttcagtttgaggagttgaaattgattggactggatatcccacactttgctgcagatcttccactgaatcgatgtaaaaaccgttacacaaacatcctaccatatgacttcagccgtgtgagattagtctccatgaatgaagaggaaggtgcagactacatcaatgccaactatattcctggatacaactcaccccaggagtatattgccacccaggggccactgcctgaaaccagaaatgacttctggaagatggtcctgcaacaaaagtctcagattattgtcatgctcactcagtgtaatgagaaaaggagggtgaaatgtgaccattactggccattcacggaagaacctatagcctatggagacatcactgtggagatgatttcagaggaagagcaggacgactgggcctgtagacacttccggatcaactatgctgacgagatgcaggatgtgatgcattttaactacactgcatggcctgatcatggtgtgcccacagcaaatgctgcagaaagtatcctgcagtttgtacacatggtccgacagcaagctaccaagagcaaaggtcccatgatcattcactgcagtgctggcgtgggacggacaggaacattcattgccctggacaggctcttgcagcacattcgggatcatgagtttgttgacatcttagggctggtgtcagaaatgaggtcataccggatgtctatggtacagacagaggagcagtacatttttatccatcagtgtgtgcaactgatgtggatgaagaagaagcagcagttctgcatcagtgatgtcatatacgagaatgttagcaagtcctagttcagaatccggagcagagaggacatgatgtgcgcccatcctcccttgcttccagattgttttagtgggccctgatggtcatttttctaaacagaggccctgctttgtaatatgtggccaaggagataatttatctcacagaagcaccgggaagacttagccttaaagagcctacagtgtccttttggactctttcacttcgggacatttaataatggaccaaattcaacagaacaccaggaaggtcaagacgctctccaaagggcaggaagtacagcacttccgaagagtttagttggccctttgctggttgggctgagttttttatttttaagtgtttgtttttcagtgcaataatttttgtgtgtgtgtgattcttatcagaaagttgaattgttttctgcctacaccgttcatcagccccataacccaggaaggaacaggcattgttagcatcagattatacctcattattaaaaggaggcatggccacacatgaagaaatggtcattctacttcaaagaaattgagccagcactatctgtactccaacattaccggatctggattggggaggttggtcagggaagagaggggttctacccacagatcaactgtgtaatcttttactattcaagctataattcagcttcaaagtagagtagaaaaaaaattgtcttaactgttctagttcttgatggttttcttccttattaacagttggtgtttcttccttggcccttttggactaatgttactgtccaagttctttctcaagaaaccacatctggttcagaagagtgtcaagttggactctttgaactctgttgctgtctgagcaatcgtggtgcctagactttgcattccttgttctgttgacctgcatacatgtgagagctatttctttaagaactatataggctgtgaaaacgcactttctttcccccaaagagctgggaatttatgaagttatggcaatgaactgcagcatgctgggacaattatttgactacttttttttgtaatattgtcaaatgtctctatggattctgacagagatttctttttgttttgttattcttttggttgtcagtttcattttaacgagtgtaactagtaacattttattctttggattttgtataattacagtacatgattgtgtattgtgacatgaatgctgtcaaaatgacattgatggcattgtgaagcctgttactttgtgtcacttcctgataaataagaggtgatgacatggatatacaacagaaaacactttgagttgaaagtaaacacaagctggctgcttccctgtggcaa

SEQ ID NO: 219749 - DNA, 3030 bp, Artificial Sequence
  derived and/or modified sequence
aagtaaaaaaatggaagggggaaaaggcaaagtattctgccttccaagttagatagctatctttatgaaaggacatatttcaaaggcaatataaagtctttatggtgctcttacctacctatatttgaattgggggatgcttcacctgcttattagtgaaagaagaaagaatacacttagtaaattaaattttttttaaaactttgtctttgctcagaaccagctccacccaaatcactcttcgcagtgaacaaaacccagacttcagtgactttgctgtgggtggaagagggagtagctgatttctttgaagttttctgtcaacaagttggctccagtcagaaaaccaaacttcaggaaccagttgctgtttcttcccatgtcgtgaccatctccagccttcttcctgccactgcctacaattgtagtgtcaccagctttagccatgacagccccagtgtccctacgttcatagccgtctcaacaatggttacagagatgaatcccaatgtggtagtgatctccgtgctggccatccttagcacacttttaattggactgttgcttgttaccctcattattcttaggaaaaagcatctgcagatggctagggagtgtggagctggtacatttgtcaattttgcatccttagagagggatggaaagcttccatacaactggcgtaggagtatatttgctttcttaaccctgctaccctcatgtctttggactgattatcttttggcattttatattaatccttggagtaaaaatggtttaaagaagaggaaactgacaaacccggttcaactggatgactttgatgcctatattaaggatatggccaaagactctgactataaattttctcttcagtttgaggagttgaaattgattggactggatatcccacactttgctgcagatcttccactgaatcgatgtaaaaaccgttacacaaacatcctaccatatgacttcagccgtgtgagattagtctccatgaatgaagaggaaggtgcagactacatcaatgccaactatattcctggatacaactcaccccaggagtatattgccacccaggggccactgcctgaaaccagaaatgacttctggaagatggtcctgcaacaaaagtctcagattattgtcatgctcactcagtgtaatgagaaaaggagggtgaaatgtgaccattactggccattcacggaagaacctatagcctatggagacatcactgtggagatgatttcagaggaagagcaggacgactgggcctgtagacacttccggatcaactatgctgacgagatgcaggatgtgatgcattttaactacactgcatggcctgatcatggtgtgcccacagcaaatgctgcagaaagtatcctgcagtttgtacacatggtccgacagcaagctaccaagagcaaaggtcccatgatcattcactgcagtgctggcgtgggacggacaggaacattcattgccctggacaggctcttgcagcacattcgggatcatgagtttgttgacatcttagggctggtgtcagaaatgaggtcataccggatgtctatggtacagacagaggagcagtacatttttatccatcagtgtgtgcaactgatgtggatgaagaagaagcagcagttctgcatcagtgatgtcatatacgagaatgttagcaagtcctagttcagaatccggagcagagaggacatgatgtgcgcccatcctcccttgcttccagattgttttagtgggccctgatggtcatttttctaaacagaggccctgctttgtaatatgtggccaaggagataatttatctcacagaagcaccgggaagacttagccttaaagagcctacagtgtccttttggactctttcacttcgggacatttaataatggaccaaattcaacagaacaccaggaaggtcaagacgctctccaaagggcaggaagtacagcacttccgaagagtttagttggccctttgctggttgggctgagttttttatttttaagtgtttgtttttcagtgcaataatttttgtgtgtgtgtgattcttatcagaaagttgaattgttttctgcctacaccgttcatcagccccataacccaggaaggaacaggcattgttagcatcagattatacctcattattaaaaggaggcatggccacacatgaagaaatggtcattctacttcaaagaaattgagccagcactatctgtactccaacattaccggatctggattggggaggttggtcagggaagagaggggttctacccacagatcaactgtgtaatcttttactattcaagctataattcagcttcaaagtagagtagaaaaaaaattgtcttaactgttctagttcttgatggttttcttccttattaacagttggtgtttcttccttggcccttttggactaatgttactgtccaagttctttctcaagaaaccacatctggttcagaagagtgtcaagttggactctttgaactctgttgctgtctgagcaatcgtggtgcctagactttgcattccttgttctgttgacctgcatacatgtgagagctatttctttaagaactatataggctgtgaaaacgcactttctttcccccaaagagctgggaatttatgaagttatggcaatgaactgcagcatgctgggacaattatttgactacttttttttgtaatattgtcaaatgtctctatggattctgacagagatttctttttgttttgttattcttttggttgtcagtttcattttaacgagtgtaactagtaacattttattctttggattttgtataattacagtacatgattgtgtattgtgacatgaatgctgtcaaaatgacattgatggcattgtgaagcctgttactttgtgtcacttcctgataaataagaggtgatgacatggatatacaacagaaaacactttgagttgaaagtaaacacaagctggctgcttccctgtggcaactgtgg

SEQ ID NO: 219750 - DNA, 4062 bp, Artificial Sequence
  derived and/or modified sequence
aagtaaaaaaatggaagggggaaaaggcaaagtattctgccttccaagttagatagctatctttatgaaaggacatatttcaaaggcaatataaagtctttatggtgctcttacctacctatatttgaattgggggatgcttcacctgcttattagtgaaagaagaaagaatacacttagtaaattaaattttttttaaaactttgtctttgctcagaaccagctccacccaaatcactcttcgcagtgaacaaaacccagacttcagtgactttgctgtgggtggaagagggagtagctgatttctttgaagttttctgtcaacaagttggctccagtcagaaaaccaaacttcaggaaccagttgctgtttcttcccatgtcgtgaccatctccagccttcttcctgccactgcctacaattgtagtgtcaccagctttagccatgacagccccagtgtccctacgttcatagccgtctcaacaatggttacagagatgaatcccaatgtggtagtgatctccgtgctggccatccttagcacacttttaattggactgttgcttgttaccctcattattcttaggaaaaagcatctgcagatggctagggagtgtggagctggtacatttgtcaattttgcatccttagagagggatggaaagcttccatacaactggcgtaggagtatatttgctttcttaaccctgctaccctcatgtctttggactgattatcttttggcattttatattaatccttggagtaaaaatggtttaaagaagaggaaactgacaaacccggttcaactggatgactttgatgcctatattaaggatatggccaaagactctgactataaattttctcttcagtttgaggagttgaaattgattggactggatatcccacactttgctgcagatcttccactgaatcgatgtaaaaaccgttacacaaacatcctaccatatgacttcagccgtgtgagattagtctccatgaatgaagaggaaggtgcagactacatcaatgccaactatattcctggatacaactcaccccaggagtatattgccacccaggggccactgcctgaaaccagaaatgacttctggaagatggtcctgcaacaaaagtctcagattattgtcatgctcactcagtgtaatgagaaaaggagggtgaaatgtgaccattactggccattcacggaagaacctatagcctatggagacatcactgtggagatgatttcagaggaagagcaggacgactgggcctgtagacacttccggatcaactatgctgacgagatgcaggatgtgatgcattttaactacactgcatggcctgatcatggtgtgcccacagcaaatgctgcagaaagtatcctgcagtttgtacacatggtccgacagcaagctaccaagagcaaaggtcccatgatcattcactgcagtgctggcgtgggacggacaggaacattcattgccctggacaggctcttgcagcacattcgggatcatgagtttgttgacatcttagggctggtgtcagaaatgaggtcataccggatgtctatggtacagacagaggagcagtacatttttatccatcagtgtgtgcaactgatgtggatgaagaagaagcagcagttctgcatcagtgatgtcatatacgagaatgttagcaagtcctagttcagaatccggagcagtaagtggagaagagctctccacgagtgctcagtcttagaactattagagggggatgtgatggatgggacaaaagacagcagtagccatttgtattgactctgacttcacatgagtatttcttcccagctcctggcctcacatgggtggtcacagggagaaacaagtactgtagcagatctttgagtttcaatgcaccttggttggtgttggcaacaaacaggagcttctgcacatcatgatgactttacctccattccctctacccagaaccctaaattattctgttattggatctgtgcctgtaatatcaggatactaccatccaaatctatctagatatcttgtgcaaatattttattgattacaagggctgtatacggggttacaaaaagacatgagctggattggacactcctaaaaccaaaaacaacagtgacaatagagtctcaggatagcagagtctgaaaataccttggtctcccccattatgtgagcccttacttgagagcttcatgaagacacttgtaacatattcaacgtcctgtactccagttttgactacgagatcagattttggaggtgtaagtaaacttggctgaggtaacagtaatctgcccatttagttcagtaaacagactgtagagtgtctgactatactgggggaagaggagccaatgacagggtagggagatgacagtggtgcatgatgggagaatcatgaaagtctgggaagcatatggaccagtgggaaggataggattagcactgcacctctacatccatcaagagagacagagcgcacaatggagcaggaaggataaaaaataaagaaagacagagagaaacaaatttgctgggagagggaaagacattcagacccacagaaaggaggcagcacacagagaaagatgcacagatcaacccacatctgcatgggttgtgagactgagcatagtgagagcagtggtggagcaatagaagattgctgtgacaccaggctgcttactgtctttctttgtctcattcacaggagaggacatgatgtgcgcccatcctcccttgcttccagattgttttagtgggccctgatggtcatttttctaaacagaggccctgctttgtaatatgtggccaaggagataatttatctcacagaagcaccgggaagacttagccttaaagagcctacagtgtccttttggactctttcacttcgggacatttaataatggaccaaattcaacagaacaccaggaaggtcaagacgctctccaaagggcaggaagtacagcacttccgaagagtttagttggccctttgctggttgggctgagttttttatttttaagtgtttgtttttcagtgcaataatttttgtgtgtgtgtgattcttatcagaaagttgaattgttttctgcctacaccgttcatcagccccataacccaggaaggaacaggcattgttagcatcagattatacctcattattaaaaggaggcatggccacacatgaagaaatggtcattctacttcaaagaaattgagccagcactatctgtactccaacattaccggatctggattggggaggttggtcagggaagagaggggttctacccacagatcaactgtgtaatcttttactattcaagctataattcagcttcaaagtagagtagaaaaaaaattgtcttaactgttctagttcttgatggttttcttccttattaacagttggtgtttcttccttggcccttttggactaatgttactgtccaagttctttctcaagaaaccacatctggttcagaagagtgtcaagttggactctttgaactctgttgctgtctgagcaatcgtggtgcctagactttgcattccttgttctgttgacctgcatacatgtgagagctatttctttaagaactatataggctgtgaaaacgcactttctttcccccaaagagctgggaatttatgaagttatggcaatgaactgcagcatgctgggacaattatttgactacttttttttgtaatattgtcaaatgtctctatggattctgacagagatttctttttgttttgttattcttttggttgtcagtttcattttaacgagtgtaactagtaacattttattctttggattttgtataattacagtacatgattgtgtattgtgacatgaatgctgtcaaaatgacattgatggcattgtgaagcctgttactttgtgtcacttcctgataaataagaggtgatgacatggatatacaacagaaaacactttgagttgaaagtaaacacaagctggctgcttccctgtggcaactgtgg

SEQ ID NO: 219751 - DNA, 3651 bp, Artificial Sequence
  derived and/or modified sequence
atgggccacctgcccaccggcatccacggcgccagaagactgctgcccctgctgtggctgttcgtgctgttcaagaacgccaccgccttccacgtgaccgtgcaggacgacaacaacatcgtggtgagcctggaggccagcgacgtgatcagccccgccagcgtgtacgtggtgaagatcaccggcgagagcaagaactacttcttcgagttcgaggagttcaacagcaccctgcccccccccgtgatcttcaaggccagctaccacggcctgtactacatcatcaccctggtggtggtgaacggcaacgtggtgaccaagcccagcagaagcatcaccgtgctgaccaagcccctgcccgtgaccagcgtgagcatctacgactacaagcccagccccgagaccggcgtgctgttcgagatccactaccccgagaagtacaacgtgttcaccagagtgaacatcagctactgggagggcaaggacttcagaaccatgctgtacaaggacttcttcaagggcaagaccgtgttcaaccactggctgcccggcatgtgctacagcaacatcaccttccagctggtgagcgaggccaccttcaacaagagcaccctggtggagtacagcggcgtgagccacgagcccaagcagcacagaaccgccccctaccccccccagaacatcagcgtgagaatcgtgaacctgaacaagaacaactgggaggagcagagcggcaacttccccgaggagagcttcatgagaagccaggacaccatcggcaaggagaagctgttccacttcaccgaggagacccccgagatccccagcggcaacatcagcagcggctggcccgacttcaacagcagcgactacgagaccaccagccagccctactggtgggacagcgccagcgccgcccccgagagcgaggacgagttcgtgagcgtgctgcccatggagtacgagaacaacagcaccctgagcgagaccgagaagagcaccagcggcagcttcagcttcttccccgtgcagatgatcctgacctggctgccccccaagccccccaccgccttcgacggcttccacatccacatcgagagagaggagaacttcaccgagtacctgatggtggacgaggaggcccacgagttcgtggccgagctgaaggagcccggcaagtacaagctgagcgtgaccaccttcagcagcagcggcagctgcgagaccagaaagagccagagcgccaagagcctgagcttctacatcagccccagcggcgagtggatcgaggagctgaccgagaagccccagcacgtgagcgtgcacgtgctgagcagcaccaccgccctgatgagctggaccagcagccaggagaactacaacagcaccatcgtgagcgtggtgagcctgacctgccagaagcagaaggagagccagagactggagaagcagtactgcacccaggtgaacagcagcaagcccatcatcgagaacctggtgcccggcgcccagtaccaggtggtgatctacctgagaaagggccccctgatcggcccccccagcgaccccgtgaccttcgccatcgtgcccaccggcatcaaggacctgatgctgtaccccctgggccccaccgccgtggtgctgagctggaccagaccctacctgggcgtgttcagaaagtacgtggtggagatgttctacttcaaccccgccaccatgaccagcgagtggaccacctactacgagatcgccgccaccgtgagcctgaccgccagcgtgagaatcgccaacctgctgcccgcctggtactacaacttcagagtgaccatggtgacctggggcgaccccgagctgagctgctgcgacagcagcaccatcagcttcatcaccgcccccgtggcccccgagatcaccagcgtggagtacttcaacagcctgctgtacatcagctggacctacggcgacgacaccaccgacctgagccacagcagaatgctgcactggatggtggtggccgagggcaagaagaagatcaagaagagcgtgaccagaaacgtgatgaccgccatcctgagcctgccccccggcgacatctacaacctgagcgtgaccgcctgcaccgagagaggcagcaacaccagcatgctgagactggtgaagctggagcccgccccccccaagagcctgttcgccgtgaacaagacccagaccagcgtgaccctgctgtgggtggaggagggcgtggccgacttcttcgaggtgttctgccagcaggtgggcagcagccagaagaccaagctgcaggagcccgtggccgtgagcagccacgtggtgaccatcagcagcctgctgcccgccaccgcctacaactgcagcgtgaccagcttcagccacgacagccccagcgtgcccaccttcatcgccgtgagcaccatggtgaccgagatgaaccccaacgtggtggtgatcagcgtgctggccatcctgagcaccctgctgatcggcctgctgctggtgaccctgatcatcctgagaaagaagcacctgcagatggccagagagtgcggcgccggcaccttcgtgaacttcgccagcctggagagagacggcaagctgccctacaactggagaagaagcatcttcgccttcctgaccctgctgcccagctgcctgtggaccgactacctgctggccttctacatcaacccctggagcaagaacggcctgaagaagagaaagctgaccaaccccgtgcagctggacgacttcgacgcctacatcaaggacatggccaaggacagcgactacaagttcagcctgcagttcgaggagctgaagctgatcggcctggacatcccccacttcgccgccgacctgcccctgaacagatgcaagaacagatacaccaacatcctgccctacgacttcagcagagtgagactggtgagcatgaacgaggaggagggcgccgactacatcaacgccaactacatccccggctacaacagcccccaggagtacatcgccacccagggccccctgcccgagaccagaaacgacttctggaagatggtgctgcagcagaagagccagatcatcgtgatgctgacccagtgcaacgagaagagaagagtgaagtgcgaccactactggcccttcaccgaggagcccatcgcctacggcgacatcaccgtggagatgatcagcgaggaggagcaggacgactgggcctgcagacacttcagaatcaactacgccgacgagatgcaggacgtgatgcacttcaactacaccgcctggcccgaccacggcgtgcccaccgccaacgccgccgagagcatcctgcagttcgtgcacatggtgagacagcaggccaccaagagcaagggccccatgatcatccactgcagcgccggcgtgggcagaaccggcaccttcatcgccctggacagactgctgcagcacatcagagaccacgagttcgtggacatcctgggcctggtgagcgagatgagaagctacagaatgagcatggtgcagaccgaggagcagtacatcttcatccaccagtgcgtgcagctgatgtggatgaagaagaagcagcagttctgcatcagcgacgtgatctacgagaacgtgagcaagagctag

SEQ ID NO: 219752 - DNA, 1218 bp, Artificial Sequence
  derived and/or modified sequence
atggttacagagatgaatcccaatgtcgttgtgataagtgtgttggccatcttgtctactctgctgattggcttgctgctggtgacgctgatcatcctccgcaagaagcacctgcagatggccagggaatgtggagccggcaccttcgtgaactttgcctcccttgagcgtgatggcaagctgccttacaattggcgacgttccatctttgcattcctcacacttttgcctagctgtctgtggaccgattacctgctggccttttacataaatccttggtccaagaacggactaaaaaaaagaaaactgaccaacccagttcagctggacgactttgacgcttatataaaagatatggctaaggattccgattataagttcagcctgcagttcgaagagttgaaattgattggcctagacattccccacttcgccgcagatctgccgctgaatcgatgcaaaaatcgctacacaaatatcctcccctacgacttcagccgagttcggctggtgtcaatgaacgaagaagaaggcgctgattacatcaatgctaattacatcccgggatataacagcccccaggagtacatagcaactcagggccctttaccagagaccaggaatgatttttggaagatggtcttgcaacagaaatcgcagattatagtgatgctgacgcagtgtaatgaaaagcgccgggtaaagtgtgatcattactggccttttacagaagagcccatcgcgtacggcgacattactgtggagatgattagtgaggaagaacaggatgactgggcgtgtagacattttaggattaactatgccgatgagatgcaagacgttatgcactttaattataccgcttggcctgaccatggcgtgccaacagcgaatgccgccgagtcaattctccagtttgtccacatggtgaggcagcaagctacaaagtctaagggacccatgattattcattgtagcgctggtgtgggccgcaccggaacgttcatagctcttgatcggctgctgcaacacattagagatcatgaattcgttgacatcctcggcctagtatcagaaatgcgctcatatcgcatgtcaatggtgcaaacagaggagcagtacattttcatccaccagtgcgttcaactgatgtggatgaagaaaaagcagcagttttgtatatctgacgtgatctacgaaaatgtgtccaagagctag

SEQ ID NO: 219753 - DNA, 1218 bp, Artificial Sequence
  derived and/or modified sequence
atggtgacggagatgaaccctaacgtagtcgtgattagcgtgctcgcaattctgagcacattgctcattggcttgttgctcgtgaccctgatcattctgcggaaaaaacatttacagatggcccgcgagtgcggggctggcacctttgttaacttcgccagcctggaaagagatggcaagctgccatacaattggaggaggagcatatttgcgtttctgacgctgctgccttcatgcttgtggaccgattacctgctggccttctatattaatccatggagcaaaaacggtctcaagaagagaaagctgactaatcccgtgcaactggatgatttcgacgcatacattaaggatatggccaaagactcagactacaaattctccctgcagtttgaggagctgaaattgataggactggacatacctcacttcgcagcggacctgccactgaataggtgcaagaatcggtacaccaacattcttccttacgattttagcagggtgaggctggttagtatgaatgaggaagagggcgccgactacattaatgccaattacatcccgggatacaacagcccccaggaatatattgccacccaaggtccgttgccagagacgcgtaacgacttttggaagatggtgttgcaacagaagagccaaattatcgttatgctgacacaatgtaacgagaagcggagggtcaagtgtgatcactactggccatttaccgaggagcccatagcctacggagatattaccgtggagatgatttcagaagaagagcaggatgattgggcttgccgtcacttccggattaactacgccgatgagatgcaggatgtgatgcactttaattataccgcgtggccagatcacggagtcccaaccgcgaacgctgcagagtctatcctgcagttcgtccacatggtgcggcagcaggccacgaaatccaagggcccaatgatcattcattgttcggccggggtgggacgcacaggtacctttatcgcccttgaccgcctgctgcaacacattagagaccacgaatttgtagacatcttaggtcttgtgtcggagatgcgcagctatcgcatgagcatggtgcagactgaagagcaatatatattcatccaccaatgtgtgcaactgatgtggatgaagaaaaagcagcagttctgcataagcgatgtgatatacgaaaatgtgagcaagtcatag

SEQ ID NO: 219754 - DNA, 1218 bp, Artificial Sequence
  derived and/or modified sequence
atggtgacagagatgaaccccaacgtggtggtgatctctgtgctggccatcctgagcaccctgctgattggcctgctgctggtgaccctcatcatcctgaggaagaagcacctgcagatggccagagaatgtggggccggcacctttgtgaactttgccagcctggagagagatggcaagctgccctacaactggaggaggagcatctttgccttcctgaccctgctgcccagctgcctgtggacagactacctgctggccttctacatcaacccctggagcaagaatggcctgaagaagaggaagctgaccaaccctgtgcagctggatgactttgatgcctacatcaaggacatggccaaggacagcgactacaagttcagcctgcagtttgaggagctgaagctgattggcctggacatcccccactttgctgctgacctgcccctgaaccgctgcaagaaccgctacaccaacatcctgccctatgacttcagccgggtgcggctggtgtccatgaatgaggaggagggcgctgactacatcaatgccaactacatccctggctacaacagcccccaggagtacatcgccacccagggccccctgcctgagaccagaaatgacttctggaagatggtgctgcagcagaagagccagatcatcgtgatgctgacccagtgcaatgagaagagaagagtgaagtgtgaccactactggcccttcacagaggagcccatcgcctatggagacatcaccgtggagatgatcagcgaggaggagcaggatgactgggcctgccgccacttccgcatcaactatgcagatgagatgcaggatgtgatgcacttcaactacacagcctggccagaccacggcgtgcccacagccaatgctgctgagagcatcctgcagtttgtgcacatggtgcggcagcaggccaccaagagcaagggccccatgatcatccactgcagcgctggggtgggccgcacaggcaccttcatcgccctggaccggctgctgcagcacatccgggaccacgagtttgtggacatcctgggcctggtgtctgagatgaggagctacaggatgtccatggtgcagacagaggagcagtacatcttcatccaccagtgtgtgcagctgatgtggatgaagaagaagcagcagttctgcatcagtgatgtgatctatgaaaatgtgtccaagagctag

SEQ ID NO: 219755 - DNA, 1218 bp, Artificial Sequence
  derived and/or modified sequence
atggtgaccgagatgaaccccaacgtggtggtgatcagcgtgctggccatcctgtcaacactacttattggcctcctgctggtaactctgatcattctgcggaagaaacatttgcagatggccagggagtgtggtgcgggcactttcgtgaattttgcgagcctggaaagggacggaaagctgccctacaattggcgcagatctattttcgcatttctgacactcctgcccagttgtctgtggaccgactacctcctagctttttacatcaacccttggagtaagaatgggctcaagaaacggaaactgaccaatcctgtgcaactagatgactttgacgcttatataaaagacatggctaaagacagtgattacaaattttcactgcagttcgaggaactcaagctgatcggactcgatatcccccatttcgccgctgatctgcctttaaatcgttgcaaaaacaggtatacaaatattctgccgtacgacttcagtcgtgtccggttggtgtctatgaatgaggaggaaggggctgattacatcaacgctaactacattcctggatacaattccccgcaggagtacattgcaacacaggggcccttaccagagacccgaaatgacttctggaagatggtgctgcaacaaaaaagtcagatcatcgtcatgctgactcagtgcaacgagaaacgaagggtcaaatgcgaccactattggcccttcaccgaagagcctattgcctacggcgatatcaccgtagaaatgatctctgaggaagagcaggatgattgggcttgccggcattttagaattaattacgcagatgagatgcaggacgttatgcattttaactatacagcctggcccgaccatggcgtccctaccgctaatgccgctgagagtattttgcaatttgtgcacatggtgcggcagcaggctaccaagagcaaggggccaatgatcattcattgctccgcaggcgtgggtagaacaggcactttcatcgccctagaccgcctactccaacatatccgggaccatgaatttgttgacatcctgggcctcgtgagcgaaatgagatcctatagaatgtcgatggtccagacagaggaacaatacatcttcatccaccagtgcgtacaactaatgtggatgaagaagaagcagcagttctgcatatcagatgtgatttacgaaaacgtttcgaaatcttag

SEQ ID NO: 219756 - DNA, 1218 bp, Artificial Sequence
  derived and/or modified sequence
atggtgaccgagatgaaccccaacgtggtggtgatcagcgtgctggctattctgtccactctgttaataggtctgctactggtcacgctgatcatactgagaaagaaacaccttcagatggccagagaatgcggcgccgggacctttgtaaacttcgcctcacttgaacgtgacggaaaactcccatataactggagacgctcaatcttcgccttcctcaccctgttgccttcatgcctgtggacagactaccttcttgccttttatatcaatccttggagcaaaaacggactgaaaaaacgaaagttgactaacccagtgcaactggatgacttcgatgcatatatcaaggatatggcaaaagacagcgattacaagttctccctgcaattcgaagaactgaagctgatcggactggacattcctcacttcgcagcagatctgccacttaacaggtgtaagaacagatacaccaatatactgccgtacgacttctctcgcgtaagactagtgtcaatgaacgaggaggaaggcgcagactacataaatgcaaattatattccggggtacaacagccctcaggagtacattgccacccaaggacccctgcctgaaacccgcaatgatttttggaagatggtgctccagcagaagtctcagattatcgtcatgcttactcagtgtaatgagaaaaggagggtcaagtgcgatcattactggccgttcaccgaggagcctattgcatatggcgatattactgtcgaaatgatttctgaagaagaacaggacgactgggcttgtaggcacttcagaattaactacgctgacgagatgcaggacgtcatgcatttcaactacactgcctggcctgaccacggcgttcctaccgcgaatgcggccgagagtattttacagttcgtgcacatggtgaggcaacaagctaccaagtccaagggcccgatgatcatacattgctcagccggcgtgggtcgcacaggaacatttatcgccctagacagactgttgcagcacattagggatcatgagttcgtggacatactgggactagtgtcagagatgcggagctaccggatgtctatggtgcagactgaagaacagtatatctttattcaccagtgcgtccaactgatgtggatgaagaaaaagcagcagttctgtatatccgacgtgatatacgagaatgtgtcaaaatcctag

SEQ ID NO: 219757 - DNA, 1218 bp, Artificial Sequence
  derived and/or modified sequence
atggtgactgagatgaaccccaacgtggtcgtgatttccgtgctggccattctcagcacactgcttataggcctcttgctggtgaccctgatcatcttgcgaaaaaaacacctgcagatggctagagagtgtggagccggaacgttcgtcaacttcgctagtctcgagcgtgacggaaagcttccgtacaattggcgcagatctattttcgcatttctgactctgctgccttcctgcctgtggacagactacctgctcgctttctacatcaatccttggagcaagaacggtttaaagaagaggaaactaaccaaccccgtccagctcgacgatttcgacgcttatataaaagatatggcaaaggacagcgattacaagttctctctgcagtttgaggaactcaaattgatcggactcgacatccctcattttgcagcggatttgcctcttaaccgttgcaagaatcgctatactaatattctgccgtacgatttcagccgtgttagactggtgtcaatgaatgaggaggagggagccgattatatcaatgccaattacatcccgggttataatagcccacaggagtacatcgccacccagggccctctgccggagacccgtaatgacttctggaagatggtcttgcagcagaaatctcagatcatagttatgctaacacagtgtaacgaaaagaggcgggtgaaatgtgatcactactggccatttacagaggaacctatcgcctatggcgatatcacagtggaaatgatttctgaagaggaacaggacgattgggcttgccgccattttaggataaactacgccgacgaaatgcaggatgtcatgcactttaactacaccgcctggcctgatcacggggtgcctacggcaaacgcggcagagtccatacttcagtttgtgcacatggtaaggcagcaggcaaccaagagcaaaggccctatgattatacattgctccgctggggtgggcaggacaggtacgttcatagcgttggatcggctcctacaacacatccgcgatcacgaattcgtggacattctggggcttgtttcagagatgcgaagttatcgaatgtctatggtccaaaccgaagagcagtacatattcatccaccagtgcgtgcagttgatgtggatgaagaagaaacaacagttctgcatcagtgatgtcatatatgaaaacgtgagtaaatcttag

SEQ ID NO: 219758 - DNA, 1218 bp, Artificial Sequence
  derived and/or modified sequence
atggtgacggagatgaatccgaacgtggtggtcatctccgtgcttgcgatattgtcaacactcttgattgggctgttactggtgacactgattatactacgtaaaaaacatctgcagatggccagagagtgtggggctggaacgtttgtgaacttcgcttccctagaaagggatggcaaactcccttacaactggaggaggtctattttcgcatttctgacgctcctaccgtcctgcctgtggactgactaccttctagctttttatataaacccttggagcaaaaatgggttgaagaaaaggaaattgactaaccctgtgcaactggacgattttgacgcctacatcaaagatatggccaaggacagtgattataagttctctctgcagtttgaggagctgaagctgatcggtctggatattcctcattttgctgccgacctccccctgaacaggtgcaagaatcggtacaccaacattctgccttacgactttagccgagtgagactcgtcagcatgaatgaggaggaaggagccgactatatcaacgctaattatattcccggttacaactctccgcaggagtatatagcgacacagggacctctccctgaaacacggaacgacttctggaagatggtgctgcagcaaaagtcccagatcatcgtcatgttgacccaatgtaacgaaaagcggagggtgaaatgcgatcactactggcctttcaccgaggagcctatcgcgtacggggacattactgttgagatgatcagtgaagaggagcaagacgattgggcgtgcagacatttccggataaattatgcggacgagatgcaagacgtgatgcacttcaactacacagcctggccagaccacggagtgcccacagccaatgcagctgaaagtatcctgcaattcgttcatatggtgcggcaacaggcaacgaaatcaaaaggcccaatgattatccactgttccgccggagtggggaggacggggacattcattgcgctggacaggctccttcagcacatcagagatcacgagttcgtggacattctcggactagtgagcgagatgcgatcttacagaatgtcgatggtccagaccgaagagcagtacatcttcatccaccagtgcgtgcagctcatgtggatgaaaaagaaacagcaattttgcatttcagacgtgatatatgagaatgtgtcaaaaagctag

SEQ ID NO: 219759 - DNA, 1218 bp, Artificial Sequence
  derived and/or modified sequence
atggtgaccgagatgaaccccaacgtggtggtgatcagcgtgctggccatcctgagcaccctgctgatcggcctgctgctggtgaccctgatcatcctgagaaagaagcacctgcagatggccagagagtgcggcgccggcaccttcgtgaacttcgccagcctggagagagacggcaagctgccctacaactggagaagaagcatcttcgccttcctgaccctgctgcccagctgcctgtggaccgactacctgctggccttctacatcaacccctggagcaagaacggcctgaagaagagaaagctgaccaaccccgtgcagctggacgacttcgacgcctacatcaaggacatggccaaggacagcgactacaagttcagcctgcagttcgaggagctgaagctgatcggcctggacatcccccacttcgccgccgacctgcccctgaacagatgcaagaacagatacaccaacatcctgccctacgacttcagcagagtgagactggtgagcatgaacgaggaggagggcgccgactacatcaacgccaactacatccccggctacaacagcccccaggagtacatcgccacccagggccccctgcccgagaccagaaacgacttctggaagatggtgctgcagcagaagagccagatcatcgtgatgctgacccagtgcaacgagaagagaagagtgaagtgcgaccactactggcccttcaccgaggagcccatcgcctacggcgacatcaccgtggagatgatcagcgaggaggagcaggacgactgggcctgcagacacttcagaatcaactacgccgacgagatgcaggacgtgatgcacttcaactacaccgcctggcccgaccacggcgtgcccaccgccaacgccgccgagagcatcctgcagttcgtgcacatggtgagacagcaggccaccaagagcaagggccccatgatcatccactgcagcgccggcgtgggcagaaccggcaccttcatcgccctggacagactgctgcagcacatcagagaccacgagttcgtggacatcctgggcctggtgagcgagatgagaagctacagaatgagcatggtgcagaccgaggagcagtacatcttcatccaccagtgcgtgcagctgatgtggatgaagaagaagcagcagttctgcatcagcgacgtgatctacgagaacgtgagcaagagctag

SEQ ID NO: 219760 - DNA, 1134 bp, Artificial Sequence
  derived and/or modified sequence
atggtaaccgagatgaatcctaacgtcgtggtcattagcgttctggcaatactgagtactcttctaatcggtctgcttctggtcacccttatcatcttacgcaagaaacacctccagatggccagggaatgtggtgcggggacctttgtgaactttgcttctcttgaaagggatggcaagctgccgtataactggtcgaagaatgggctgaagaaacgcaaactgacgaatcccgtgcagctcgacgatttcgatgcatatatcaaagacatggcaaaggactcagattacaagttcagtcttcagttcgaagagctgaagcttatcggacttgacatcccgcacttcgctgccgatctacccctaaatcggtgtaagaataggtatacaaatattctgccatatgacttctccagagttaggctggtttcaatgaatgaggaggaaggcgctgattacattaatgccaactatattccaggatataatagcccccaggagtacattgctacccagggaccccttcccgagacgcgcaatgatttctggaagatggtcctccaacaaaagagccagataatcgttatgcttacacaatgtaatgagaagaggagggtgaagtgtgaccactattggccttttacggaggaaccaatcgcctacggggacatcacggtcgaaatgatctcggaagaggaacaggacgattgggcttgcagacacttcaggataaactatgcggacgagatgcaggatgtcatgcactttaattacactgcttggcccgaccacggcgtgccaacagccaatgccgccgaatctatcctgcagtttgtgcacatggtgagacagcaggctaccaagagcaaaggccctatgatcattcactgctccgcgggtgttgggaggaccggcaccttcatcgctctggatcggctcttacaacacataagagaccatgaattcgtcgatatcctcgggcttgtgtccgagatgagaagctatcgcatgtcaatggtccagaccgaagagcagtatatcttcatacaccagtgtgtgcagctcatgtggatgaaaaaaaaacaacagttctgcatttccgatgtcatttacgaaaatgtgagcaaatcctag

SEQ ID NO: 219761 - DNA, 1134 bp, Artificial Sequence
  derived and/or modified sequence
atggtgaccgaaatgaatccaaacgtggtcgttatctctgtgctagccatcctctcaaccctcttaatcgggctgcttctggtgacgttaataattctgcgaaaaaagcacctgcaaatggctcgagagtgtggggccggcacgtttgtcaacttcgcatcactcgaacgcgacggaaagctgccatataattggtcaaaaaatggtctcaaaaagcggaaactgaccaatccggtgcaactagacgatttcgacgcctatattaaagatatggccaaggactccgactacaaatttagcctgcagttcgaggagctaaagctcatcgggcttgacatcccgcatttcgcggcagacctccctcttaaccgctgtaaaaatagatatacaaatatccttccttatgatttcagcagggtgcgccttgtatcgatgaatgaggaagagggcgccgattacatcaacgctaattatataccgggctataatagccctcaggaatacatcgccacacaaggtccgctcccagaaacaaggaacgatttttggaaaatggtattacagcagaaaagtcagattattgtcatgctaactcagtgcaatgagaaaaggcgagtcaaatgcgatcactactggccctttacagaagaacccatcgcttacggggacatcactgtggagatgatttccgaagaggagcaagatgattgggcttgcaggcactttagaattaactacgctgatgagatgcaggatgtgatgcattttaactatacagcttggcccgatcatggagtaccaacggcgaatgccgccgaaagtatactgcagttcgtgcacatggttagacaacaggcaaccaagagcaaaggacctatgatcatacactgtagcgcaggagtggggagaactgggaccttcatcgcactggatagactccttcagcacatccgcgatcacgaattcgtcgatatcctggggctcgtgtcagagatgagaagttatagaatgtccatggtgcaaacagaggaacaatacattttcatccaccagtgcgtgcagctaatgtggatgaaaaaaaagcagcagttctgtatttccgacgtgatttacgaaaacgtcagtaagagctag

SEQ ID NO: 219762 - DNA, 1134 bp, Artificial Sequence
  derived and/or modified sequence
atggtgacagagatgaaccccaacgtggtggtgatctctgtgctggccatcctgagcaccctgctgattggcctgctgctggtgaccctcatcatcctgaggaagaagcacctgcagatggccagagaatgtggggccggcacctttgtgaactttgccagcctggagagagatggcaagctgccctacaactggagcaagaatggcctgaagaagaggaagctgaccaaccctgtgcagctggatgactttgatgcctacatcaaggacatggccaaggacagcgactacaagttcagcctgcagtttgaggagctgaagctgattggcctggacatcccccactttgctgctgacctgcccctgaaccgctgcaagaaccgctacaccaacatcctgccctatgacttcagccgggtgcggctggtgtccatgaatgaggaggagggcgctgactacatcaatgccaactacatccctggctacaacagcccccaggagtacatcgccacccagggccccctgcctgagaccagaaatgacttctggaagatggtgctgcagcagaagagccagatcatcgtgatgctgacccagtgcaatgagaagagaagagtgaagtgtgaccactactggcccttcacagaggagcccatcgcctatggagacatcaccgtggagatgatcagcgaggaggagcaggatgactgggcctgccgccacttccgcatcaactatgcagatgagatgcaggatgtgatgcacttcaactacacagcctggccagaccacggcgtgcccacagccaatgctgctgagagcatcctgcagtttgtgcacatggtgcggcagcaggccaccaagagcaagggccccatgatcatccactgcagcgctggggtgggccgcacaggcaccttcatcgccctggaccggctgctgcagcacatccgggaccacgagtttgtggacatcctgggcctggtgtctgagatgaggagctacaggatgtccatggtgcagacagaggagcagtacatcttcatccaccagtgtgtgcagctgatgtggatgaagaagaagcagcagttctgcatcagtgatgtgatctatgaaaatgtgtccaagagctag

SEQ ID NO: 219763 - DNA, 1134 bp, Artificial Sequence
  derived and/or modified sequence
atggtgaccgagatgaaccccaacgtggtggtgatcagcgtgctggccatcctgtctactctgctgatcggacttctgctggtcacactgatcattcttaggaaaaagcacctccagatggctagggagtgcggcgcagggacctttgttaactttgcaagccttgagagggacggtaaattgccatataattggagtaagaatggcctgaagaaacggaaactcacaaatcccgtgcagctcgacgatttcgatgcttatatcaaggacatggccaaagacagtgattacaagttctcattgcaattcgaagaacttaagctgattggcctggacatcccacattttgcggcggacttacccctgaaccgttgtaaaaataggtacactaacattctgccctatgactttagccgcgttcggctcgtttccatgaatgaggaagagggagccgattacattaacgcaaactacattcctggatataattctccccaggagtacatcgccactcagggtccacttccggagactaggaacgacttctggaaaatggtgctccagcagaagagccagattatcgtgatgctgacccaatgcaacgagaaaaggagagtcaagtgtgatcattactggccattcactgaagagccaatagcttatggcgatatcacagtggagatgatttctgaggaggagcaggatgactgggcttgccggcacttccgcatcaactacgctgatgagatgcaagacgtgatgcattttaactataccgcctggcccgaccacggcgtgcctaccgctaatgcagcagaatcaatcctccagttcgtacatatggtacgccaacaggcaacaaaatccaaaggtccaatgataatacattgctccgcaggagtgggcaggacaggcactttcatcgccctcgatcgcctgctgcaacatatccgtgaccatgaattcgtcgacatcctaggactcgtctctgagatgaggagctatcgaatgtccatggtgcagaccgaagagcagtacattttcatacatcagtgtgtgcaattgatgtggatgaagaagaaacagcagttctgtatcagcgacgttatttacgagaacgtttcaaagtcctag

SEQ ID NO: 219764 - DNA, 1134 bp, Artificial Sequence
  derived and/or modified sequence
atggtgaccgagatgaaccccaacgtggtggtgatcagcgtgctggccatcctttcgacactgctcataggccttctactggtgactctgataatcttgcgcaaaaagcatctgcagatggcaagggagtgtggggctggtacatttgtaaactttgccagtctagaacgggacgggaagttaccctacaactggagcaaaaacggcctcaaaaagcgcaaattaactaacccagtgcagctcgacgacttcgacgcgtatattaaggacatggcgaaggactctgactacaagttttccctgcagttcgaggagctcaagcttatcggtctggatatccctcattttgccgcagacctccctctgaatcgttgtaagaacaggtacaccaacattctgccttatgacttcagcagggtccgtttggtgtctatgaacgaagaagaaggcgcagactatatcaatgcaaactacatacccggatacaacagcccccaggagtacattgccactcagggaccactgccagagacaagaaatgacttttggaagatggtactccagcagaagtctcagatcattgtgatgctgactcagtgtaatgaaaaaagacgagtgaaatgcgaccattactggcccttcacggaagagcccattgcttacggtgatatcacggtcgaaatgatctccgaggaggaacaggacgattgggcgtgtcggcatttcaggattaactatgcggatgagatgcaggatgtgatgcactttaactacaccgcctggccggatcacggagtgcccactgctaatgctgccgaatccatcttgcagtttgtgcatatggttagacagcaggctaccaagtctaagggacccatgattatccattgctcagccggggtgggtaggaccggcaccttcatcgcgcttgaccggcttttgcagcatatccgcgaccacgagttcgtggatatcctgggccttgtatccgagatgaggagttacagaatgtcgatggtgcagacagaagagcagtacatctttattcaccagtgtgtgcagctgatgtggatgaaaaagaagcagcagttttgtatctcggatgtgatctacgaaaatgtatcaaaatcctag

SEQ ID NO: 219765 - DNA, 1134 bp, Artificial Sequence
  derived and/or modified sequence
atggtgacggaaatgaaccccaacgttgtggtcatatctgtgttggcaatcttgagcactttgctgattgggctcttactggtaaccctgattatacttcgaaagaaacatctccagatggctagggagtgcggggctggtacttttgtgaattttgcgtccctggagagggatggtaagctaccatacaattggtcgaagaacggtctgaagaaaagaaaactgactaatccagttcagctcgatgactttgacgcctacatcaaagacatggcaaaagacagcgattataaattctcactccagtttgaggagcttaaattaatagggctcgacattccacatttcgccgcagacttacccttgaacaggtgtaaaaaccgctacaccaacatcctgccttacgatttcagtcgagtgagactggtgtctatgaatgaggaagagggtgccgactacatcaacgccaattacataccaggatacaattctcctcaagagtacatagcaacccagggacctttacctgaaactaggaacgatttctggaaaatggtgttgcagcaaaagtctcagattattgtgatgctgacgcagtgtaacgagaagagaagagttaagtgtgaccactattggcctttcaccgaggagccaattgcatatggggacataacagttgaaatgatcagcgaggaggagcaggacgactgggcttgtcggcattttagaatcaattacgctgatgaaatgcaggacgtcatgcacttcaactatacagcctggcctgaccacggggtgccaacggcaaacgccgctgaaagcatcttgcagtttgttcacatggttcggcagcaggccactaagtccaaaggcccaatgatcatacattgctcagccggtgtcggaaggaccggcacttttattgccctggacagattgctgcagcatatacgcgatcacgaatttgtggatattcttggcctcgtgagtgaaatgcggtcttaccggatgagcatggtgcagacagaggaacagtacatcttcattcaccagtgcgtgcaattgatgtggatgaaaaaaaagcagcagttttgcatttcagacgtgatctatgaaaacgtgtctaaaagctag

SEQ ID NO: 219766 - DNA, 1134 bp, Artificial Sequence
  derived and/or modified sequence
atggtcacagaaatgaacccgaatgtggtggtgatcagcgtcttagccattctgtccacattgctgatcggtctgctgctcgtgaccctcatcatcctgagaaaaaagcacttacagatggcacgggagtgcggagccggaactttcgtgaattttgcttctctggaacgggacggtaaacttccctataactggagtaagaacggactgaaaaagaggaagctgacaaatcccgttcaattggacgacttcgacgcgtacatcaaggacatggctaaggactccgactacaaattttccctgcagtttgaagagttaaagctaattgggcttgacatcccccatttcgcagctgacctgcctctgaaccgctgtaagaatcggtatacaaacattttgccatacgacttcagcagagtgagactcgtttctatgaatgaagaggagggcgctgattacataaacgccaattatataccaggctacaattcacctcaggagtacattgcaacacaaggaccactacccgagacgcgtaatgatttctggaaaatggttctgcagcagaaaagtcagatcatagtcatgctgacccagtgtaatgagaaaaggcgggttaagtgcgaccattattggccctttacagaagaaccaatagcttacggagacattacagtcgagatgatctctgaagaggagcaggacgattgggcttgcaggcattttagaataaattatgccgacgaaatgcaggacgtcatgcatttcaactataccgcgtggccagatcatggggtgccgacggctaacgccgctgagagcatcctgcaattcgtccacatggtccgccagcaggccaccaaatctaagggacccatgattatccactgttcagccggtgtgggacggacaggcacctttatcgctctggatcggctgttacagcacattcgtgaccatgagtttgtggatatcctcggactggtctctgaaatgcgtagttatcgcatgtctatggtccaaactgaggaacagtacatttttattcatcagtgcgtgcaacttatgtggatgaagaagaagcagcagttctgtataagtgatgtgatatatgagaacgtgtcaaagtcgtag

SEQ ID NO: 219767 - DNA, 1134 bp, Artificial Sequence
  derived and/or modified sequence
atggtgaccgagatgaaccccaacgtggtggtgatcagcgtgctggccatcctgagcaccctgctgatcggcctgctgctggtgaccctgatcatcctgagaaagaagcacctgcagatggccagagagtgcggcgccggcaccttcgtgaacttcgccagcctggagagagacggcaagctgccctacaactggagcaagaacggcctgaagaagagaaagctgaccaaccccgtgcagctggacgacttcgacgcctacatcaaggacatggccaaggacagcgactacaagttcagcctgcagttcgaggagctgaagctgatcggcctggacatcccccacttcgccgccgacctgcccctgaacagatgcaagaacagatacaccaacatcctgccctacgacttcagcagagtgagactggtgagcatgaacgaggaggagggcgccgactacatcaacgccaactacatccccggctacaacagcccccaggagtacatcgccacccagggccccctgcccgagaccagaaacgacttctggaagatggtgctgcagcagaagagccagatcatcgtgatgctgacccagtgcaacgagaagagaagagtgaagtgcgaccactactggcccttcaccgaggagcccatcgcctacggcgacatcaccgtggagatgatcagcgaggaggagcaggacgactgggcctgcagacacttcagaatcaactacgccgacgagatgcaggacgtgatgcacttcaactacaccgcctggcccgaccacggcgtgcccaccgccaacgccgccgagagcatcctgcagttcgtgcacatggtgagacagcaggccaccaagagcaagggccccatgatcatccactgcagcgccggcgtgggcagaaccggcaccttcatcgccctggacagactgctgcagcacatcagagaccacgagttcgtggacatcctgggcctggtgagcgagatgagaagctacagaatgagcatggtgcagaccgaggagcagtacatcttcatccaccagtgcgtgcagctgatgtggatgaagaagaagcagcagttctgcatcagcgacgtgatctacgagaacgtgagcaagagctag

SEQ ID NO: 219768 - protein, 86 aa, Artificial Sequence
  derived and/or modified sequence
MGKMVSVINTVDTSHEDMIHDAQMDYYGTRLATCSSDRSVKIFDVRNGGQILIADLRGHEGPVWQVAWAHPMYGNILASCSYDRKV

SEQ ID NO: 219769 - DNA, 978 bp, Artificial Sequence
  derived and/or modified sequence
atgggcaagatggtgagcgtgatcaacaccgtggacaccagccacgaggacatgatccacgacgcccagatggactactacggcaccagactggccacctgcagcagcgacagaagcgtgaagatcttcgacgtgagaaacggcggccagatcctgatcgccgacctgagaggccacgagggccccgtgtggcaggtggcctgggcccaccccatgtacggcaacatcctggccagctgcagctacgacagaaaggtgatcatctggagagaggagaacggcacctgggagaagagccacgagcacgccggccacgacagcagcgtgaacagcgtgtgctgggccccccacgactacggcctgatcctggcctgcggcagcagcgacggcgccatcagcctgctgacctacaccggcgagggccagtgggaggtgaagaagatcaacaacgcccacaccatcggctgcaacgccgtgagctgggcccccgccgtggtgcccggcagcctgatcgaccaccccagcggccagaagcccaactacatcaagagattcgccagcggcggctgcgacaacctgatcaagctgtggaaggaggaggaggacggccagtggaaggaggagcagaagctggaggcccacagcgactgggtgagagacgtggcctgggcccccagcatcggcctgcccaccagcaccatcgccagctgcagccaggacggcagagtgttcatctggacctgcgacgacgccagcagcaacacctggagccccaagctgctgcacaagttcaacgacgtggtgtggcacgtgagctggagcatcaccgccaacatcctggccgtgagcggcggcgacaacaaggtgaccctgtggaaggagagcgtggacggccagtgggtgtgcatcagcgacgtgaacaagggccagggcagcgtgagcgccagcgtgaccgagggccagcagaacgagcagtag

SEQ ID NO: 219770 - DNA, 978 bp, Artificial Sequence
  derived and/or modified sequence
atggggaagatggtgtccgtgatcaacactgtggataccagtcatgaggacatgattcacgatgcccaaatggattattacggtacacggttagccacctgttccagcgaccggagcgttaaaatttttgatgtaagaaacgggggacaaatcctgatcgctgatttacgcggtcacgagggtcccgtgtggcaggtggcctgggcccacccaatgtacggaaacatcctcgcctcctgctcatacgatcggaaagtgattatctggcgcgaagagaacgggacatgggagaagagccacgagcatgctgggcatgacagttctgtaaacagcgtctgctgggcaccccacgattatggtttgattctcgcctgtggcagctctgatggggccatcagcctactaacttatactggtgaagggcagtgggaagtgaagaaaatcaacaacgcccacaccattggttgcaacgccgttagttgggccccggcggtcgtgccagggtctctcatcgaccatcccagtggtcaaaaacccaattacattaagcggtttgcttctgggggttgtgacaacttgatcaagctatggaaagaagaggaggacggtcaatggaaggaagaacagaagctggaggcccactccgattgggtgcgcgacgtggcttgggcgccaagcattggtctgccgaccagcacaattgcaagctgctcacaggacggccgcgtgttcatttggacctgtgacgatgcctctagtaacacctggtctccgaagctgctccataaatttaacgacgtcgtgtggcacgtatcatggagcatcaccgcaaacatactcgccgtgagcggaggtgacaacaaagtcacgctgtggaaggagtccgtggacggccagtgggtatgcatatccgacgttaacaaggggcagggtagcgtatccgctagcgtcacagagggacaacagaatgagcagtag

SEQ ID NO: 219771 - DNA, 978 bp, Artificial Sequence
  derived and/or modified sequence
atgggcaagatggtgtctgtcatcaacacagtggacaccagccatgaggacatgattcatgatgcccagatggactactacggcacccggctggccacctgcagcagtgacagatctgtgaagatctttgatgtgagaaatggaggccagatcctgattgctgacctgcggggccacgagggccctgtgtggcaggtggcctgggcccaccccatgtatggcaacatcctggccagctgcagctatgacaggaaggtgatcatctggagggaggagaatggcacctgggagaagagccatgagcacgccggccatgacagctctgtgaacagcgtgtgctgggcccctcatgactatggcctcatcctggcctgtggcagcagtgatggagccatcagcctgctgacctacaccggggagggccagtgggaggtgaagaagatcaacaatgcccacaccatcggctgcaatgctgtgtcctgggccccagctgtggtgcccggcagcctgattgaccaccccagcggccagaagcccaactacatcaagagatttgccagcggcggctgtgacaacctgatcaagctgtggaaggaggaggaggatggccagtggaaggaggagcagaagctggaggcccacagcgactgggtgagagatgtggcctgggcccccagcatcggcctgcccaccagcaccatcgccagctgcagccaggacggccgggtcttcatctggacctgtgatgatgccagcagcaacacctggagccccaagctgctgcacaagttcaatgatgtggtgtggcacgtgtcctggagcatcacagccaacatcctggccgtgtctggaggagacaacaaggtgaccctgtggaaggagagcgtggatggccagtgggtgtgcatcagtgatgtgaacaagggccagggctctgtgtctgcctctgtgacagagggccagcagaatgagcagtag

SEQ ID NO: 219772 - DNA, 978 bp, Artificial Sequence
  derived and/or modified sequence
atgggcaagatggtgagcgtgatcaacaccgtggacaccagccacgaggatatgatacatgatgcccaaatggattattacggcaccaggctagcaacgtgtagttctgacaggtctgtgaagattttcgacgtgaggaacggcggacagatcctaatcgccgatttgcgaggacacgagggccccgtgtggcaagtggcttgggcacaccctatgtatggaaatattctggcatcgtgcagttacgatagaaaggtgattatctggcgcgaggaaaatggaacctgggagaagagtcacgagcatgctgggcacgactccagcgtgaacagtgtctgttgggcgccacacgactacggcctgatcttggcctgcggcagttccgacggtgccattagcctgttgacttacacaggagaaggacaatgggaggtaaaaaaaataaacaatgcccacaccattggatgcaacgcagtaagttgggcccctgctgttgtgcccgggagcctcattgaccatccaagcgggcaaaaacctaactacatcaaacgctttgcaagtggaggctgcgataatctcattaagctatggaaggaagaagaagacgggcagtggaaagaagaacagaagctcgaggctcactcagattgggtgcgcgacgtcgcttgggccccttccattggcctaccaactagtacgattgcctcttgttcgcaggatgggcgggtctttatctggacatgcgacgatgcttcgtcaaatacatggtcccccaaattgctgcataaatttaacgatgtcgtgtggcatgtctcttggtcaatcactgccaacatcctcgccgtctccgggggggacaataaagttactctgtggaaggagtccgtggatggccagtgggtctgcataagcgacgtaaacaagggccagggtagcgtcagcgcatcagtaacggaaggccagcaaaatgagcaatag

SEQ ID NO: 219773 - DNA, 978 bp, Artificial Sequence
  derived and/or modified sequence
atggggaagatggtaagtgtgattaacaccgtcgacacctcacacgaggatatgatccacgacgcccagatggattattacgggactcgcctggcaacttgttccagcgacagaagcgtgaagatttttgacgtgagaaacggagggcagatcctgatcgcagacctgagaggccatgagggcccagtttggcaagtggcctgggcccacccaatgtacggaaatatcttggcaagttgcagttacgaccgaaaagtgatcatctggcgtgaagagaatggcacttgggaaaaatctcacgaacacgcaggccacgactcgagcgtgaactccgtctgctgggccccacacgactatgggctcattctggcttgtggcagctctgatggcgcaatcagcctgctgacctatacaggagagggccagtgggaggttaagaaaattaacaatgcacatactattggctgcaatgctgtgagttgggcgcctgccgtggtgcctggttcgctgatcgaccacccttctggtcagaagccaaattacatcaagcggttcgcgagtggcggttgtgacaatctgattaaattgtggaaggaagaggaggacggtcagtggaaggaggagcagaaactggaggcccactcggactgggttagggacgtggcatgggcccctagcatcggcctgccaacatctactatagccagctgctctcaggatggacgcgtgtttatttggacttgcgatgatgcctcaagtaacacctggtcccccaagctactgcataaatttaatgacgttgtgtggcacgtcagttggagcatcactgctaacatcctggccgtgtcggggggagataataaagtcaccctatggaaggagtccgtggacggtcaatgggtctgtatctcagacgttaataaaggacagggaagtgtctcagcctccgtcacagaaggtcagcagaatgaacagtag

SEQ ID NO: 219774 - protein, 1124 aa, Artificial Sequence
  derived and/or modified sequence
MADGPRCKRRKQANPRRNNVTNYNTVVETNSDSDDEDKLHIVEEESVTDAADCEGVPEDDLPTDQTVLPGRSSEREGNAKNCWEDDRKEGQEILGPEAQADEAGCTVKDDECESDAENEQNHDPNVEEFLQQQDTAVIFPEAPEEDQRQGTPEASGHDENGTPDAFSQLLTCPYCDRGYKRFTSLKEHIKYRHEKNEDNFSCSLCSYTFAYRTQLERHMTSHKSGRDQRHVTQSGCNRKFKCTECGKAFKYKHHLKEHLRIHSGEKPYECPNCKKRFSHSGSYSSHISSKKCISLIPVNGRPRTGLKTSQCSSPSLSASPGSPTRPQIRQKIENKPLQEQLSVNQIKTEPVDYEFKPIVVASGINCSTPLQNGVFTGGGPLQATSSPQGMVQAVVLPTVGLVSPISINLSDIQNVLKVAVDGNVIRQVLENNQANLASKEQETINASPIQQGGHSVISAISLPLVDQDGTTKIIINYSLEQPSQLQVVPQNLKKENPVATNSCKSEKLPEDLTVKSEKDKSFEGGVNDSTCLLCDDCPGDINALPELKHYDLKQPTQPPPLPAAEAEKPESSVSSATGDGNLSPSQPPLKNLLSLLKAYYALNAQPSAEELSKIADSVNLPLDVVKKWFEKMQAGQISVQSSEPSSPEPGKVNIPAKNNDQPQSANANEPQDSTVNLQSPLKMTNSPVLPVGSTTNGSRSSTPSPSPLNLSSSRNTQGYLYTAEGAQEEPQVEPLDLSLPKQQGELLERSTITSVYQNSVYSVQEEPLNLSCAKKEPQKDSCVTDSEPVVNVIPPSANPINIAIPTVTAQLPTIVAIADQNSVPCLRALAANKQTILIPQVAYTYSTTVSPAVQEPPLKVIQPNGNQDERQDTSSEGVSNVEDQNDSDSTPPKKKMRKTENGMYACDLCDKIFQKSSSLLRHKYEHTGKRPHECGICKKAFKHKHHLIEHMRLHSGEKPYQCDKCGKRFSHSGSYSQHMNHRYSYCKREAEERDSTEQEEAGPEILSNEHVGARASPSQGDSDERESLTREEDEDSEKEEEEEDKEMEELQEEKECEKPQGDEEEEEEEEEVEEEEVEEAENEGEEAKTEGLMKDDRAESQASSLGQKVGESSEQVSEEKTNEA

SEQ ID NO: 219775 - protein, 1059 aa, Artificial Sequence
  derived and/or modified sequence
MADGPRCKRRKQANPRRNNVTNYNTVVETNSDSDDEDKLHIVEEESVTDAADCEGVPEDDLPTDQTVLPGRSSEREGNAKNCWEDDRKEGQEILGPEAQADEAGCTVKDDECESDAENEQNHDPNVEEFLQQQDTAVIFPEAPEEDQRQGTPEASGHDENGTPDAFSQLLTCPYCDRGYKRFTSLKEHIKYRHEKNEDNFSCSLCSYTFAYRTQLERHMTSHKSGRDQRHVTQSGCNRKFKCTECGKAFKYKHHLKEHLRIHSGEKPYECPNCKKRFSHSGSYSSHISSKKCISLIPVNGRPRTGLKTSQCSSPSLSASPGSPTRPQIRQKIENKPLQEQLSVNQIKTEPVDYEFKPIVVASGINCSTPLQNGVFTGGGPLQATSSPQGMVQAVVLPTVGLVSPISINLSDIQNVLKVAVDGNVIRQVLENNQANLASKEQETINASPIQQGGHSVISAISLPLVDQDGTTKIIINYSLEQPSQLQVVPQNLKKENPVATNSCKSEKLPEDLTVKSEKDKSFEGGVNDSTCLLCDDCPGDINALPELKHYDLKQPTQPPPLPAAEAEKPESSVSSATGDGNLSPSQPPLKNLLSLLKAYYALNAQPSAEELSKIADSVNLPLDVVKKWFEKMQAGQISVQSSEPSSPEPGKVNIPAKNNDQPQSANANEPQDSTVNLQSPLKMTNSPVLPVGSTTNGSRSSTPSPSPLNLSSSRNTQGYLYTAEGAQEEPQVEPLDLSLPKQQGELLERSTITSVYQNSVYSVQEEPLNLSCAKKEPQKDSCVTDSEPVVNVIPPSANPINIAIPTVTAQLPTIVAIADQNSVPCLRALAANKQTILIPQVAYTYSTTVSPAVQEPPLKVIQPNGNQDERQDTSSEGVSNVEDQNDSDSTPPKKKMRKTENGMYACDLCDKIFQKSSSLLRHKYEHTGKRPHECGICKKAFKHKHHLIEHMRLHSGEKPYQCDKCGKRFSHSGSYSQHMNHRYSYCKREAEERDSTEQEEAGPEILSNEHVGARASPSQGDSDERESLTREEDEDSEKEEEEEDKEMEELQEEKHKKKK

SEQ ID NO: 219776 - protein, 1119 aa, Artificial Sequence
  derived and/or modified sequence
MADGPRCKRRKQANPRRNNVTNYNTVVETNSDSDDEDKLHIVEEESVTDAADCEGVPEDDLPTDQTVLPGRSSEREGNAKNCWEDDRKEGQEILGPEAQADEAGCTVKDDECESDAENEQNHDPNVEEFLQQQDTAVIFPEAPEEDQRQGTPEASGHDENGTPDAFSQLLTCPYCDRGYKRFTSLKEHIKYRHEKNEDNFSCSLCSYTFAYRTQLERHMTSHKSGRDQRHVTQSGCNRKFKCTECGKAFKYKHHLKEHLRIHSGEKPYECPNCKKRFSHSGSYSSHISSKKCISLIPVNGRPRTGLKTSQCSSPSLSASPGSPTRPQIRQKIENKPLQEQLSVNQIKTEPVDYEFKPIVVASGINCSTPLQNGVFTGGGPLQATSSPQGMVQAVVLPTVGLVSPISINLSDIQNVLKVAVDGNVIRQVLENNQANLASKEQETINASPIQQGGHSVISAISLPLVDQDGTTKIIINYSLEQPSQLQVVPQNLKKENPVATNSCKSEKLPEDLTVKSEKDKSFEGGVNDSTCLLCDDCPGDINALPELKHYDLKQPTQPPPLPAAEAEKPESSVSSATGDGNLSPSQPPLKNLLSLLKAYYALNAQPSAEELSKIADSVNLPLDVVKKWFEKMQAGQISVQSSEPSSPEPGKVNIPAKNNDQPQSANANEPQDSTVNLQSPLKMTNSPVLPVGSTTNGSRSSTPSPSPLNLSSSRNTQGYLYTAEGAQEEPQVEPLDLSLPKQQGELLERSSLPEQCLFCPGRTLELVLKKEPQKDSCVTDSEPVVNVIPPSANPINIAIPTVTAQLPTIVAIADQNSVPCLRALAANKQTILIPQVAYTYSTTVSPAVQEPPLKVIQPNGNQDERQDTSSEGVSNVEDQNDSDSTPPKKKMRKTENGMYACDLCDKIFQKSSSLLRHKYEHTGKRPHECGICKKAFKHKHHLIEHMRLHSGEKPYQCDKCGKRFSHSGSYSQHMNHRYSYCKREAEERDSTEQEEAGPEILSNEHVGARASPSQGDSDERESLTREEDEDSEKEEEEEDKEMEELQEEKECEKPQGDEEEEEEEEEVEEEEVEEAENEGEEAKTEGLMKDDRAESQASSLGQKVGESSEQVSEEKTNEA

SEQ ID NO: 219777 - DNA, 5998 bp, Artificial Sequence
  derived and/or modified sequence
gggggggaagggggagggagggggaggaggtgactcgagcatttagacacaagcgagaggatcatggcggatggccccaggtgtaagcgcagaaagcaggcgaacccgcggcgcaataacgttacaaattataatactgtggtagaaacaaattcagattcagatgatgaagacaaactgcatattgtggaagaagaaagtgttacagatgcagctgactgtgaaggtgtaccagaggatgacctgccaacagaccagacagtgttaccagggaggagcagtgaaagagaagggaatgctaagaactgctgggaggatgacagaaaggaagggcaagaaatcctggggcctgaagctcaggcagatgaagcaggatgtacagtaaaagatgatgaatgcgagtcagatgcagaaaatgagcaaaaccatgatcctaatgttgaagagtttctacaacaacaagacactgctgtcatttttcctgaggcacctgaagaggaccagaggcagggcacaccagaagccagtggtcatgatgaaaatggaacaccagatgcattttcacaattactcacctgtccatattgtgatagaggctataaacgctttacctctctgaaagaacacattaaatatcgtcatgaaaagaatgaagataactttagttgctccctgtgcagttacacctttgcatacagaacccaacttgaacgtcacatgacatcacataaatcaggaagagatcaaagacatgtgacgcagtctgggtgtaatcgtaaattcaaatgcactgagtgtggaaaagctttcaaatacaaacatcacctaaaagagcacttaagaattcacagtggagagaagccatatgaatgcccaaactgcaagaaacgcttttcccattctggctcctatagctcacacataagcagtaagaaatgtatcagcttgatacctgtgaatgggcgaccaagaacaggactcaagacatctcagtgttcttcaccgtctctttcagcatcaccaggcagtcccacacgaccacagatacggcaaaagatagagaataaaccccttcaagaacaactttctgttaaccaaattaaaactgaacctgtggattatgaattcaaacccatagtggttgcttcaggaatcaactgttcaacccctttacaaaatggggttttcactggtggtggcccattacaggcaaccagttctcctcagggcatggtgcaagctgttgttctgccaacagttggtttggtgtctcccataagtatcaatttaagtgatattcagaatgtacttaaagtggcggtagatggtaatgtaataaggcaagtgttggagaataatcaagccaatcttgcatccaaagaacaagaaacaatcaatgcttcacccatacaacaaggtggccattctgttatttcagccatcagtcttcctttggttgatcaagatggaacaaccaaaattatcatcaactacagtcttgagcagcctagccaacttcaagttgttcctcaaaatttaaaaaaagaaaatccagtcgctacaaacagttgtaaaagtgaaaagttaccagaagatcttactgttaagtctgagaaggacaaaagctttgaagggggggtgaatgatagcacttgtcttctgtgtgatgattgtccaggagatattaatgcacttccagaattaaagcactatgacctaaagcagcctactcagcctcctccactccctgcagcagaagctgagaagcctgagtcctctgtttcatcagctactggagatggcaatttgtctcctagtcagccacctttaaagaacctcttgtctctcctaaaagcatattatgctttgaatgcacaaccaagtgcagaagagctctcaaaaattgctgattcagtaaacctaccactggatgtagtaaaaaagtggtttgaaaagatgcaagctggacagatttcagtgcagtcttctgaaccatcttctcctgaaccaggcaaagtaaatatccctgccaagaacaatgatcagcctcaatctgcaaatgcaaatgaaccccaggacagcacagtaaatctacaaagtcctttgaagatgactaactccccagttttaccagtgggatcaaccaccaatggttccagaagtagtacaccatccccatcacctctaaacctttcctcatccagaaatacacagggttacttgtacacagctgagggtgcacaagaagagccacaagtagaacctcttgatctttcactaccaaagcaacagggagaattattagaaaggtcaactatcactagtgtttaccagaacagtgtttattctgtccaggaagaacccttgaacttgtcttgcgcaaaaaaggagccacaaaaggacagttgtgttacagactcagaaccagttgtaaatgtaatcccaccaagtgccaaccccataaatatcgctatacctacagtcactgcccagttacccacaatcgtggccattgctgaccagaacagtgttccatgcttaagagcgctagctgccaataagcaaacgattctgattccccaggtggcatacacctactcaactacggtcagccctgcagtccaagaaccacccttgaaagtgatccagccaaatggaaatcaggatgaaagacaagatactagctcagaaggagtatcaaatgtagaggatcagaatgactctgattctacaccgcccaaaaagaaaatgcggaagacagaaaatggaatgtatgcttgtgatttgtgtgacaagatattccaaaagagtagttcattattgagacataaatatgaacacacaggtaaaagacctcatgagtgtggaatctgtaaaaaggcatttaaacacaaacatcatttgattgaacacatgcgattacattctggagaaaagccctatcaatgtgacaaatgtggaaagcgcttctcacactctgggtcttattctcaacacatgaatcatcgctactcctactgtaagagagaagcggaagaacgtgacagcacagagcaggaagaggcagggcctgaaatcctctcgaatgagcacgtgggtgccagggcgtctccctcacagggcgactcggacgagagagagagtttgacaagggaagaggatgaagacagtgaaaaagaggaagaggaggaggataaagagatggaagaattgcaggaagaaaaagaatgtgaaaaaccacaaggggatgaggaagaggaggaggaggaggaagaagtggaagaagaagaggtagaagaggcagagaatgagggagaagaagcaaaaactgaaggtctgatgaaggatgacagggctgaaagtcaagcaagcagcttaggacaaaaagtaggcgagagtagtgagcaagtgtctgaagaaaagacaaatgaagcctaatcgtttttctagaaggaaaataaattctaattgataatgaatttcgttcaatattatccttgcttttcatggaaacacagtaacctgtatgctgtgattcctgttcactactgtgtaaagtaaaaactaaaaaaatacaaaatacaaaacacacacacacacacacacacacacacacacacacacacaaaataaatccgggtgtgcctgaacctcagacctagtaatttttcatgcagttttcaaagttaggaacaagtttgtaacatgcagcagattagaaaaccttaatgactcagagagcaacaatacaagaggttaaaggaagctgattaattagatatgcatctggcattgttttatcttatcagtattatcactcttatgttggtttattcttaagctgtacaattgggagaaattttataattttttattggtaaacatatgctaaatccgcttcagtattttattatgttttttaaaatgtgagaacttctgcactacaaaattcccttcacagagaagtataatgtagttccaacccgtgctaactaccttttataaattcagtctagaaggtagtaatttctaatatttagatgtcttagtagagcgtattatcatttaaagtgtattgttagccttaagaaagcagctgatagaagaactgaagtttcttactcacgtggtttaaaatggagttcaaaagattgccattgagttctgattgcagggactaacaatgttaatctgataaggacagcaaaatcatcagaatcagtgtttgtgattgtgtttgaatatgtggtaacatatgaaggatatgacatgaagctttgtatctcctttggccttaagcaagacctgtgtgctgtaagtgccatttctcagtattttcaaggctctaacccgccttcatccaatgtgtggcctacaataactagcatttgttgatttgtctcttgtatcaaaattcccaaataaaacttaaaaccactgactctgtcagagaaactgaaacactgggacatttcatccttcaattcctcggtattgattttatgttgattgattttcagaatttctctacagaaacgaaagggaaattttctaatctgctttatccatgtacttgcatttcagacatggacatgctattgttatttggctcataactgtttccaaatgttagttattatggacccaatttattaacaacattagctgatttttacctatcagtattattttatttcttttagtttatagatctgtgcaacatttttgtactgtatgtcttcaaacctggcagtattaatacccttcttactgacatatgtacttttagttttagaaaacttttatatttatgtgtcttatttttatatttctttatttattacacagtgtagtgtataatactgtagtttgtattaatacaataatatattttagtatgaaaatttggaaagttgataagatttaaagtagagatgcaattggttctcctgcattgagatttgatttaacagtgttatgttaacatttatacttgccttggactgtagaacagaacttaaatgggaatgtattagttttacaactacaatcaagtcattttacctttacccagtttttaatataaaacttaaattttgaaattcactgtgtgactaatagcatgatgctctgcagttttattaagaaatcagcctaaccatacaactctcatttccttagtaagccaaattaggattaacttctataaacagtgttgggaacaatgtttaacattttgtgccaatttgttcctgtattcatgtatgtaagttacagatctgactcttcatttttaagttccttgttacatcatggtcattttctagttttttaccagactcccatctcacaataaaatgcatcaacaagcctgaactgctgtcattcttttcatcattatcagtattttctttggaaaactgtgaaatggggtacattgtcatcctgcatttgattcatcttgagctgaatttgggtaacactaaatgttttagacattctccactaaattatggattttcttgtggctaaatgtttctggagaggtcagagttgacaaaacctcttcacaggttgctccttcttcctgaaatccttaatcctccgcatttcatgcttcaggtcatttcagggaagcctgggtttagatgcctttctgactctcagctcctgcacttctgtcatcatacctctgatactattatttatattccttccccactaggaacaggaaccacatttgtcatagtcactctcacattcctcactgcctaacagggtgcctggcataagttgggacaacagatatttgttgaataaaaatataatttgcatgtttatggagctcagctatgttctcactttttttgcttctaattccagaatatatgttaaatgatctaataatttgattattttcttataagtcttattaaacactagtcataatagacacaataaattatgccttctttttctattgccttaaaaaaaaaaa

SEQ ID NO: 219778 - DNA, 3375 bp, Artificial Sequence
  derived and/or modified sequence
atggccgacggccccagatgcaagagaagaaagcaggccaaccccagaagaaacaacgtgaccaactacaacaccgtggtggagaccaacagcgacagcgacgacgaggacaagctgcacatcgtggaggaggagagcgtgaccgacgccgccgactgcgagggcgtgcccgaggacgacctgcccaccgaccagaccgtgctgcccggcagaagcagcgagagagagggcaacgccaagaactgctgggaggacgacagaaaggagggccaggagatcctgggccccgaggcccaggccgacgaggccggctgcaccgtgaaggacgacgagtgcgagagcgacgccgagaacgagcagaaccacgaccccaacgtggaggagttcctgcagcagcaggacaccgccgtgatcttccccgaggcccccgaggaggaccagagacagggcacccccgaggccagcggccacgacgagaacggcacccccgacgccttcagccagctgctgacctgcccctactgcgacagaggctacaagagattcaccagcctgaaggagcacatcaagtacagacacgagaagaacgaggacaacttcagctgcagcctgtgcagctacaccttcgcctacagaacccagctggagagacacatgaccagccacaagagcggcagagaccagagacacgtgacccagagcggctgcaacagaaagttcaagtgcaccgagtgcggcaaggccttcaagtacaagcaccacctgaaggagcacctgagaatccacagcggcgagaagccctacgagtgccccaactgcaagaagagattcagccacagcggcagctacagcagccacatcagcagcaagaagtgcatcagcctgatccccgtgaacggcagacccagaaccggcctgaagaccagccagtgcagcagccccagcctgagcgccagccccggcagccccaccagaccccagatcagacagaagatcgagaacaagcccctgcaggagcagctgagcgtgaaccagatcaagaccgagcccgtggactacgagttcaagcccatcgtggtggccagcggcatcaactgcagcacccccctgcagaacggcgtgttcaccggcggcggccccctgcaggccaccagcagcccccagggcatggtgcaggccgtggtgctgcccaccgtgggcctggtgagccccatcagcatcaacctgagcgacatccagaacgtgctgaaggtggccgtggacggcaacgtgatcagacaggtgctggagaacaaccaggccaacctggccagcaaggagcaggagaccatcaacgccagccccatccagcagggcggccacagcgtgatcagcgccatcagcctgcccctggtggaccaggacggcaccaccaagatcatcatcaactacagcctggagcagcccagccagctgcaggtggtgccccagaacctgaagaaggagaaccccgtggccaccaacagctgcaagagcgagaagctgcccgaggacctgaccgtgaagagcgagaaggacaagagcttcgagggcggcgtgaacgacagcacctgcctgctgtgcgacgactgccccggcgacatcaacgccctgcccgagctgaagcactacgacctgaagcagcccacccagcccccccccctgcccgccgccgaggccgagaagcccgagagcagcgtgagcagcgccaccggcgacggcaacctgagccccagccagccccccctgaagaacctgctgagcctgctgaaggcctactacgccctgaacgcccagcccagcgccgaggagctgagcaagatcgccgacagcgtgaacctgcccctggacgtggtgaagaagtggttcgagaagatgcaggccggccagatcagcgtgcagagcagcgagcccagcagccccgagcccggcaaggtgaacatccccgccaagaacaacgaccagccccagagcgccaacgccaacgagccccaggacagcaccgtgaacctgcagagccccctgaagatgaccaacagccccgtgctgcccgtgggcagcaccaccaacggcagcagaagcagcacccccagccccagccccctgaacctgagcagcagcagaaacacccagggctacctgtacaccgccgagggcgcccaggaggagccccaggtggagcccctggacctgagcctgcccaagcagcagggcgagctgctggagagaagcaccatcaccagcgtgtaccagaacagcgtgtacagcgtgcaggaggagcccctgaacctgagctgcgccaagaaggagccccagaaggacagctgcgtgaccgacagcgagcccgtggtgaacgtgatcccccccagcgccaaccccatcaacatcgccatccccaccgtgaccgcccagctgcccaccatcgtggccatcgccgaccagaacagcgtgccctgcctgagagccctggccgccaacaagcagaccatcctgatcccccaggtggcctacacctacagcaccaccgtgagccccgccgtgcaggagccccccctgaaggtgatccagcccaacggcaaccaggacgagagacaggacaccagcagcgagggcgtgagcaacgtggaggaccagaacgacagcgacagcaccccccccaagaagaagatgagaaagaccgagaacggcatgtacgcctgcgacctgtgcgacaagatcttccagaagagcagcagcctgctgagacacaagtacgagcacaccggcaagagaccccacgagtgcggcatctgcaagaaggccttcaagcacaagcaccacctgatcgagcacatgagactgcacagcggcgagaagccctaccagtgcgacaagtgcggcaagagattcagccacagcggcagctacagccagcacatgaaccacagatacagctactgcaagagagaggccgaggagagagacagcaccgagcaggaggaggccggccccgagatcctgagcaacgagcacgtgggcgccagagccagccccagccagggcgacagcgacgagagagagagcctgaccagagaggaggacgaggacagcgagaaggaggaggaggaggaggacaaggagatggaggagctgcaggaggagaaggagtgcgagaagccccagggcgacgaggaggaggaggaggaggaggaggaggtggaggaggaggaggtggaggaggccgagaacgagggcgaggaggccaagaccgagggcctgatgaaggacgacagagccgagagccaggccagcagcctgggccagaaggtgggcgagagcagcgagcaggtgagcgaggagaagaccaacgaggcctag

SEQ ID NO: 219779 - DNA, 3180 bp, Artificial Sequence
  derived and/or modified sequence
atggccgacggccccagatgcaagagaagaaagcaggccaaccccagaagaaacaacgtgaccaactacaacaccgtggtggagaccaacagcgacagcgacgacgaggacaagctgcacatcgtggaggaggagagcgtgaccgacgccgccgactgcgagggcgtgcccgaggacgacctgcccaccgaccagaccgtgctgcccggcagaagcagcgagagagagggcaacgccaagaactgctgggaggacgacagaaaggagggccaggagatcctgggccccgaggcccaggccgacgaggccggctgcaccgtgaaggacgacgagtgcgagagcgacgccgagaacgagcagaaccacgaccccaacgtggaggagttcctgcagcagcaggacaccgccgtgatcttccccgaggcccccgaggaggaccagagacagggcacccccgaggccagcggccacgacgagaacggcacccccgacgccttcagccagctgctgacctgcccctactgcgacagaggctacaagagattcaccagcctgaaggagcacatcaagtacagacacgagaagaacgaggacaacttcagctgcagcctgtgcagctacaccttcgcctacagaacccagctggagagacacatgaccagccacaagagcggcagagaccagagacacgtgacccagagcggctgcaacagaaagttcaagtgcaccgagtgcggcaaggccttcaagtacaagcaccacctgaaggagcacctgagaatccacagcggcgagaagccctacgagtgccccaactgcaagaagagattcagccacagcggcagctacagcagccacatcagcagcaagaagtgcatcagcctgatccccgtgaacggcagacccagaaccggcctgaagaccagccagtgcagcagccccagcctgagcgccagccccggcagccccaccagaccccagatcagacagaagatcgagaacaagcccctgcaggagcagctgagcgtgaaccagatcaagaccgagcccgtggactacgagttcaagcccatcgtggtggccagcggcatcaactgcagcacccccctgcagaacggcgtgttcaccggcggcggccccctgcaggccaccagcagcccccagggcatggtgcaggccgtggtgctgcccaccgtgggcctggtgagccccatcagcatcaacctgagcgacatccagaacgtgctgaaggtggccgtggacggcaacgtgatcagacaggtgctggagaacaaccaggccaacctggccagcaaggagcaggagaccatcaacgccagccccatccagcagggcggccacagcgtgatcagcgccatcagcctgcccctggtggaccaggacggcaccaccaagatcatcatcaactacagcctggagcagcccagccagctgcaggtggtgccccagaacctgaagaaggagaaccccgtggccaccaacagctgcaagagcgagaagctgcccgaggacctgaccgtgaagagcgagaaggacaagagcttcgagggcggcgtgaacgacagcacctgcctgctgtgcgacgactgccccggcgacatcaacgccctgcccgagctgaagcactacgacctgaagcagcccacccagcccccccccctgcccgccgccgaggccgagaagcccgagagcagcgtgagcagcgccaccggcgacggcaacctgagccccagccagccccccctgaagaacctgctgagcctgctgaaggcctactacgccctgaacgcccagcccagcgccgaggagctgagcaagatcgccgacagcgtgaacctgcccctggacgtggtgaagaagtggttcgagaagatgcaggccggccagatcagcgtgcagagcagcgagcccagcagccccgagcccggcaaggtgaacatccccgccaagaacaacgaccagccccagagcgccaacgccaacgagccccaggacagcaccgtgaacctgcagagccccctgaagatgaccaacagccccgtgctgcccgtgggcagcaccaccaacggcagcagaagcagcacccccagccccagccccctgaacctgagcagcagcagaaacacccagggctacctgtacaccgccgagggcgcccaggaggagccccaggtggagcccctggacctgagcctgcccaagcagcagggcgagctgctggagagaagcaccatcaccagcgtgtaccagaacagcgtgtacagcgtgcaggaggagcccctgaacctgagctgcgccaagaaggagccccagaaggacagctgcgtgaccgacagcgagcccgtggtgaacgtgatcccccccagcgccaaccccatcaacatcgccatccccaccgtgaccgcccagctgcccaccatcgtggccatcgccgaccagaacagcgtgccctgcctgagagccctggccgccaacaagcagaccatcctgatcccccaggtggcctacacctacagcaccaccgtgagccccgccgtgcaggagccccccctgaaggtgatccagcccaacggcaaccaggacgagagacaggacaccagcagcgagggcgtgagcaacgtggaggaccagaacgacagcgacagcaccccccccaagaagaagatgagaaagaccgagaacggcatgtacgcctgcgacctgtgcgacaagatcttccagaagagcagcagcctgctgagacacaagtacgagcacaccggcaagagaccccacgagtgcggcatctgcaagaaggccttcaagcacaagcaccacctgatcgagcacatgagactgcacagcggcgagaagccctaccagtgcgacaagtgcggcaagagattcagccacagcggcagctacagccagcacatgaaccacagatacagctactgcaagagagaggccgaggagagagacagcaccgagcaggaggaggccggccccgagatcctgagcaacgagcacgtgggcgccagagccagccccagccagggcgacagcgacgagagagagagcctgaccagagaggaggacgaggacagcgagaaggaggaggaggaggaggacaaggagatggaggagctgcaggaggagaagcacaagaagaagaagtag

SEQ ID NO: 219780 - DNA, 3360 bp, Artificial Sequence
  derived and/or modified sequence
atggccgacggccccagatgcaagagaagaaagcaggccaaccccagaagaaacaacgtgaccaactacaacaccgtggtggagaccaacagcgacagcgacgacgaggacaagctgcacatcgtggaggaggagagcgtgaccgacgccgccgactgcgagggcgtgcccgaggacgacctgcccaccgaccagaccgtgctgcccggcagaagcagcgagagagagggcaacgccaagaactgctgggaggacgacagaaaggagggccaggagatcctgggccccgaggcccaggccgacgaggccggctgcaccgtgaaggacgacgagtgcgagagcgacgccgagaacgagcagaaccacgaccccaacgtggaggagttcctgcagcagcaggacaccgccgtgatcttccccgaggcccccgaggaggaccagagacagggcacccccgaggccagcggccacgacgagaacggcacccccgacgccttcagccagctgctgacctgcccctactgcgacagaggctacaagagattcaccagcctgaaggagcacatcaagtacagacacgagaagaacgaggacaacttcagctgcagcctgtgcagctacaccttcgcctacagaacccagctggagagacacatgaccagccacaagagcggcagagaccagagacacgtgacccagagcggctgcaacagaaagttcaagtgcaccgagtgcggcaaggccttcaagtacaagcaccacctgaaggagcacctgagaatccacagcggcgagaagccctacgagtgccccaactgcaagaagagattcagccacagcggcagctacagcagccacatcagcagcaagaagtgcatcagcctgatccccgtgaacggcagacccagaaccggcctgaagaccagccagtgcagcagccccagcctgagcgccagccccggcagccccaccagaccccagatcagacagaagatcgagaacaagcccctgcaggagcagctgagcgtgaaccagatcaagaccgagcccgtggactacgagttcaagcccatcgtggtggccagcggcatcaactgcagcacccccctgcagaacggcgtgttcaccggcggcggccccctgcaggccaccagcagcccccagggcatggtgcaggccgtggtgctgcccaccgtgggcctggtgagccccatcagcatcaacctgagcgacatccagaacgtgctgaaggtggccgtggacggcaacgtgatcagacaggtgctggagaacaaccaggccaacctggccagcaaggagcaggagaccatcaacgccagccccatccagcagggcggccacagcgtgatcagcgccatcagcctgcccctggtggaccaggacggcaccaccaagatcatcatcaactacagcctggagcagcccagccagctgcaggtggtgccccagaacctgaagaaggagaaccccgtggccaccaacagctgcaagagcgagaagctgcccgaggacctgaccgtgaagagcgagaaggacaagagcttcgagggcggcgtgaacgacagcacctgcctgctgtgcgacgactgccccggcgacatcaacgccctgcccgagctgaagcactacgacctgaagcagcccacccagcccccccccctgcccgccgccgaggccgagaagcccgagagcagcgtgagcagcgccaccggcgacggcaacctgagccccagccagccccccctgaagaacctgctgagcctgctgaaggcctactacgccctgaacgcccagcccagcgccgaggagctgagcaagatcgccgacagcgtgaacctgcccctggacgtggtgaagaagtggttcgagaagatgcaggccggccagatcagcgtgcagagcagcgagcccagcagccccgagcccggcaaggtgaacatccccgccaagaacaacgaccagccccagagcgccaacgccaacgagccccaggacagcaccgtgaacctgcagagccccctgaagatgaccaacagccccgtgctgcccgtgggcagcaccaccaacggcagcagaagcagcacccccagccccagccccctgaacctgagcagcagcagaaacacccagggctacctgtacaccgccgagggcgcccaggaggagccccaggtggagcccctggacctgagcctgcccaagcagcagggcgagctgctggagagaagcagcctgcccgagcagtgcctgttctgccccggcagaaccctggagctggtgctgaagaaggagccccagaaggacagctgcgtgaccgacagcgagcccgtggtgaacgtgatcccccccagcgccaaccccatcaacatcgccatccccaccgtgaccgcccagctgcccaccatcgtggccatcgccgaccagaacagcgtgccctgcctgagagccctggccgccaacaagcagaccatcctgatcccccaggtggcctacacctacagcaccaccgtgagccccgccgtgcaggagccccccctgaaggtgatccagcccaacggcaaccaggacgagagacaggacaccagcagcgagggcgtgagcaacgtggaggaccagaacgacagcgacagcaccccccccaagaagaagatgagaaagaccgagaacggcatgtacgcctgcgacctgtgcgacaagatcttccagaagagcagcagcctgctgagacacaagtacgagcacaccggcaagagaccccacgagtgcggcatctgcaagaaggccttcaagcacaagcaccacctgatcgagcacatgagactgcacagcggcgagaagccctaccagtgcgacaagtgcggcaagagattcagccacagcggcagctacagccagcacatgaaccacagatacagctactgcaagagagaggccgaggagagagacagcaccgagcaggaggaggccggccccgagatcctgagcaacgagcacgtgggcgccagagccagccccagccagggcgacagcgacgagagagagagcctgaccagagaggaggacgaggacagcgagaaggaggaggaggaggaggacaaggagatggaggagctgcaggaggagaaggagtgcgagaagccccagggcgacgaggaggaggaggaggaggaggaggaggtggaggaggaggaggtggaggaggccgagaacgagggcgaggaggccaagaccgagggcctgatgaaggacgacagagccgagagccaggccagcagcctgggccagaaggtgggcgagagcagcgagcaggtgagcgaggagaagaccaacgaggcctag

SEQ ID NO: 219781 - DNA, 3375 bp, Artificial Sequence
  derived and/or modified sequence
atggcagacgggccacggtgcaagcgccgcaaacaggcaaatccgcgacgtaataacgtgactaactacaatacagtcgtggagaccaactccgattcagatgatgaggacaaactccacatcgtcgaagaagagtctgtaaccgacgcagccgattgcgagggtgtccctgaggacgacttacctacagaccagaccgtattaccaggcaggtcatcagagagagagggcaacgccaaaaattgttgggaggacgatcggaaggaggggcaggaaattctgggacccgaggcccaggctgatgaggccggttgtaccgtaaaggacgatgagtgcgagagcgacgcggaaaacgaacagaatcatgaccctaacgtggaggaatttctgcaacagcaggatacagctgtcatattccctgaggctcctgaggaggatcaaaggcagggaacgcctgaggcgagcggccacgatgagaatggcacacctgacgccttctctcagcttctgacatgtccctactgtgatagaggttataagcggttcacctcactgaaagagcatatcaagtaccgtcacgaaaaaaacgaggataattttagctgttctctttgttcctacactttcgcatatagaactcaattggagcgccatatgaccagccataaaagcggtcgggatcaaaggcacgtcacgcagtccggttgcaatcgaaagtttaagtgcaccgagtgcggcaaggccttcaaatacaagcatcatctaaaggaacacctcaggatccactccggagagaagccgtacgagtgtccaaactgtaaaaagcgctttagccattccgggtcttactcatcccacatttcttcaaagaagtgcatctctctcatccctgtcaacggacggccacgcacggggcttaagacgtcccagtgctctagccctagccttagcgcctctccaggcagcccaacgaggccccaaatccggcaaaagatcgagaataaaccactccaggaacagctgagcgtaaaccagatcaaaaccgagcccgtcgattacgagttcaagccaattgtggtggctagcggcatcaactgctccactcccctgcagaacggagtcttcactggcggaggcccgcttcaggccacttcgtccccccagggcatggtacaggctgtggtgctgccaacagtgggcctggtgtcccctattagcataaatcttagtgacattcagaatgtgctgaaggtggcagtggatggcaacgttataaggcaggtcctcgagaataatcaagcgaacttggcgtcgaaggaacaagagaccataaacgcgtctcccatccagcagggaggacatagcgtgatttcagctatcagcctgcctcttgtcgaccaggatggcaccacaaaaatcatcattaactactctctcgagcaaccaagccagctgcaggtggtgccccaaaatttaaagaaagagaatccagtggccactaactcctgcaaaagtgaaaaattgccagaagatctgaccgtgaagagcgagaaagacaaaagctttgagggcggagtgaacgattcaacctgcctcctctgcgatgattgccccggcgacattaatgctttgcccgagttaaagcattacgatttgaaacagccaacgcagcccccccctttgcccgcggcggaagcagaaaaacctgagtcctccgtgagctccgctaccggcgatgggaatctgagcccatcccagcctccgctgaaaaatctattgtcgctgcttaaagcctactacgcactgaacgcacaaccgagcgctgaggagctgtcaaagatagccgacagtgtgaacctgcctttagatgttgtcaagaaatggttcgagaagatgcaggccggccagatctcagttcagtcttccgagccttcttcacccgaacccgggaaggtgaacatccccgccaaaaataacgaccagcctcaaagcgccaatgccaacgaaccacaggatagcacagtcaacctgcagtcccctctgaagatgactaatagtcctgtgttgcccgtgggaagcacaacaaacggttccagatcctctacaccctccccttctcccctgaatctaagtagctccagaaacacccagggctacttgtataccgccgagggtgcccaggaggagccccaggtggagcctcttgacctttccctgcctaagcagcagggagaacttctcgagaggtccaccatcaccagcgtgtaccagaattctgtgtactctgtgcaagaagaacccctcaacttatcctgtgcgaaaaaagagccacaaaaggattcatgcgttactgattccgaacccgtggtcaatgttattccaccaagtgcaaatccaatcaacatcgcaatcccaacggtcaccgcacagctgcctactatcgtggctatagcagaccagaatagcgtgccatgcctacgggccctagctgcaaacaaacagaccatcttgattccccaggtagcatatacctattctaccacggtcagccccgctgttcaagaaccgcctctcaaggtgattcagcctaatggtaatcaggatgagcggcaggacacatcctcagagggcgtttccaatgttgaggatcagaacgattctgatagcacccctcccaaaaagaaaatgcgcaagaccgagaacggaatgtatgcatgcgacctttgtgataagatattccagaagtcaagcagtctcctgagacataaatacgagcacaccggcaaaaggccacacgaatgcggcatctgtaagaaggctttcaagcacaagcaccatttgatcgagcacatgcggctgcattctggcgaaaaaccataccagtgcgacaaatgtgggaaaagattttctcattccgggagttacagtcagcacatgaaccacagatattcctattgtaagcgtgaagccgaggaaagagacagcacggaacaggaggaggcaggaccagagatcttgtccaatgaacacgtcggagccagggcctccccatctcagggcgattctgacgagagggagagcctgacccgtgaggaagatgaggattctgagaaagaggaggaagaagaagataaggagatggaggagctgcaggaagagaaggagtgcgaaaaaccccagggagatgaagaagaggaggaagaagaagaagaggttgaagaggaggaggtggaggaagccgagaacgagggggaagaggcgaagaccgagggcttgatgaaggacgaccgggccgagtcccaggcctcctccctggggcagaaagtgggtgagtcctccgaacaggtcagcgaggagaaaaccaatgaagcctag

SEQ ID NO: 219782 - DNA, 3180 bp, Artificial Sequence
  derived and/or modified sequence
atggcagatggcccccggtgcaagagacgcaagcaagcgaaccccaggcgcaacaatgtcacaaattataacactgtggtggaaactaattccgactctgatgatgaagacaagctgcatattgtcgaagaggagtcggtgaccgatgccgcagattgcgagggagtgcctgaggacgatctgcctaccgatcagacagtgcttcctggacgttcctctgagcgtgagggaaacgcaaagaactgctgggaggacgatcgaaaggaggggcaggaaatcctcgggccagaggcccaggccgacgaggccggctgtaccgtgaaagatgatgagtgtgaatccgacgccgaaaacgagcagaatcatgacccaaacgtcgaggagtttctccaacagcaggatacagcagtgatttttccagaggctcccgaagaggatcagaggcaggggactccggaggcctcaggacatgacgagaacggcaccccggacgccttctcccagttgttaacttgtccctactgcgacagaggatacaagagatttaccagtctgaaagaacatatcaagtatagacacgagaagaatgaagacaatttctcttgtagtctgtgctcttacacctttgcttatagaacacagctagagcggcatatgacgagccacaagagcggcagagatcagcggcacgtcacacagagtggctgcaaccgaaagtttaagtgtactgaatgtggtaaagcattcaagtacaaacaccatctaaaagaacacctgaggattcatagcggggagaagccttatgagtgccctaactgtaaaaagagattctctcactctggttcctacagctcgcatatcagcagcaaaaagtgcattagcctgatccctgttaacggccgtcctaggacagggctgaaaacctctcagtgttctagcccatcactgtccgcatccccagggtcccctacgaggccgcaaatacgtcagaaaatcgagaacaaaccactgcaggagcaactatccgtgaatcagatcaagacggaacccgtagactacgaatttaagcccatcgtggtggctagtggaatcaattgcagcacaccgctgcaaaatggagtgttcaccggcgggggtccgcttcaagccacctctagcccccaggggatggttcaggcggtggttttgccaacagttggcttggtaagccctatcagcatcaatttgagcgatatccaaaatgtccttaaggtcgccgtcgatggtaacgtgattcgacaagtcttggaaaataatcaggcgaacttggcaagcaaggagcaggaaaccatcaacgccagcccaattcagcagggcggtcactccgttatctccgcgatctccctgccgctggtagatcaggatggaaccactaaaatcattatcaactattccctggagcaaccctcgcagctccaggtggtcccccagaacctcaagaaggaaaatccggttgctaccaattcttgcaaatccgagaagctacctgaagacctgaccgttaaatcggagaaagataagtcttttgaaggtggagttaatgactccacatgcctcttgtgtgatgactgcccaggggacattaacgctctaccagagcttaagcactatgatttaaagcagcccactcagccacctcctttgccagccgccgaggctgagaaacccgagtcatccgtgagtagtgctactggagatggcaatctctctcccagtcagcccccattgaagaacttgctgagtcttctgaaggcatactacgcgctgaatgcccaaccctcagctgaggaactgtctaaaatcgccgactccgtgaacctccccctcgacgttgtgaaaaaatggtttgaaaagatgcaggccgggcagatatcggtccagagctccgagccctcatctcccgaacctggcaaggtgaatataccggccaagaataacgaccagccccagtccgccaatgccaatgaaccgcaggacagtaccgtgaatctgcagtccccgcttaaaatgactaattcacccgtcttacccgtgggcagcacgacaaacggaagccggagttcaacaccatcccctagtccacttaatctctcaagttcacgaaacacacaggggtatctttacacagcagaaggcgcccaagaagagccacaggttgaaccactggacctgtctctgcctaagcagcagggagaactgttggaaagatcaaccatcacatcagtctatcagaattctgtttattctgtgcaggaggagcctctgaacctgagctgcgctaagaaagagcctcagaaagattcctgtgtgacagacagtgagcctgtggttaacgtgattcctccctcagcgaaccctatcaacatagccatcccaaccgtaacagctcagcttccgactattgtcgccatcgccgaccaaaacagtgtcccatgccttagggccctggcggcaaataagcagacaattttaatacctcaggtcgcttacacatactctacaactgtatcgccagctgtgcaggaaccacctcttaaggtcatccagcctaacggcaatcaggacgaacgccaggacacatcgagcgagggagtctcaaatgtggaagatcaaaacgacagcgactctaccccaccaaagaaaaaaatgcgcaaaactgaaaacgggatgtacgcctgtgacttgtgtgataaaatctttcaaaagagcagcagtttgctccggcataaatacgagcacaccgggaaacgaccacacgaatgcggtatctgtaagaaggcattcaaacacaaacaccatctcatcgagcacatgcggctgcatagcggggaaaagccctaccagtgcgataaatgtgggaagagattcagtcacagtggatcctacagtcagcacatgaaccatcggtattcttattgtaaacgggaggccgaggagagggactcaaccgagcaggaggaggcgggccccgaaatcctctcaaacgagcacgttggtgcccgcgcctctcctagccaaggagatagtgacgagagagaatcactcacacgcgaggaggacgaggatagcgaaaaagaagaggaggaggaagacaaggagatggaggaactccaagaagaaaagcataagaaaaagaaatag

SEQ ID NO: 219783 - DNA, 3360 bp, Artificial Sequence
  derived and/or modified sequence
atggcagacggccctaggtgcaaacgccggaaacaggccaatcctcgtcgtaataatgtgacaaattataatactgtggtggaaaccaattctgactctgatgatgaggataagctgcacattgtggaagaggaaagcgtgaccgatgctgccgactgcgaaggtgtcccagaagatgacctgccaaccgatcagacagtccttcctggacgaagcagtgagagggaagggaacgcaaagaattgctgggaggacgaccggaaggaagggcaggaaatcctaggtcccgaggctcaagctgatgaggccggatgtacagttaaagacgacgagtgcgagtctgatgcagaaaacgaacagaatcacgacccaaatgttgaggaatttctgcaacagcaggacacagctgtcatattccccgaggcccccgaggaggatcagagacagggaacacctgaggcctctggccatgacgaaaacggcacaccggatgctttcagccagcttctgacctgcccgtattgcgacagagggtacaaaaggttcacgagcctgaaggagcatatcaagtataggcatgagaaaaacgaggacaactttagctgctccctatgctcttatacgttcgcttatcggacccagcttgagcggcacatgacatcacacaagtccggacgcgatcaaagacacgtgacacagagcggctgtaacagaaaatttaaatgtaccgaatgcggtaaggcgttcaagtataagcaccacctgaaggaacacttacgcatccattccggcgagaagccgtatgagtgccccaactgcaaaaaacggttttcccactcaggcagttacagtagccatatatcctccaaaaagtgcattagcctgatacccgtgaacggaaggccacgaacgggactgaaaactagtcagtgcagcagtccatctctatccgcttccccagggagcccaaccaggcctcagatcagacagaagattgaaaataaacccctgcaggaacagctaagtgtaaatcagattaagaccgagccagtcgactacgagttcaaacccatcgtcgtcgcctccggaatcaactgctccacacctctgcagaacggcgtgtttacaggcggtggcccgctgcaggctaccagttccccacaaggcatggtccaggccgtagtgttaccgaccgttggactggtgagccccatttcaattaatcttagtgatattcaaaatgtactgaaagtcgcagtggatgggaacgtgattaggcaagtgctggagaacaaccaggcaaacctggcctcgaaagagcaagaaaccattaatgcaagccctatccagcagggtggccatagcgtaatttctgccatctcccttcctctggtggatcaagacggaactacaaaaatcattataaactacagtctggaacaaccaagtcaattacaagtggttccgcaaaatcttaagaaagaaaatccagtcgccaccaactcctgcaagtcagagaaactgcccgaagatctaacagtgaaatccgaaaaggataaaagcttcgaagggggagtgaacgattctacctgcctcctatgcgacgattgtccaggcgacatcaatgctctgcccgagctgaagcactacgatcttaagcaacctacacagcctccacctctgcctgcagctgaggcggagaagccagagagctccgtgtcttctgcaaccggcgatggcaacctctcccccagtcagccacccctgaaaaacctgttatctctgctgaaagcctactatgccctcaatgcccagccctctgccgaggaactgtccaagattgctgactccgtcaacctgcctctcgatgttgttaaaaaatggtttgagaaaatgcaggctggacagatctcggtccagtcctctgagccttcctcaccggagccaggcaaggtgaacatacctgctaagaataacgaccagcctcagtctgcaaacgccaatgaaccacaggattctacagtgaacctgcagagccccctgaagatgacaaactcacctgtgttgcccgtagggtccacgaccaatggaagtcggtcctctaccccttccccctcaccccttaacctctcatcgtcgcgtaacacccaaggttatctttatacggctgagggagcccaggaggaacctcaggtcgaacctttagatctttcgctccccaaacagcagggggagctgctagagaggagcagcctgccggaacagtgcttgttttgcccaggtaggacattagagcttgtcttaaaaaaagagccacagaaagactcatgtgtcacggactctgaacctgttgtgaatgtgataccaccctcagctaatcccattaacattgcaattccgactgtaacagcccaattgcctacgattgtcgcgatcgcagaccagaatagcgtgccctgcctgagggcactggccgctaacaagcagacaatcttgattcctcaggtggcctatacttattccaccaccgtgtcgcctgccgtgcaagagcccccattgaaagtgatccaaccgaacggcaatcaggacgagcggcaggatacctcaagcgagggagtttcaaacgttgaagaccaaaatgactctgattctactccccctaagaagaagatgaggaagacagagaatggaatgtatgcatgcgatctgtgtgataagatattccagaaaagtagctcactgcttcgccataagtatgagcacacgggaaagcggccacacgagtgtgggatttgcaagaaggcattcaaacataaacaccacctgatagaacatatgcgcctacacagcggagagaagccttatcagtgcgacaaatgtggaaaacggttctcccactctggcagctattcccagcacatgaaccatagatatagctattgcaaacgggaagctgaggaacgcgactccaccgagcaggaagaggcaggacctgaaatcctgtccaacgaacacgtgggcgcgcgggcctcgccatctcagggagattcggatgagagagagtctttgacccgggaggaggacgaggatagcgagaaggaggaagaagaagaggataaagaaatggaggaactacaggaggaaaaggaatgcgagaaacctcagggagatgaggaggaggaagaagaggaggaggaagttgaagaggaggaggtcgaagaggctgaaaacgaaggcgaagaggcaaagacggaaggacttatgaaggatgatcgcgccgagtcacaagcctccagcttgggtcagaaagtgggtgaatcttctgaacaggtgagcgaagagaagactaacgaagcctag

SEQ ID NO: 219784 - DNA, 3375 bp, Artificial Sequence
  derived and/or modified sequence
atggctgatggcccccgctgcaagaggaggaagcaggccaaccccaggagaaataatgtgaccaactacaacacagtggtggagaccaacagcgacagtgatgatgaggacaagctgcacatcgtggaggaggagagcgtgacagatgctgctgactgtgaaggagtgcctgaagatgacctgcccacagaccagacagtgctgcccggccgcagcagcgagcgggagggcaatgccaagaactgctgggaggatgacaggaaggagggccaggagatcctgggccctgaggcccaggctgatgaagctggctgcaccgtgaaggatgatgaatgtgagagtgatgctgaaaatgagcagaaccacgaccccaacgtggaggagttcctgcagcagcaggacacagctgtgatcttccctgaggcccctgaggaggaccagaggcagggcaccccagaggccagcggccatgatgaaaatggcaccccagatgccttcagccagctgctgacctgcccctactgtgaccggggctacaagcgcttcaccagcctgaaggagcacatcaagtacagacatgagaagaatgaagacaacttcagctgcagcctgtgcagctacacctttgcctaccgcacccagctggagcggcacatgaccagccacaagagcggccgggaccagagacatgtgacccagagcggctgcaacaggaagttcaagtgcacagaatgtgggaaggccttcaagtacaagcaccacctgaaggagcacctgcgcatccacagcggggagaagccctatgaatgtcccaactgcaagaagcgcttcagccacagcggcagctacagcagccacatcagcagcaagaagtgcatcagcctcatccctgtgaatggccggcccaggacaggcctgaagaccagccagtgcagcagccccagcctgagcgccagccctggcagccccacccggccccagatccggcagaagattgagaacaagcccctgcaggagcagctgtctgtgaaccagatcaagacagagcctgtggactatgagttcaagcccatcgtggtggccagcggcatcaactgcagcacccccctgcagaatggagtcttcaccggcggcggccccctgcaggccaccagcagcccccagggcatggtgcaggccgtggtgctgcccaccgtgggcctggtgagccccatcagcatcaacctgagtgacatccagaatgtgctgaaggtggccgtggatggaaatgtcatccggcaggtgctggagaacaaccaggccaacctggccagcaaggagcaggagaccatcaatgccagccccatccagcagggcggccacagcgtcatcagcgccatcagcctgcccctggtggaccaggacggcaccaccaagatcatcatcaactacagcctggagcagcccagccagctgcaggtggtgccccagaacctgaagaaggaaaatcctgtggccaccaacagctgcaagtctgagaagctgcctgaggacctgactgtgaagtctgagaaggacaagagctttgagggcggcgtgaatgacagcacctgcctgctgtgtgatgactgccctggggacatcaatgccctgcctgagctgaagcactatgacctgaagcagcccacccagcccccacccctgcctgctgctgaggccgagaagccagagagctctgtgtcctctgccactggagatggcaacctgagccccagccagccccccctgaagaacctgctgagcctgctgaaggcctactatgccctgaatgcccagcccagcgctgaggagctgagcaagattgctgacagcgtgaacctgcccctggatgtggtgaagaagtggtttgagaagatgcaggccggccagatctctgtgcagagcagcgagcccagcagccctgagcccgggaaggtgaacatcccagccaagaacaatgaccagccccagagcgccaatgccaatgagccccaggacagcacagtgaacctgcagagccccctgaagatgaccaacagccctgtgctgcctgtgggcagcaccaccaacggcagccgcagcagcacccccagccccagccccctgaacctgagcagcagcaggaacacccagggctacctgtacacagctgagggcgcccaggaggagccccaggtggagcccctggacctgagcctgcccaagcagcagggcgagctgctggagaggagcaccatcacctctgtgtaccagaacagcgtgtacagcgtgcaggaggagcccctgaacctgagctgtgccaagaaggagccccagaaggacagctgtgtgacagacagcgagcctgtggtgaatgtcatcccccccagcgccaaccccatcaacatcgccatccccaccgtgacagcccagctgcccaccatcgtggccatcgctgaccagaacagcgtgccctgcctgcgggccctggccgccaacaagcagaccatcctgatcccccaggtggcctacacctacagcaccaccgtgtccccagctgtgcaggagccccccctgaaggtgatccagcccaacggcaaccaggatgagcggcaggacaccagcagcgagggcgtgtccaatgtggaggaccagaatgacagcgacagcaccccacccaagaagaagatgaggaagacagaaaatggcatgtatgcctgtgacctgtgtgacaagatcttccagaagagcagcagcctgctgcggcacaagtatgagcacacaggcaagaggcctcatgaatgtggcatctgcaagaaggccttcaagcacaagcaccacctgattgagcacatgaggctgcacagcggggagaagccctaccagtgtgacaagtgtgggaagcgcttcagccacagcggcagctacagccagcacatgaaccaccgctacagctactgcaagcgggaggccgaggagcgggacagcacagagcaggaggaggccggccctgagatcctgagcaatgagcacgtgggcgcccgggccagccccagccagggcgacagtgatgagcgggagagcctgacccgggaggaggatgaggacagcgagaaggaggaggaggaggaggacaaggagatggaggagctgcaggaggagaaggaatgtgagaagccccagggagatgaggaggaggaggaggaggaggaggaggtggaggaggaggaggtggaggaggctgaaaatgaaggagaggaggccaagacagagggcctgatgaaggatgacagagctgagagccaggccagcagcctgggccagaaggtgggggagagcagcgagcaggtgtctgaggagaagaccaatgaggcctag

SEQ ID NO: 219785 - DNA, 3180 bp, Artificial Sequence
  derived and/or modified sequence
atggctgatggcccccgctgcaagaggaggaagcaggccaaccccaggagaaataatgtgaccaactacaacacagtggtggagaccaacagcgacagtgatgatgaggacaagctgcacatcgtggaggaggagagcgtgacagatgctgctgactgtgaaggagtgcctgaagatgacctgcccacagaccagacagtgctgcccggccgcagcagcgagcgggagggcaatgccaagaactgctgggaggatgacaggaaggagggccaggagatcctgggccctgaggcccaggctgatgaagctggctgcaccgtgaaggatgatgaatgtgagagtgatgctgaaaatgagcagaaccacgaccccaacgtggaggagttcctgcagcagcaggacacagctgtgatcttccctgaggcccctgaggaggaccagaggcagggcaccccagaggccagcggccatgatgaaaatggcaccccagatgccttcagccagctgctgacctgcccctactgtgaccggggctacaagcgcttcaccagcctgaaggagcacatcaagtacagacatgagaagaatgaagacaacttcagctgcagcctgtgcagctacacctttgcctaccgcacccagctggagcggcacatgaccagccacaagagcggccgggaccagagacatgtgacccagagcggctgcaacaggaagttcaagtgcacagaatgtgggaaggccttcaagtacaagcaccacctgaaggagcacctgcgcatccacagcggggagaagccctatgaatgtcccaactgcaagaagcgcttcagccacagcggcagctacagcagccacatcagcagcaagaagtgcatcagcctcatccctgtgaatggccggcccaggacaggcctgaagaccagccagtgcagcagccccagcctgagcgccagccctggcagccccacccggccccagatccggcagaagattgagaacaagcccctgcaggagcagctgtctgtgaaccagatcaagacagagcctgtggactatgagttcaagcccatcgtggtggccagcggcatcaactgcagcacccccctgcagaatggagtcttcaccggcggcggccccctgcaggccaccagcagcccccagggcatggtgcaggccgtggtgctgcccaccgtgggcctggtgagccccatcagcatcaacctgagtgacatccagaatgtgctgaaggtggccgtggatggaaatgtcatccggcaggtgctggagaacaaccaggccaacctggccagcaaggagcaggagaccatcaatgccagccccatccagcagggcggccacagcgtcatcagcgccatcagcctgcccctggtggaccaggacggcaccaccaagatcatcatcaactacagcctggagcagcccagccagctgcaggtggtgccccagaacctgaagaaggaaaatcctgtggccaccaacagctgcaagtctgagaagctgcctgaggacctgactgtgaagtctgagaaggacaagagctttgagggcggcgtgaatgacagcacctgcctgctgtgtgatgactgccctggggacatcaatgccctgcctgagctgaagcactatgacctgaagcagcccacccagcccccacccctgcctgctgctgaggccgagaagccagagagctctgtgtcctctgccactggagatggcaacctgagccccagccagccccccctgaagaacctgctgagcctgctgaaggcctactatgccctgaatgcccagcccagcgctgaggagctgagcaagattgctgacagcgtgaacctgcccctggatgtggtgaagaagtggtttgagaagatgcaggccggccagatctctgtgcagagcagcgagcccagcagccctgagcccgggaaggtgaacatcccagccaagaacaatgaccagccccagagcgccaatgccaatgagccccaggacagcacagtgaacctgcagagccccctgaagatgaccaacagccctgtgctgcctgtgggcagcaccaccaacggcagccgcagcagcacccccagccccagccccctgaacctgagcagcagcaggaacacccagggctacctgtacacagctgagggcgcccaggaggagccccaggtggagcccctggacctgagcctgcccaagcagcagggcgagctgctggagaggagcaccatcacctctgtgtaccagaacagcgtgtacagcgtgcaggaggagcccctgaacctgagctgtgccaagaaggagccccagaaggacagctgtgtgacagacagcgagcctgtggtgaatgtcatcccccccagcgccaaccccatcaacatcgccatccccaccgtgacagcccagctgcccaccatcgtggccatcgctgaccagaacagcgtgccctgcctgcgggccctggccgccaacaagcagaccatcctgatcccccaggtggcctacacctacagcaccaccgtgtccccagctgtgcaggagccccccctgaaggtgatccagcccaacggcaaccaggatgagcggcaggacaccagcagcgagggcgtgtccaatgtggaggaccagaatgacagcgacagcaccccacccaagaagaagatgaggaagacagaaaatggcatgtatgcctgtgacctgtgtgacaagatcttccagaagagcagcagcctgctgcggcacaagtatgagcacacaggcaagaggcctcatgaatgtggcatctgcaagaaggccttcaagcacaagcaccacctgattgagcacatgaggctgcacagcggggagaagccctaccagtgtgacaagtgtgggaagcgcttcagccacagcggcagctacagccagcacatgaaccaccgctacagctactgcaagcgggaggccgaggagcgggacagcacagagcaggaggaggccggccctgagatcctgagcaatgagcacgtgggcgcccgggccagccccagccagggcgacagtgatgagcgggagagcctgacccgggaggaggatgaggacagcgagaaggaggaggaggaggaggacaaggagatggaggagctgcaggaggagaagcacaagaagaagaagtag

SEQ ID NO: 219786 - DNA, 3360 bp, Artificial Sequence
  derived and/or modified sequence
atggctgatggcccccgctgcaagaggaggaagcaggccaaccccaggagaaataatgtgaccaactacaacacagtggtggagaccaacagcgacagtgatgatgaggacaagctgcacatcgtggaggaggagagcgtgacagatgctgctgactgtgaaggagtgcctgaagatgacctgcccacagaccagacagtgctgcccggccgcagcagcgagcgggagggcaatgccaagaactgctgggaggatgacaggaaggagggccaggagatcctgggccctgaggcccaggctgatgaagctggctgcaccgtgaaggatgatgaatgtgagagtgatgctgaaaatgagcagaaccacgaccccaacgtggaggagttcctgcagcagcaggacacagctgtgatcttccctgaggcccctgaggaggaccagaggcagggcaccccagaggccagcggccatgatgaaaatggcaccccagatgccttcagccagctgctgacctgcccctactgtgaccggggctacaagcgcttcaccagcctgaaggagcacatcaagtacagacatgagaagaatgaagacaacttcagctgcagcctgtgcagctacacctttgcctaccgcacccagctggagcggcacatgaccagccacaagagcggccgggaccagagacatgtgacccagagcggctgcaacaggaagttcaagtgcacagaatgtgggaaggccttcaagtacaagcaccacctgaaggagcacctgcgcatccacagcggggagaagccctatgaatgtcccaactgcaagaagcgcttcagccacagcggcagctacagcagccacatcagcagcaagaagtgcatcagcctcatccctgtgaatggccggcccaggacaggcctgaagaccagccagtgcagcagccccagcctgagcgccagccctggcagccccacccggccccagatccggcagaagattgagaacaagcccctgcaggagcagctgtctgtgaaccagatcaagacagagcctgtggactatgagttcaagcccatcgtggtggccagcggcatcaactgcagcacccccctgcagaatggagtcttcaccggcggcggccccctgcaggccaccagcagcccccagggcatggtgcaggccgtggtgctgcccaccgtgggcctggtgagccccatcagcatcaacctgagtgacatccagaatgtgctgaaggtggccgtggatggaaatgtcatccggcaggtgctggagaacaaccaggccaacctggccagcaaggagcaggagaccatcaatgccagccccatccagcagggcggccacagcgtcatcagcgccatcagcctgcccctggtggaccaggacggcaccaccaagatcatcatcaactacagcctggagcagcccagccagctgcaggtggtgccccagaacctgaagaaggaaaatcctgtggccaccaacagctgcaagtctgagaagctgcctgaggacctgactgtgaagtctgagaaggacaagagctttgagggcggcgtgaatgacagcacctgcctgctgtgtgatgactgccctggggacatcaatgccctgcctgagctgaagcactatgacctgaagcagcccacccagcccccacccctgcctgctgctgaggccgagaagccagagagctctgtgtcctctgccactggagatggcaacctgagccccagccagccccccctgaagaacctgctgagcctgctgaaggcctactatgccctgaatgcccagcccagcgctgaggagctgagcaagattgctgacagcgtgaacctgcccctggatgtggtgaagaagtggtttgagaagatgcaggccggccagatctctgtgcagagcagcgagcccagcagccctgagcccgggaaggtgaacatcccagccaagaacaatgaccagccccagagcgccaatgccaatgagccccaggacagcacagtgaacctgcagagccccctgaagatgaccaacagccctgtgctgcctgtgggcagcaccaccaacggcagccgcagcagcacccccagccccagccccctgaacctgagcagcagcaggaacacccagggctacctgtacacagctgagggcgcccaggaggagccccaggtggagcccctggacctgagcctgcccaagcagcagggcgagctgctggagaggagcagcctgcctgagcagtgcctcttctgccccggccgcaccctggagctggtgctgaagaaggagccccagaaggacagctgtgtgacagattctgagcctgtggtgaatgtcatccccccatctgccaaccccatcaacatcgccatccccaccgtgacagcccagctgcccaccatcgtggccatcgctgaccagaacagcgtgccctgcctgcgggccctggccgccaacaagcagaccatcctgatcccccaggtggcctacacctacagcaccaccgtgtccccagctgtgcaggagccccccctgaaggtgatccagcccaatggaaaccaggatgagcggcaggacaccagcagcgagggcgtgtccaatgtggaggaccagaatgacagcgacagcaccccacccaagaagaagatgaggaagacagaaaatggcatgtatgcctgtgacctgtgtgacaagatcttccagaagagcagcagcctgctgcggcacaagtatgagcacacaggcaagaggcctcatgaatgtggcatctgcaagaaggccttcaagcacaagcaccacctgattgagcacatgaggctgcacagcggggagaagccctaccagtgtgacaagtgtgggaagcgcttcagccacagcggcagctacagccagcacatgaaccaccgctacagctactgcaagcgggaggccgaggagcgggacagcacagagcaggaggaggccggccctgagatcctgagcaatgaacatgtgggcgcccgggccagccccagccagggcgacagtgatgagcgggagagcctgacccgggaggaggatgaagattctgagaaggaggaggaggaggaggacaaggagatggaggagctgcaggaggagaaggaatgtgagaagccccagggagatgaggaggaggaggaggaggaggaggaggtggaggaggaggaggtggaggaggccgagaatgaaggagaggaggccaagacagagggcctgatgaaggatgacagagctgagagccaggccagcagcctgggccagaaggtgggggagagcagcgagcaggtgtctgaggagaagaccaatgaggcctag

SEQ ID NO: 219787 - DNA, 3375 bp, Artificial Sequence
  derived and/or modified sequence
atggccgacggcccccggtgcaagcggcggaagcaggccaaccccaggaggaacaacgtaactaactataataccgtggttgagaccaacagcgactcagacgatgaagataagctgcacatagtggaagaggagtctgtgactgatgccgccgactgcgagggagtgcccgaggacgatctacctacagatcagactgtgttacccgggcggagcagcgagcgcgagggtaacgccaagaactgctgggaagatgaccgtaaggagggccaagagatcctgggtcccgaagctcaggctgatgaagctggctgtacggtcaaggacgatgagtgcgagtccgatgcggagaacgagcagaaccacgacccgaacgtcgaggaattcctgcaacagcaggacactgctgtgatcttccctgaggcccctgaggaagatcagaggcagggtacacccgaggcatctggtcatgacgaaaatgggacccccgatgctttctcccagctccttacatgcccatactgtgacagggggtacaaaaggttcacatcactgaaagagcacatcaagtatcgtcacgagaaaaatgaggacaacttctcctgcagcctgtgcagctacacctttgcttaccgcacacaactggagcgccatatgaccagtcacaaatcagggcgggaccaacggcacgtaactcagtcggggtgcaacaggaagttcaaatgcactgaatgcgggaaagcttttaaatataagcaccacctaaaggaacacctgaggatccacagtggcgagaaaccttacgaatgccctaattgtaaaaagcgattcagtcacagcggatcctactcctcacacatcagctccaaaaaatgtatctcactcatcccggtaaatgggcggccaaggactggcttaaagacaagtcagtgttcctctccttcgctgtccgcttcacctggctcgccaacccgaccgcagattcgtcagaagattgaaaacaaacccctccaggagcaactcagcgttaatcagatcaaaacagaacctgttgactacgaattcaagcccatagtcgtggcctcaggcatcaactgtagtacaccactgcaaaatggagtgtttactggcggcgggccactgcaggctacatcatctcctcagggaatggttcaggccgtggtgttgccaaccgtgggattggtgtctcccatttctattaatttaagtgacattcagaacgtcctgaaagtagccgtggatggcaacgtcataagacaagtgctggaaaacaaccaagccaacctggcttcaaaggaacaagaaacaatcaatgctagtcccatacagcaagggggccactccgtgattagtgctatttcactgcctctggttgatcaggatggcacgacaaaaattattatcaactatagcctcgagcagccctctcagctgcaagtggtgccacaaaacctcaagaaagaaaatccagtggcaaccaatagctgcaaaagtgaaaagctgccggaagacctgaccgtaaaaagcgaaaaagacaagagtttcgagggtggagtcaacgactccacctgcttactgtgtgatgactgcccaggagatatcaatgcactgcccgaactgaaacactacgatctcaagcaaccaacacagccccccccgctccctgcagctgaggcagagaagcctgagtcctctgtctctagtgccactggagacggcaacttgtcgccttcccagcccccactaaaaaaccttttatcactgctgaaggcctactacgcactcaacgcccagccttctgccgaggagttatccaagatcgcagacagcgtcaacctgcccctggatgtagtgaaaaagtggttcgagaagatgcaggccggccaaattagcgtccaatcttccgaaccttccagtccagaacctggaaaggtaaacataccagctaagaacaacgatcaaccccagtctgctaatgcgaatgagccgcaggactctaccgtcaacctgcagtcgcctttaaaaatgacgaattcccccgtcctcccggtagggagtaccactaacgggagcaggtccagcacacccagtccctcacccctcaacttatcatcaagccgcaatacgcagggatacctttataccgctgagggggctcaggaggagccacaggttgaacctctagacctgagcctccccaaacagcagggcgagctgttagaacggagtacaatcactagtgtgtaccaaaatagtgtatacagtgtgcaggaggaaccactcaatttgagctgcgccaagaaggaacctcagaaggacagctgcgttactgatagtgaacccgtcgtaaacgtcatcccaccatcggcaaaccccataaatatagcgatcccaaccgttaccgcacagctgcctactatcgtggcaatcgctgatcaaaattccgtcccttgcctccgcgccctagccgcgaacaagcagacaatactgatccctcaggtggcatacacctatagcaccacagtgagcccagctgtgcaggagcctccactaaaggtgattcagcctaacggcaaccaggatgaaagacaggatacaagctctgagggagttagcaatgtggaggaccagaatgattctgacagtactcctcctaaaaagaagatgcggaaaaccgaaaatggaatgtacgcttgcgacttgtgtgataagatctttcagaaaagcagttcactacttaggcataaatacgagcatactggcaagcggccccatgaatgtggaatttgcaagaaggcattcaaacacaagcatcatctgattgagcacatgcgactgcactctggcgagaagccgtatcagtgcgataagtgcggtaagagatttagccattccgggtcatactcgcagcatatgaaccacagatatagttattgcaaacgggaagccgaagaaagagatagtacggagcaggaagaagccggcccggagattctgagcaacgaacatgtcggggcgcgcgctagccccagtcagggcgatagcgatgaaagggagtcactgacgagggaggaagatgaagatagcgaaaaggaggaagaagaggaggataaagaaatggaagaactacaggaagagaaagagtgtgagaagcctcagggagacgaagaggaggaggaagaggaggaggaggttgaagaggaggaagttgaagaggccgagaacgagggagaagaggctaagacagaagggctgatgaaggacgatcgtgcagagagtcaagcgagctcccttgggcagaaggttggtgaatcttcagagcaggtgagtgaggaaaagacaaacgaagcatag

SEQ ID NO: 219788 - DNA, 3180 bp, Artificial Sequence
  derived and/or modified sequence
atggccgacggcccccggtgcaagcggcggaagcaggccaacccccgcaggaacaacgtaacgaattacaatactgttgtggagactaactcagactctgatgacgaggacaagttacatatcgtagaggaagagtccgtgacagatgcagccgattgtgagggtgtgcccgaagatgacctcccgaccgaccagactgtgctgcctggcaggagtagcgaaagggaaggcaacgctaagaactgctgggaagatgatcgcaaagaaggtcaggaaatcctcggacccgaggcacaggccgatgaggctggttgcacagtcaaagacgacgaatgcgagtcagacgcagaaaacgagcagaaccacgatcccaacgttgaggagtttcttcagcaacaggacacagccgtcatttttcctgaggctccagaagaagatcagcgacaggggacccctgaggcctcaggacacgacgaaaatggcactcccgatgccttctctcagcttttgacctgtccttattgtgatagggggtataagaggttcactagcctcaaggagcacattaaataccgacacgaaaaaaatgaggataacttttcgtgtagcctatgctcgtatacctttgcataccgcacacaactcgaaagacacatgacctcacataagagcggtcgagatcagaggcacgtcacccagagtggttgcaatagaaagtttaagtgcaccgaatgcggcaaagcgttcaagtacaagcaccacttaaaggagcacctcaggattcactcgggcgagaagccatacgaatgcccgaactgcaagaaacgtttttctcattcagggtcctattccagccacatttccagtaaaaagtgcatcagtctgattcccgtcaatggtcgaccgaggactggactcaaaacaagccagtgttcatcgcccagtttgagtgcctctcctgggagccctaccagaccacagatcagacagaagatagagaacaagccgctacaggaacaacttagtgtaaaccaaattaagacagagccagtagactacgaattcaagcccattgttgtagccagcggcattaattgcagtacgccgttgcaaaacggggttttcacagggggaggtccgctccaggcgacctccagccctcaaggcatggttcaagctgtggtcctgcctactgtggggctagtttcacccatctccataaacctttcagatatccaaaatgtcttgaaagttgccgtggacggaaacgtgatccgccaggtgctggagaataaccaggccaatctcgcctccaaggagcaggagaccatcaatgccagccccattcagcagggtggacactcagtcatttcagccattagcttgcccctggtcgaccaggacggtactacaaaaatcatcatcaattattctttggagcagccctcccagctgcaggtggttccccagaacctgaaaaaagaaaatccagtagccaccaactcctgtaagtctgaaaagcttcctgaagatttgacagtgaaatccgagaaagacaagtcgtttgagggcggggttaatgatagtacatgcttactctgtgacgattgcccgggagacataaatgctctgcccgaattaaaacactacgacctgaagcaacctacccagcctccccctctgcctgctgccgaagcagaaaagccagagagcagcgtgtctagcgccactggcgacggcaatttatccccatctcagccccctctcaagaatctcctttccctgctgaaggcttattatgccctgaatgcccagccaagcgccgaggaattgtccaagattgccgactccgtgaatctcccgctcgacgtggttaaaaaatggtttgagaagatgcaagccggccagatatcagttcagagttcggagccatcttctccagaaccggggaaggtgaatatcccggccaaaaataacgatcaaccacagtctgccaacgcaaacgagcctcaggattctaccgttaacctgcaatcccctctgaaaatgactaattccccagttctgcctgtgggatccactaccaatggaagccgatcttccacgccatcgccatcgccccttaatctttcatcctccaggaatacccagggatacctctatactgctgagggagcccaagaagaaccgcaagtggaaccactggatctgagcttacctaagcaacagggtgagctgctagaacggtcaactatcacttcagtctaccagaacagcgtgtacagcgtgcaagaggaacctttaaacctgtcctgcgccaaaaaggagccccagaaggacagctgtgtgacagattcagagccagtggttaacgtcatacccccatctgcaaatcccattaatattgcaatccctaccgtgaccgcacagctccccacgatagtcgcaatagccgatcaaaactccgtcccctgccttagggctctggccgccaacaagcagacaattctcatccctcaagtggcctacacttacagtactacagtttcccccgccgtccaggaacctccactaaaagtgatacaacccaacggaaaccaggatgagagacaggacacatcgtctgagggagtgtccaacgtggaggatcagaacgacagcgatagcaccccccctaagaaaaagatgagaaagacagaaaacggcatgtacgcttgcgatctgtgtgataaaatttttcaaaagtctagctccctgttgagacataagtacgaacacaccgggaaacgcccacatgaatgcggaatctgtaaaaaggcttttaagcacaagcaccacctgatcgagcatatgcgactgcacagcggggagaaaccttatcagtgtgataagtgcggaaaacgttttagccattctggttcctactcacagcatatgaatcaccgatacagttactgtaagagggaagctgaggagcgggactccacagagcaggaggaagctggaccagaaatcctgagcaatgaacacgtcggagcacgggcgtcccctagtcaaggcgactccgatgagcgcgagtcactgacacgagaggaggatgaggattccgagaaagaggaggaagaggaggacaaggagatggaagaattacaggaggagaagcacaaaaagaaaaagtag

SEQ ID NO: 219789 - DNA, 3360 bp, Artificial Sequence
  derived and/or modified sequence
atggccgacggcccccggtgcaagcggcggaagcaggccaacccccgacgcaacaatgtcacaaactacaatactgttgtggaaactaatagcgattcagacgacgaagacaaactgcatatcgttgaggaggagtctgtgacagatgctgcagactgtgagggggtccccgaagacgacttaccaaccgaccagacagtcctgcctggaaggagctccgagagggaaggtaacgcaaaaaactgctgggaagacgatagaaaagagggccaagaaatactggggcccgaagcccaggctgatgaagccgggtgtactgttaaagacgacgagtgtgagtccgacgctgagaacgagcagaatcacgatcctaatgtggaagagttcttgcagcagcaggacactgcagtgatctttccggaagccccagaggaggatcagcggcaggggacccccgaggctagcggtcacgacgagaatgggacccccgacgccttttcccagctcttaacctgcccatactgtgaccgagggtacaagcggtttactagcctcaaggaacacatcaagtataggcacgagaagaacgaggataatttttcctgctcattatgctcttacacctttgcatataggacccagcttgagaggcatatgactagccataaaagtgggcgggaccagaggcatgtgacacaatcaggatgcaatcgcaaattcaaatgtaccgaatgcgggaaggcctttaagtacaagcaccacctgaaggagcacctgagaatccacagcggcgaaaagccatacgagtgcccgaactgcaaaaagcggttttctcattctggctcctactcctctcatatatcatccaagaagtgtatcagtctcatacccgtgaatgggagaccgcggacaggcttaaagacaagccaatgcagctctccctctctgagcgcatcacccggaagcccgaccagacctcagattagacagaaaatagaaaataagcctttacaagaacagctgagtgtgaatcagattaagaccgaaccagtggactacgagttcaaaccgatcgtcgtggccagcgggataaactgctcgactccactgcaaaacggagtgtttacaggcggtggcccgctgcaagctacgtcctctccccaggggatggtgcaagccgtcgtcctccctactgtggggctcgttagcccgatatccattaacctgagcgacattcagaatgtgctgaaggtggctgtggacggcaacgtaatcagacaagtactggagaacaatcaggccaacctggccagtaaggaacaggaaactattaacgcatccccgatacagcagggagggcacagcgtcataagtgcaatctccttaccccttgtcgatcaggatggaacgaccaagatcattataaactatagcctggagcagccttcacagcttcaggttgtaccccaaaatctcaaaaaagaaaacccggtggctaccaacagttgtaaaagcgaaaagcttccagaggacctgacagttaaaagcgaaaaggataagtccttcgagggcggagtcaatgacagcacatgtctcctgtgtgacgattgtcctggagacatcaatgccctacctgaactgaaacactatgacttaaaacagccaacccagcctccacccttaccggcggcggaggccgagaaacccgaaagcagtgtgagtagtgccacgggcgacggcaatttgagcccctcccagcctccattgaagaatctgctgagccttctgaaagcatattatgctttgaatgctcagccgagtgctgaggagctgtcaaagatcgccgacagcgttaatctgccattagacgtcgtaaagaagtggtttgaaaagatgcaggccggacaaatcagcgtgcagtcatcggagccgtcatcaccggagcccggtaaggtgaatataccggccaagaacaacgaccagccccagtctgcaaacgcaaatgagccgcaggacagcacggtcaatctgcagtcgccgctgaaaatgaccaatagcccagttctgccggtggggtcaacaacgaatggcagccggtcctctactcccagcccatcccccctgaatctcagttcttctcggaacacacaaggttatctctacacagccgaaggtgcccaggaggaaccgcaggtcgagccgctggatctctcactacctaaacaacagggggagctgctggaaagatcctcgctcccggagcagtgtctcttctgcccagggcggaccctcgagttagtgctcaagaaagagcctcagaaggatagttgcgtcacagactcagagccagtggtgaacgtgataccacctagtgcgaatcccatcaacattgccataccgacagtgacagctcagctccctacgattgtagcgattgccgaccagaattctgtgccgtgcttgagggctttagctgcgaacaaacagacaatcctcattcctcaagtggcgtacacatacagcactactgtgagccctgctgtgcaagagccccccctcaaagtgatccagcccaacggaaaccaagacgagcgccaagataccagctctgagggcgtaagtaatgtagaagatcagaatgattcagactccacccctcctaaaaaaaagatgcgcaaaaccgaaaacggaatgtatgcctgcgacctttgcgataaaatcttccagaaatcatctagcctgctgagacacaagtatgagcacaccggaaaacgtcctcatgagtgcggaatatgcaagaaagcttttaaacacaaacatcacctaattgagcatatgcgtctgcattccggtgaaaagccatatcagtgtgataaatgtgggaagcggttcagccattccggctcgtattcacagcacatgaaccaccgctattcctattgtaagcgcgaggcagaggagcgggatagtacagaacaggaagaggccggcccagagatcctcagtaacgaacacgttggcgctcgcgcgagcccttctcaaggtgatagcgatgagcgcgagtcattaaccagggaggaggatgaggattccgagaaggaagaagaagaagaagataaggaaatggaggaactccaggaggagaaggaatgtgagaaacctcaaggcgatgaggaggaagaagaagaggaggaagaggtagaggaggaagaagtagaggaggcagagaacgaaggcgaggaggctaagactgagggactgatgaaggatgatcgggcagaatctcaggccagttctctgggtcagaaggtgggggaaagttcagagcaggtctccgaggagaaaactaatgaagcatag

SEQ ID NO: 219790 - DNA, 3375 bp, Artificial Sequence
  derived and/or modified sequence
atggctgacggaccacgttgcaagaggagaaaacaggccaatcccaggagaaacaatgtgaccaactacaacaccgtggtggagactaattcagactctgatgatgaagataagctacatattgtagaagaagagagtgtcacagacgccgcagactgtgaaggagtgcccgaggatgatctccccacagatcaaacagttctgcccggtcgctcatccgaacgcgagggcaacgcaaaaaattgttgggaggacgacagaaaggagggtcaggaaattctcggccctgaggcacaagccgacgaggcaggctgtaccgtgaaggacgacgaatgcgaaagtgatgctgaaaacgagcaaaaccatgacccaaatgtggaagagttcctacagcagcaggacaccgccgtcatttttcccgaggcccctgaagaggaccagagacagggtacgcctgaagccagcggacacgatgagaacgggacgcctgatgcattctcccaacttttaacatgtccctattgtgatcgtggatataagcggttcacgtctcttaaagaacatatcaagtaccgacacgaaaagaatgaagataactttagttgcagcctctgctcgtacacattcgcgtatagaacccagttggagcgccacatgactagccataagagcggaagagaccagagacatgtgacccaaagtggatgtaatcggaagttcaagtgcacagaatgcggtaaggcttttaagtacaagcaccacttgaaggagcacctgcggattcacagcggcgagaaaccttacgagtgccctaactgtaaaaaaaggttctctcattccgggtcctattccagtcacattagtagcaagaagtgcatcagtctgataccggtcaacgggagaccgcgtaccggcctcaaaaccagccaatgcagctcaccttccctgagtgccagcccaggcagccctaccaggccacaaatccgacaaaagatcgagaataagcctctgcaagaacagctttcagtcaaccaaataaagaccgagccagtggattacgaattcaaacccatcgtggtggcctctggaattaattgtagcactccattgcagaacggcgtctttacagggggaggaccccttcaggccacgagttccccccaaggcatggtacaggcagtcgtgctcccgactgttggcctcgtttctcctattagtataaacctgtctgatattcagaacgtgctcaaggtcgccgttgacggaaatgtaataagacaggtcttggaaaataaccaggccaatttagcatccaaagaacaagaaaccatcaatgccagccccattcagcaggggggacattctgtaatttctgccatcagtttgcctcttgtcgaccaggacggtacaactaagatcattatcaactacagtctggagcagcccagtcaactccaagtggtcccccagaatttgaagaaggagaaccctgttgctactaactcatgcaagagcgaaaaactaccggaggaccttacagtgaagagcgagaaggataaatcgttcgagggaggggtcaatgactccacatgccttctatgtgatgactgccccggagatatcaacgcacttccagaactgaagcattacgatctgaagcagcctacgcaacccccaccactaccagcggctgaagccgagaaaccagaatcctcagtctcctccgctacaggcgacggaaacctgtcccctagccaacctccgctgaagaatctcctcagcctgttaaaggcatactatgcactgaatgcacaaccctcggcagaggagctgtcaaaaatcgccgatagtgtgaacttaccgctggacgtagtcaagaagtggtttgaaaaaatgcaggctggacagatcagcgtccagagcagtgagccttcatctccagagcccggaaaagtgaatattcccgcaaaaaacaatgaccagccccagtctgccaatgctaacgagcctcaggactccacggtgaatctgcagagtccccttaagatgacaaactctccagtactccccgttggaagcactactaatggctctcggagtagtactccctcacccagtccccttaatctgtcctcttctagaaacactcaaggttatctctataccgccgaaggggctcaggaagaacctcaggtggagccattggatctcagcctgccaaagcagcagggagagctcctcgaacgttctaccattacttctgtgtaccagaactccgtatacagcgtgcaggaagaaccacttaacctgtcctgcgccaaaaaggaaccccagaaggactcttgtgtcacagatagcgagcctgtggtgaacgtcattccgccttctgccaaccctatcaacatcgcaattcctacggtgacagctcaactgcctaccatagtggctatagcggaccaaaattctgtgccctgcctccgcgcattagcagctaataagcagaccattctcataccccaagttgcctacacttattccactaccgtctctcccgcagtgcaggaacctcctctaaaggtgatacaaccaaacgggaatcaggatgagaggcaggacacaagttctgaaggggtcagcaacgtcgaggatcagaacgactccgacagcacacccccaaagaaaaagatgagaaaaactgaaaatgggatgtacgcatgtgacttgtgtgataagatcttccagaaaagttcatccctgctgaggcataagtacgaacacaccggtaagagaccccatgagtgcgggatttgcaagaaggcttttaagcacaaacatcatttgatagagcatatgcggctgcatagcggagagaagccctaccagtgcgataagtgtggaaagaggttttcacacagtggcagctatagtcaacacatgaatcataggtacagttattgcaaaagagaagccgaggagagagattccaccgagcaggaggaagcagggccagagatattgtcaaacgaacacgttggtgcgcgtgcctcgccttctcaaggagatagcgatgaaagagagtcactcacacgggaggaagatgaggatagtgaaaaggaggaagaggaagaagataaggagatggaggaactgcaagaagaaaaggagtgtgaaaagcctcagggagacgaagaggaagaagaggaagaagaggaggtggaggaggaggaagttgaggaggccgaaaacgaaggagaggaagcaaagactgaggggctgatgaaggacgaccgagccgaatcccaggcaagttctctcgggcaaaaagtgggggagtcctccgagcaagtgagcgaggaaaaaactaatgaagcttag

SEQ ID NO: 219791 - DNA, 3180 bp, Artificial Sequence
  derived and/or modified sequence
atggcagatggtccgaggtgcaaaagacgcaaacaagccaatccacgcaggaacaatgtgactaactataacactgttgtggaaactaattctgattctgatgatgaagataagctgcatatcgtggaagaggagtcggtgacagacgctgctgattgcgagggagtcccagaggacgacttacctaccgaccagacagtgcttccaggccgatcatccgagagggaaggtaatgctaagaactgttgggaggatgaccggaaagaggggcaggagatccttgggccagaggcccaggctgacgaagcagggtgcaccgttaaagatgatgaatgcgaatcagacgcagaaaacgagcagaaccatgaccccaacgttgaggaatttctgcagcagcaggataccgctgtgatattcccagaggcaccagaagaggatcagcgacaagggacgccggaggcatcgggccacgacgagaatggaactccggacgctttcagccagctgcttacatgtccctactgcgacagagggtataagaggtttactagcctgaaggagcacattaagtaccggcatgagaagaatgaggacaatttctcctgcagcttgtgctcatatacttttgcgtaccgcacgcagctagagcggcacatgacaagtcacaaaagcggcagagaccagcgccatgtgacacaatctggctgtaacaggaagtttaaatgtaccgaatgcgggaaagccttcaagtataagcaccacctaaaagaacacctgcgaattcacagcggcgaaaagccctatgagtgtcctaactgcaagaagcggttcagccatagcggatcatattcgtctcatattagcagcaagaaatgcatttctctcataccagtgaatggaagacctcggacagggctcaagacaagccagtgctctagcccaagtctttcagcatctcccggatcaccaacacggccacaaattcggcagaaaattgaaaacaagcctctacaggagcagctgagtgtgaaccaaattaaaactgaaccagtcgactatgagtttaagcctatcgtcgtggcatctgggatcaactgctcgactcccctgcagaatggggtgtttaccggaggcggacctctgcaggccacatcgagtccgcaagggatggtgcaggctgtggttcttcccaccgttggcctagtatcacctatctccatcaacctaagcgacatacagaatgtgctcaaggtcgccgtggacggaaatgtgattaggcaggttctcgagaacaaccaggctaacttggcaagcaaggaacaggaaacaatcaatgcttcaccaattcagcaagggggacacagtgtgatcagcgcaatatctcttccactggttgatcaggatggtaccacaaagatcattatcaactactccctggagcagccatctcagttacaggtagtgccacagaatctgaaaaaggagaatcctgtggccacaaatagctgtaagagtgagaagttaccagaagacctgacagtgaagagtgagaaggataaaagcttcgagggcggtgttaatgacagtacctgtttgttgtgcgacgattgccccggagatattaacgcactccctgagctaaaacattacgacttaaaacagcccacccagcctccacccttacccgcagcagaggccgaaaaaccagagtcaagcgtcagctctgcgacgggggacgggaacttgagtccctctcagcctcctctgaaaaacttactgtccctgcttaaggcatattatgctctgaacgcgcagccctccgctgaagagctgtccaaaatcgcggatagcgtgaaccttcctctggacgtagtcaagaaatggttcgaaaagatgcaggctggacagatcagtgttcagtcatctgagcctagctctccagagccaggcaaggtgaacataccagctaaaaacaatgaccagccgcaaagcgcaaatgcaaacgagccacaggatagcacggtgaacctacaatctcccctaaaaatgaccaacagcccggttctccccgtggggtcgaccactaatgggtccagatcgagcacaccaagtccctctcccctgaatctctctagtagtcggaacacacaagggtacctgtatactgcggagggcgctcaggaggaaccacaggtggagcctctggatctctccttgcctaagcaacagggtgagctgctggagaggtcgacaatcacctccgtgtaccaaaattccgtgtacagcgtgcaagaagaacccctgaatttgtcttgtgctaaaaaggaaccccagaaggacagctgtgttaccgattcagagcctgtggttaatgtgattcctccaagtgcaaacccaattaatatcgcaatccctaccgtaacggctcaattgccgactatcgttgccattgccgaccagaactcagttccgtgccttcgagccttggctgcaaacaaacagaccatcctcattccccaagtcgcatacacatattcgaccacggtatcccctgctgtacaagagccacccctaaaagtaatccagccgaacggcaaccaagatgagaggcaagacacaagctctgagggtgttagtaatgtggaagaccaaaacgacagcgactccacccctcccaagaaaaagatgcggaaaactgagaacggcatgtatgcgtgtgacttgtgcgacaaaatctttcaaaagtcttcatctttgcttaggcacaaatacgaacacacaggcaaacgccctcacgaatgcgggatttgcaaaaaagcctttaaacacaaacaccatcttatcgaacatatgagactgcactccggtgagaagccataccagtgtgacaaatgtggaaagagatttagtcatagtgggagttattcccagcatatgaaccatcgctacagctactgtaaaagagaagctgaagagcgcgatagcacagaacaggaggaagcaggccctgaaatcctcagcaacgagcacgtcggcgcaagagcaagtcctagccagggtgactctgatgagagagagagcctaaccagagaagaggatgaggatagcgagaaggaggaagaagaagaagataaggagatggaagaacttcaagaagagaagcacaaaaaaaaaaagtag

SEQ ID NO: 219792 - DNA, 3360 bp, Artificial Sequence
  derived and/or modified sequence
atggccgatggacccagatgtaaacggcgtaaacaagccaatccacgcagaaataacgttactaattacaatactgttgtggagactaatagcgattctgatgatgaggataagctgcatatagttgaggaggagtccgtcacggacgcagctgattgcgagggagtgcccgaagatgacctgcccacagaccagacagtgctgcctggccgttcttccgaacgtgagggtaacgccaaaaactgttgggaggatgatagaaaagagggtcaggaaatccttggaccagaggcacaggctgacgaggcaggctgcaccgtcaaggacgatgagtgtgaaagcgatgccgaaaacgagcaaaaccatgaccccaatgtggaagaattcctacagcaacaggacactgctgtgatattccccgaggcgccagaagaggaccaaaggcagggaacacctgaggcaagcggtcacgacgagaatggtaccccagacgcttttagccagctgctgacctgtccatattgcgatcgtggctacaaacgatttacttccttaaaggagcatatcaaatatcggcacgagaaaaatgaggacaattttagctgcagcctgtgcagctacaccttcgcgtatcggacccaattagaaagacatatgactagccacaaaagcgggcgagatcagcggcacgtaacacagtcggggtgcaaccggaaattcaagtgcactgagtgcgggaaggctttcaaatacaagcatcacttgaaggaacaccttcgaattcactctggtgaaaaaccatacgaatgtccgaattgcaaaaagaggttcagccactccggaagctacagttcccatattagcagcaaaaagtgtatcagtctgatccccgtcaatggaagaccacggacgggtctgaagacatcccaatgttctagcccaagcctgagcgcctccccaggctcccccaccagaccacaaattcgacaaaagattgaaaacaaaccccttcaggaacagctttccgtgaaccaaattaagactgaacccgtagattatgagtttaaaccaattgtggtagcaagcggcattaactgtagcacacctctacaaaatggtgttttcactggcggtggacccctccaggccacaagcagcccccagggaatggtgcaggcggtggtgttgcccaccgttgggctcgtcagccctatatcaatcaatttaagtgacattcaaaacgtgctgaaggtcgccgtggacggcaatgttattagacaggtgttagaaaacaaccaagctaacttggcttcaaaagagcaggagactatcaatgcctcccccattcaacagggagggcatagcgtgatctccgctattagcttaccactcgttgaccaggacggcactacaaagatcattatcaattactctttggagcaaccttcacagctgcaagttgtacctcagaacctcaagaaggagaacccggtggccacaaatagctgtaagtcggagaaactgcctgaggacctgactgttaagagtgaaaaggacaagtcttttgagggtggcgttaacgactcaacgtgtttattgtgcgatgattgtcccggagatattaatgccctaccagaattgaagcattatgacctgaaacagcctacacaaccacctcccctgcccgcagctgaagccgaaaagcccgagagctctgtaagttcggcaaccggggatggcaacctgtcacctagtcagccaccactgaaaaatctcctaagcttgttgaaagcttattatgcactcaacgctcagccctctgcagaagagctctccaaaatcgccgactccgtcaatctgcccctcgatgttgttaagaagtggttcgagaagatgcaggccggtcagatatcagtacaaagttcagaaccatcgagccccgaacccggaaaggttaatattccggcaaaaaataacgaccagccccaatctgctaatgcaaatgagcctcaagattcaactgtgaaccttcaaagcccattgaagatgacaaatagcccagtgctgccagtagggagcactactaacggcagccggtctagcactccaagcccttcccctttgaatctctccagtagtagaaacactcagggatatctatatactgctgagggcgctcaggaggagccgcaggttgaaccccttgacttgagtctgccaaagcagcagggtgagctactcgagcgttcttctctgcctgagcagtgtctgttctgtccaggccgtaccctggaactggttctgaaaaaggagcctcagaaggattcctgcgtgaccgactccgaaccggtagtgaacgtaatcccaccctccgccaaccctatcaatatcgcaatccccaccgtgactgcccaactgcctaccattgtggcaatagctgatcagaatagtgtcccttgcctgcgcgctttggctgcgaataagcagaccattcttatacctcaggtcgcatatacatatagcaccacggtgtctcctgctgtccaggaaccaccactaaaggtgatccagcccaacggcaatcaggacgagcgacaagacacctcatccgagggcgtttccaatgtggaggatcagaacgattcagattccactcccccaaagaagaagatgagaaagaccgaaaacgggatgtacgcttgcgatctgtgtgacaagatctttcagaaaagctcctccctccttagacacaagtatgagcataccggcaaacggccacatgaatgtggtatatgcaagaaagcctttaaacacaaacatcatctcattgaacacatgcggctgcactccggagaaaaaccgtatcagtgtgacaagtgtggaaagaggttcagtcattctggaagctactctcagcatatgaatcatagatactcgtactgtaagagggaagctgaggagcgcgattcaacagagcaggaggaggccggtccggagattctttccaacgaacatgtgggtgctagagcctcaccctcacagggagattcagacgaacgagagtccttgacacgcgaggaggatgaggattccgagaaagaagaagaagaagaagataaggaaatggaggaacttcaggaggaaaaggagtgcgagaaacctcagggtgatgaggaggaagaggaggaggaagaggaggtggaagaagaggaggtggaagaggcagagaatgagggcgaagaagccaagaccgagggtttaatgaaggacgacagagcggagagtcaggctagttccctgggacaaaaggtgggcgagagttctgaacaggtctctgaagaaaagactaatgaggcctag

SEQ ID NO: 219793 - DNA, 5140 bp, Artificial Sequence
  derived and/or modified sequence
gtaaaccaggtgcggtggggaggggggaggggtggaggcggaggggtgggggggaagggggagggagggggaggaggtgactcgagcatttagacacaagcgagaggatcatggcggatggccccaggtgtaagcgcagaaagcaggcgaacccgcggcgcaataacgttacaaattataatactgtggtagaaacaaattcagattcagatgatgaagacaaactgcatattgtggaagaagaaagtgttacagatgcagctgactgtgaaggtgtaccagaggatgacctgccaacagaccagacagtgttaccagggaggagcagtgaaagagaagggaatgctaagaactgctgggaggatgacagaaaggaagggcaagaaatcctggggcctgaagctcaggcagatgaagcaggatgtacagtaaaagatgatgaatgcgagtcagatgcagaaaatgagcaaaaccatgatcctaatgttgaagagtttctacaacaacaagacactgctgtcatttttcctgaggcacctgaagaggaccagaggcagggcacaccagaagccagtggtcatgatgaaaatggaacaccagatgcattttcacaattactcacctgtccatattgtgatagaggctataaacgctttacctctctgaaagaacacattaaatatcgtcatgaaaagaatgaagataactttagttgctccctgtgcagttacacctttgcatacagaacccaacttgaacgtcacatgacatcacataaatcaggaagagatcaaagacatgtgacgcagtctgggtgtaatcgtaaattcaaatgcactgagtgtggaaaagctttcaaatacaaacatcacctaaaagagcacttaagaattcacagtggagagaagccatatgaatgcccaaactgcaagaaacgcttttcccattctggctcctatagctcacacataagcagtaagaaatgtatcagcttgatacctgtgaatgggcgaccaagaacaggactcaagacatctcagtgttcttcaccgtctctttcagcatcaccaggcagtcccacacgaccacagatacggcaaaagatagagaataaaccccttcaagaacaactttctgttaaccaaattaaaactgaacctgtggattatgaattcaaacccatagtggttgcttcaggaatcaactgttcaacccctttacaaaatggggttttcactggtggtggcccattacaggcaaccagttctcctcagggcatggtgcaagctgttgttctgccaacagttggtttggtgtctcccataagtatcaatttaagtgatattcagaatgtacttaaagtggcggtagatggtaatgtaataaggcaagtgttggagaataatcaagccaatcttgcatccaaagaacaagaaacaatcaatgcttcacccatacaacaaggtggccattctgttatttcagccatcagtcttcctttggttgatcaagatggaacaaccaaaattatcatcaactacagtcttgagcagcctagccaacttcaagttgttcctcaaaatttaaaaaaagaaaatccagtcgctacaaacagttgtaaaagtgaaaagttaccagaagatcttactgttaagtctgagaaggacaaaagctttgaagggggggtgaatgatagcacttgtcttctgtgtgatgattgtccaggagatattaatgcacttccagaattaaagcactatgacctaaagcagcctactcagcctcctccactccctgcagcagaagctgagaagcctgagtcctctgtttcatcagctactggagatggcaatttgtctcctagtcagccacctttaaagaacctcttgtctctcctaaaagcatattatgctttgaatgcacaaccaagtgcagaagagctctcaaaaattgctgattcagtaaacctaccactggatgtagtaaaaaagtggtttgaaaagatgcaagctggacagatttcagtgcagtcttctgaaccatcttctcctgaaccaggcaaagtaaatatccctgccaagaacaatgatcagcctcaatctgcaaatgcaaatgaaccccaggacagcacagtaaatctacaaagtcctttgaagatgactaactccccagttttaccagtgggatcaaccaccaatggttccagaagtagtacaccatccccatcacctctaaacctttcctcatccagaaatacacagggttacttgtacacagctgagggtgcacaagaagagccacaagtagaacctcttgatctttcactaccaaagcaacagggagaattattagaaaggtcaactatcactagtgtttaccagaacagtgtttattctgtccaggaagaacccttgaacttgtcttgcgcaaaaaaggagccacaaaaggacagttgtgttacagactcagaaccagttgtaaatgtaatcccaccaagtgccaaccccataaatatcgctatacctacagtcactgcccagttacccacaatcgtggccattgctgaccagaacagtgttccatgcttaagagcgctagctgccaataagcaaacgattctgattccccaggtggcatacacctactcaactacggtcagccctgcagtccaagaaccacccttgaaagtgatccagccaaatggaaatcaggatgaaagacaagatactagctcagaaggagtatcaaatgtagaggatcagaatgactctgattctacaccgcccaaaaagaaaatgcggaagacagaaaatggaatgtatgcttgtgatttgtgtgacaagatattccaaaagagtagttcattattgagacataaatatgaacacacaggtaaaagacctcatgagtgtggaatctgtaaaaaggcatttaaacacaaacatcatttgattgaacacatgcgattacattctggagaaaagccctatcaatgtgacaaatgtggaaagcgcttctcacactctgggtcttattctcaacacatgaatcatcgctactcctactgtaagagagaagcggaagaacgtgacagcacagagcaggaagaggcagggcctgaaatcctctcgaatgagcacgtgggtgccagggcgtctccctcacagggcgactcggacgagagagagagtttgacaagggaagaggatgaagacagtgaaaaagaggaagaggaggaggataaagagatggaagaattgcaggaagaaaaagaatgtgaaaaaccacaaggggatgaggaagaggaggaggaggaggaagaagtggaagaagaagaggtagaagaggcagagaatgagggagaagaagcaaaaactgaaggtctgatgaaggatgacagggctgaaagtcaagcaagcagcttaggacaaaaagtaggcgagagtagtgagcaagtgtctgaagaaaagacaaatgaagcctaatcgtttttctagaaggaaaataaattctaattgataatgaatttcgttcaatattatccttgcttttcatggaaacacagtaacctgtatgctgtgattcctgttcactactgtgtaaagtaaaaactaaaaaaatacaaaatacaaaacacacacacacacacacacacacacacacacacacacacaaaataaatccgggtgtgcctgaacctcagacctagtaatttttcatgcagttttcaaagttaggaacaagtttgtaacatgcagcagattagaaaaccttaatgactcagagagcaacaatacaagaggttaaaggaagctgattaattagatatgcatctggcattgttttatcttatcagtattatcactcttatgttggtttattcttaagctgtacaattgggagaaattttataattttttattggtaaacatatgctaaatccgcttcagtattttattatgttttttaaaatgtgagaacttctgcactacaaaattcccttcacagagaagtataatgtagttccaacccgtgctaactaccttttataaattcagtctagaaggtagtaatttctaatatttagatgtcttagtagagcgtattatcatttaaagtgtattgttagccttaagaaagcagctgatagaagaactgaagtttcttactcacgtggtttaaaatggagttcaaaagattgccattgagttctgattgcagggactaacaatgttaatctgataaggacagcaaaatcatcagaatcagtgtttgtgattgtgtttgaatatgtggtaacatatgaaggatatgacatgaagctttgtatctcctttggccttaagcaagacctgtgtgctgtaagtgccatttctcagtattttcaaggctctaacccgccttcatccaatgtgtggcctacaataactagcatttgttgatttgtctcttgtatcaaaattcccaaataaaacttaaaaccactgactctgtcagagaaactgaaacactgggacatttcatccttcaattcctcggtattgattttatgttgattgattttcagaatttctctacagaaacgaaagggaaattttctaatctgctttatccatgtacttgcatttcagacatggacatgctattgttatttggctcataactgtttccaaatgttagttattatggacccaatttattaacaacattagctgatttttacctatcagtattattttatttcttttagtttatagatctgtgcaacatttttgtactgtatgtcttcaaacctggcagtattaatacccttcttactgacatatgtacttttagttttagaaaacttttatatttatgtgtcttatttttatatttctttatttattacacagtgtagtgtataatactgtagtttgtattaatacaataatatattttagtatgaaaatttggaaagttgataagatttaaagtagagatgcaattggttctcctgcattgagatttgatttaacagtgttatgttaacatttatacttgccttggactgtagaacagaacttaaatgggaatgtattagttttacaactacaatcaagtcattttacctttacccagtttttaatataaaacttaa

SEQ ID NO: 219794 - DNA, 3240 bp, Artificial Sequence
  derived and/or modified sequence
gggggggaagggggagggagggggaggaggtgactcgagcatttagacacaagcgagaggatcatggcggatggccccaggtgtaagcgcagaaagcaggcgaacccgcggcgcaataacgttacaaattataatactgtggtagaaacaaattcagattcagatgatgaagacaaactgcatattgtggaagaagaaagtgttacagatgcagctgactgtgaaggtgtaccagaggatgacctgccaacagaccagacagtgttaccagggaggagcagtgaaagagaagggaatgctaagaactgctgggaggatgacagaaaggaagggcaagaaatcctggggcctgaagctcaggcagatgaagcaggatgtacagtaaaagatgatgaatgcgagtcagatgcagaaaatgagcaaaaccatgatcctaatgttgaagagtttctacaacaacaagacactgctgtcatttttcctgaggcacctgaagaggaccagaggcagggcacaccagaagccagtggtcatgatgaaaatggaacaccagatgcattttcacaattactcacctgtccatattgtgatagaggctataaacgctttacctctctgaaagaacacattaaatatcgtcatgaaaagaatgaagataactttagttgctccctgtgcagttacacctttgcatacagaacccaacttgaacgtcacatgacatcacataaatcaggaagagatcaaagacatgtgacgcagtctgggtgtaatcgtaaattcaaatgcactgagtgtggaaaagctttcaaatacaaacatcacctaaaagagcacttaagaattcacagtggagagaagccatatgaatgcccaaactgcaagaaacgcttttcccattctggctcctatagctcacacataagcagtaagaaatgtatcagcttgatacctgtgaatgggcgaccaagaacaggactcaagacatctcagtgttcttcaccgtctctttcagcatcaccaggcagtcccacacgaccacagatacggcaaaagatagagaataaaccccttcaagaacaactttctgttaaccaaattaaaactgaacctgtggattatgaattcaaacccatagtggttgcttcaggaatcaactgttcaacccctttacaaaatggggttttcactggtggtggcccattacaggcaaccagttctcctcagggcatggtgcaagctgttgttctgccaacagttggtttggtgtctcccataagtatcaatttaagtgatattcagaatgtacttaaagtggcggtagatggtaatgtaataaggcaagtgttggagaataatcaagccaatcttgcatccaaagaacaagaaacaatcaatgcttcacccatacaacaaggtggccattctgttatttcagccatcagtcttcctttggttgatcaagatggaacaaccaaaattatcatcaactacagtcttgagcagcctagccaacttcaagttgttcctcaaaatttaaaaaaagaaaatccagtcgctacaaacagttgtaaaagtgaaaagttaccagaagatcttactgttaagtctgagaaggacaaaagctttgaagggggggtgaatgatagcacttgtcttctgtgtgatgattgtccaggagatattaatgcacttccagaattaaagcactatgacctaaagcagcctactcagcctcctccactccctgcagcagaagctgagaagcctgagtcctctgtttcatcagctactggagatggcaatttgtctcctagtcagccacctttaaagaacctcttgtctctcctaaaagcatattatgctttgaatgcacaaccaagtgcagaagagctctcaaaaattgctgattcagtaaacctaccactggatgtagtaaaaaagtggtttgaaaagatgcaagctggacagatttcagtgcagtcttctgaaccatcttctcctgaaccaggcaaagtaaatatccctgccaagaacaatgatcagcctcaatctgcaaatgcaaatgaaccccaggacagcacagtaaatctacaaagtcctttgaagatgactaactccccagttttaccagtgggatcaaccaccaatggttccagaagtagtacaccatccccatcacctctaaacctttcctcatccagaaatacacagggttacttgtacacagctgagggtgcacaagaagagccacaagtagaacctcttgatctttcactaccaaagcaacagggagaattattagaaaggtcaactatcactagtgtttaccagaacagtgtttattctgtccaggaagaacccttgaacttgtcttgcgcaaaaaaggagccacaaaaggacagttgtgttacagactcagaaccagttgtaaatgtaatcccaccaagtgccaaccccataaatatcgctatacctacagtcactgcccagttacccacaatcgtggccattgctgaccagaacagtgttccatgcttaagagcgctagctgccaataagcaaacgattctgattccccaggtggcatacacctactcaactacggtcagccctgcagtccaagaaccacccttgaaagtgatccagccaaatggaaatcaggatgaaagacaagatactagctcagaaggagtatcaaatgtagaggatcagaatgactctgattctacaccgcccaaaaagaaaatgcggaagacagaaaatggaatgtatgcttgtgatttgtgtgacaagatattccaaaagagtagttcattattgagacataaatatgaacacacaggtaaaagacctcatgagtgtggaatctgtaaaaaggcatttaaacacaaacatcatttgattgaacacatgcgattacattctggagaaaagccctatcaatgtgacaaatgtggaaagcgcttctcacactctgggtcttattctcaacacatgaatcatcgctactcctactgtaagagagaagcggaagaacgtgacagcacagagcaggaagaggcagggcctgaaatcctctcgaatgagcacgtgggtgccagggcgtctccctcacagggcgactcggacgagagagagagtttgacaagggaagaggatgaagacagtgaaaaagaggaagaggaggaggataaagagatggaagaattgcaggaagaaaaacataaaaagaaaaaa

SEQ ID NO: 219795 - DNA, 5972 bp, Artificial Sequence
  derived and/or modified sequence
gggggggaagggggagggagggggaggaggtgactcgagcatttagacacaagcgagaggatcatggcggatggccccaggtgtaagcgcagaaagcaggcgaacccgcggcgcaataacgttacaaattataatactgtggtagaaacaaattcagattcagatgatgaagacaaactgcatattgtggaagaagaaagtgttacagatgcagctgactgtgaaggtgtaccagaggatgacctgccaacagaccagacagtgttaccagggaggagcagtgaaagagaagggaatgctaagaactgctgggaggatgacagaaaggaagggcaagaaatcctggggcctgaagctcaggcagatgaagcaggatgtacagtaaaagatgatgaatgcgagtcagatgcagaaaatgagcaaaaccatgatcctaatgttgaagagtttctacaacaacaagacactgctgtcatttttcctgaggcacctgaagaggaccagaggcagggcacaccagaagccagtggtcatgatgaaaatggaacaccagatgcattttcacaattactcacctgtccatattgtgatagaggctataaacgctttacctctctgaaagaacacattaaatatcgtcatgaaaagaatgaagataactttagttgctccctgtgcagttacacctttgcatacagaacccaacttgaacgtcacatgacatcacataaatcaggaagagatcaaagacatgtgacgcagtctgggtgtaatcgtaaattcaaatgcactgagtgtggaaaagctttcaaatacaaacatcacctaaaagagcacttaagaattcacagtggagagaagccatatgaatgcccaaactgcaagaaacgcttttcccattctggctcctatagctcacacataagcagtaagaaatgtatcagcttgatacctgtgaatgggcgaccaagaacaggactcaagacatctcagtgttcttcaccgtctctttcagcatcaccaggcagtcccacacgaccacagatacggcaaaagatagagaataaaccccttcaagaacaactttctgttaaccaaattaaaactgaacctgtggattatgaattcaaacccatagtggttgcttcaggaatcaactgttcaacccctttacaaaatggggttttcactggtggtggcccattacaggcaaccagttctcctcagggcatggtgcaagctgttgttctgccaacagttggtttggtgtctcccataagtatcaatttaagtgatattcagaatgtacttaaagtggcggtagatggtaatgtaataaggcaagtgttggagaataatcaagccaatcttgcatccaaagaacaagaaacaatcaatgcttcacccatacaacaaggtggccattctgttatttcagccatcagtcttcctttggttgatcaagatggaacaaccaaaattatcatcaactacagtcttgagcagcctagccaacttcaagttgttcctcaaaatttaaaaaaagaaaatccagtcgctacaaacagttgtaaaagtgaaaagttaccagaagatcttactgttaagtctgagaaggacaaaagctttgaagggggggtgaatgatagcacttgtcttctgtgtgatgattgtccaggagatattaatgcacttccagaattaaagcactatgacctaaagcagcctactcagcctcctccactccctgcagcagaagctgagaagcctgagtcctctgtttcatcagctactggagatggcaatttgtctcctagtcagccacctttaaagaacctcttgtctctcctaaaagcatattatgctttgaatgcacaaccaagtgcagaagagctctcaaaaattgctgattcagtaaacctaccactggatgtagtaaaaaagtggtttgaaaagatgcaagctggacagatttcagtgcagtcttctgaaccatcttctcctgaaccaggcaaagtaaatatccctgccaagaacaatgatcagcctcaatctgcaaatgcaaatgaaccccaggacagcacagtaaatctacaaagtcctttgaagatgactaactccccagttttaccagtgggatcaaccaccaatggttccagaagtagtacaccatccccatcacctctaaacctttcctcatccagaaatacacagggttacttgtacacagctgagggtgcacaagaagagccacaagtagaacctcttgatctttcactaccaaagcaacagggagaattattagaaaggtcaagtttaccagaacagtgtttattctgtccaggaagaacccttgaacttgtcttgaaaaaggagccacaaaaggacagttgtgttacagactcagaaccagttgtaaatgtaatcccaccaagtgccaaccccataaatatcgctatacctacagtcactgcccagttacccacaatcgtggccattgctgaccagaacagtgttccatgcttaagagcgctagctgccaataagcaaacgattctgattccccaggtggcatacacctactcaactacggtcagccctgcagtccaagaaccacccttgaaagtgatccagccaaatggaaatcaggatgaaagacaagatactagctcagaaggagtatcaaatgtagaggatcagaatgactctgattctacaccgcccaaaaagaaaatgcggaagacagaaaatggaatgtatgcttgtgatttgtgtgacaagatattccaaaagagtagttcattattgagacataaatatgaacacacaggtaaaagacctcatgagtgtggaatctgtaaaaaggcatttaaacacaaacatcatttgattgaacacatgcgattacattctggagaaaagccctatcaatgtgacaaatgtggaaagcgcttctcacactctgggtcttattctcaacacatgaatcatcgctactcctactgtaagagagaagcggaagaacgtgacagcacagagcaggaagaggcagggcctgaaatcctctcgaatgagcacgtgggtgccagggcgtctccctcacagggcgactcggacgagagagagagtttgacaagggaagaggatgaagacagtgaaaaagaggaagaggaggaggataaagagatggaagaattgcaggaagaaaaagaatgtgaaaaaccacaaggggatgaggaagaggaggaggaggaggaagaagtggaagaagaagaggtagaagaggcagagaatgagggagaagaagcaaaaactgaaggtctgatgaaggatgacagggctgaaagtcaagcaagcagcttaggacaaaaagtaggcgagagtagtgagcaagtgtctgaagaaaagacaaatgaagcctaatcgtttttctagaaggaaaataaattctaattgataatgaatttcgttcaatattatccttgcttttcatggaaacacagtaacctgtatgctgtgattcctgttcactactgtgtaaagtaaaaactaaaaaaatacaaaatacaaaacacacacacacacacacacacacacacacacacacacacaaaataaatccgggtgtgcctgaacctcagacctagtaatttttcatgcagttttcaaagttaggaacaagtttgtaacatgcagcagattagaaaaccttaatgactcagagagcaacaatacaagaggttaaaggaagctgattaattagatatgcatctggcattgttttatcttatcagtattatcactcttatgttggtttattcttaagctgtacaattgggagaaattttataattttttattggtaaacatatgctaaatccgcttcagtattttattatgttttttaaaatgtgagaacttctgcactacaaaattcccttcacagagaagtataatgtagttccaacccgtgctaactaccttttataaattcagtctagaaggtagtaatttctaatatttagatgtcttagtagagcgtattatcatttaaagtgtattgttagccttaagaaagcagctgatagaagaactgaagtttcttactcacgtggtttaaaatggagttcaaaagattgccattgagttctgattgcagggactaacaatgttaatctgataaggacagcaaaatcatcagaatcagtgtttgtgattgtgtttgaatatgtggtaacatatgaaggatatgacatgaagctttgtatctcctttggccttaagcaagacctgtgtgctgtaagtgccatttctcagtattttcaaggctctaacccgccttcatccaatgtgtggcctacaataactagcatttgttgatttgtctcttgtatcaaaattcccaaataaaacttaaaaccactgactctgtcagagaaactgaaacactgggacatttcatccttcaattcctcggtattgattttatgttgattgattttcagaatttctctacagaaacgaaagggaaattttctaatctgctttatccatgtacttgcatttcagacatggacatgctattgttatttggctcataactgtttccaaatgttagttattatggacccaatttattaacaacattagctgatttttacctatcagtattattttatttcttttagtttatagatctgtgcaacatttttgtactgtatgtcttcaaacctggcagtattaatacccttcttactgacatatgtacttttagttttagaaaacttttatatttatgtgtcttatttttatatttctttatttattacacagtgtagtgtataatactgtagtttgtattaatacaataatatattttagtatgaaaatttggaaagttgataagatttaaagtagagatgcaattggttctcctgcattgagatttgatttaacagtgttatgttaacatttatacttgccttggactgtagaacagaacttaaatgggaatgtattagttttacaactacaatcaagtcattttacctttacccagtttttaatataaaacttaaattttgaaattcactgtgtgactaatagcatgatgctctgcagttttattaagaaatcagcctaaccatacaactctcatttccttagtaagccaaattaggattaacttctataaacagtgttgggaacaatgtttaacattttgtgccaatttgttcctgtattcatgtatgtaagttacagatctgactcttcatttttaagttccttgttacatcatggtcattttctagttttttaccagactcccatctcacaataaaatgcatcaacaagcctgaactgctgtcattcttttcatcattatcagtattttctttggaaaactgtgaaatggggtacattgtcatcctgcatttgattcatcttgagctgaatttgggtaacactaaatgttttagacattctccactaaattatggattttcttgtggctaaatgtttctggagaggtcagagttgacaaaacctcttcacaggttgctccttcttcctgaaatccttaatcctccgcatttcatgcttcaggtcatttcagggaagcctgggtttagatgcctttctgactctcagctcctgcacttctgtcatcatacctctgatactattatttatattccttccccactaggaacaggaaccacatttgtcatagtcactctcacattcctcactgcctaacagggtgcctggcataagttgggacaacagatatttgttgaataaaaatataatttgcatgtttatggagctcagctatgttctcactttttttgcttctaattccagaatatatgttaaatgatctaataatttgattattttcttataagtcttattaaacactagtcataatagacacaataaattatgccttctttttctattgcctt

SEQ ID NO: 219796 - protein, 556 aa, Artificial Sequence
  derived and/or modified sequence
MEGPLSVFGDRSTGETIRSQNVMAAASIANIVKSSLGPVGLDKMLVDDIGDVTITNDGATILKLLEVEHPAAKVLCELADLQDKEVGDGTTSVVIIAAELLKNADELVKQKIHPTSVISGYRLACKEAVRYINENLIVNTDELGRDCLINAAKTSMSSKIIGINGDFFANMVVDAVLAIKYTDIRGQPRYPVNSVNILKAHGRSQMESMLISGYALNCVVGSQGMPKRIVNAKIACLDFSLQKTKMKLGVQVVITDPEKLDQIRQRESDITKERIQKILATGANVILTTGGIDDMCLKYFVEAGAMAVRRVLKRDLKRIAKASGATILSTLANLEGEETFEAAMLGQAEEVVQERICDDELILIKNTKARTSASIILRGANDFMCDEMERSLHDALCVVKRVLESKSVVPGGGAVEAALSIYLENYATSMGSREQLAIAEFARSLLVIPNTLAVNAAQDSTDLVAKLRAFHNEAQVNPERKNLKWIGLDLSNGKPRDNKQAGVFEPTIVKVKSLKFATEAAITILRIDDLIKLHPESKDDKHGSYEDAVHSGALND

SEQ ID NO: 219797 - protein, 401 aa, Artificial Sequence
  derived and/or modified sequence
MSSKIIGINGDFFANMVVDAVLAIKYTDIRGQPRYPVNSVNILKAHGRSQMESMLISGYALNCVVGSQGMPKRIVNAKIACLDFSLQKTKMKLGVQVVITDPEKLDQIRQRESDITKERIQKILATGANVILTTGGIDDMCLKYFVEAGAMAVRRVLKRDLKRIAKASGATILSTLANLEGEETFEAAMLGQAEEVVQERICDDELILIKNTKARTSASIILRGANDFMCDEMERSLHDALCVVKRVLESKSVVPGGGAVEAALSIYLENYATSMGSREQLAIAEFARSLLVIPNTLAVNAAQDSTDLVAKLRAFHNEAQVNPERKNLKWIGLDLSNGKPRDNKQAGVFEPTIVKVKSLKFATEAAITILRIDDLIKLHPESKDDKHGSYEDAVHSGALND

SEQ ID NO: 219798 - protein, 433 aa, Artificial Sequence
  derived and/or modified sequence
MEGPLSVFGDRSTGETIRSQNVMAAASIANIVKSSLGPVGLDKMLVDDIGDVTITNDGATILKLLEVEHPAAKVLCELADLQDKEVGDGTTSVVIIAAELLKNADELVKQKIHPTSVISGYRLACKEAVRYINENLIVNTDELGRDCLINAAKTSMSSKIIGINGDFFANMVVDAVLAIKYTDIRGQPRYPVNSVNILKAHGRSQMESMLISGYALNCVVGSQGMPKRIVNAKIACLDFSLQKTKMKLGVQVVITDPEKLDQIRQRESDITKERIQKILATGANVILTTGGIDDMCLKYFVEAGAMAVRRVLKRDLKRIAKASGATILSTLANLEGEETFEAAMLGQAEEVVQERICDDELILIKNTKARTSASIILRGANDFMCDEMERSLHDALCVVKRVLESKSVVPGGGAVEAALSIYLENYATSMDWS

SEQ ID NO: 219799 - DNA, 1671 bp, Artificial Sequence
  derived and/or modified sequence
atggagggccccctgagcgtgttcggcgacagaagcaccggcgagaccatcagaagccagaacgtgatggccgccgccagcatcgccaacatcgtgaagagcagcctgggccccgtgggcctggacaagatgctggtggacgacatcggcgacgtgaccatcaccaacgacggcgccaccatcctgaagctgctggaggtggagcaccccgccgccaaggtgctgtgcgagctggccgacctgcaggacaaggaggtgggcgacggcaccaccagcgtggtgatcatcgccgccgagctgctgaagaacgccgacgagctggtgaagcagaagatccaccccaccagcgtgatcagcggctacagactggcctgcaaggaggccgtgagatacatcaacgagaacctgatcgtgaacaccgacgagctgggcagagactgcctgatcaacgccgccaagaccagcatgagcagcaagatcatcggcatcaacggcgacttcttcgccaacatggtggtggacgccgtgctggccatcaagtacaccgacatcagaggccagcccagataccccgtgaacagcgtgaacatcctgaaggcccacggcagaagccagatggagagcatgctgatcagcggctacgccctgaactgcgtggtgggcagccagggcatgcccaagagaatcgtgaacgccaagatcgcctgcctggacttcagcctgcagaagaccaagatgaagctgggcgtgcaggtggtgatcaccgaccccgagaagctggaccagatcagacagagagagagcgacatcaccaaggagagaatccagaagatcctggccaccggcgccaacgtgatcctgaccaccggcggcatcgacgacatgtgcctgaagtacttcgtggaggccggcgccatggccgtgagaagagtgctgaagagagacctgaagagaatcgccaaggccagcggcgccaccatcctgagcaccctggccaacctggagggcgaggagaccttcgaggccgccatgctgggccaggccgaggaggtggtgcaggagagaatctgcgacgacgagctgatcctgatcaagaacaccaaggccagaaccagcgccagcatcatcctgagaggcgccaacgacttcatgtgcgacgagatggagagaagcctgcacgacgccctgtgcgtggtgaagagagtgctggagagcaagagcgtggtgcccggcggcggcgccgtggaggccgccctgagcatctacctggagaactacgccaccagcatgggcagcagagagcagctggccatcgccgagttcgccagaagcctgctggtgatccccaacaccctggccgtgaacgccgcccaggacagcaccgacctggtggccaagctgagagccttccacaacgaggcccaggtgaaccccgagagaaagaacctgaagtggatcggcctggacctgagcaacggcaagcccagagacaacaagcaggccggcgtgttcgagcccaccatcgtgaaggtgaagagcctgaagttcgccaccgaggccgccatcaccatcctgagaatcgacgacctgatcaagctgcaccccgagagcaaggacgacaagcacggcagctacgaggacgccgtgcacagcggcgccctgaacgactag

SEQ ID NO: 219800 - DNA, 1302 bp, Artificial Sequence
  derived and/or modified sequence
atggagggccccctgagcgtgttcggcgacagaagcaccggcgagaccatcagaagccagaacgtgatggccgccgccagcatcgccaacatcgtgaagagcagcctgggccccgtgggcctggacaagatgctggtggacgacatcggcgacgtgaccatcaccaacgacggcgccaccatcctgaagctgctggaggtggagcaccccgccgccaaggtgctgtgcgagctggccgacctgcaggacaaggaggtgggcgacggcaccaccagcgtggtgatcatcgccgccgagctgctgaagaacgccgacgagctggtgaagcagaagatccaccccaccagcgtgatcagcggctacagactggcctgcaaggaggccgtgagatacatcaacgagaacctgatcgtgaacaccgacgagctgggcagagactgcctgatcaacgccgccaagaccagcatgagcagcaagatcatcggcatcaacggcgacttcttcgccaacatggtggtggacgccgtgctggccatcaagtacaccgacatcagaggccagcccagataccccgtgaacagcgtgaacatcctgaaggcccacggcagaagccagatggagagcatgctgatcagcggctacgccctgaactgcgtggtgggcagccagggcatgcccaagagaatcgtgaacgccaagatcgcctgcctggacttcagcctgcagaagaccaagatgaagctgggcgtgcaggtggtgatcaccgaccccgagaagctggaccagatcagacagagagagagcgacatcaccaaggagagaatccagaagatcctggccaccggcgccaacgtgatcctgaccaccggcggcatcgacgacatgtgcctgaagtacttcgtggaggccggcgccatggccgtgagaagagtgctgaagagagacctgaagagaatcgccaaggccagcggcgccaccatcctgagcaccctggccaacctggagggcgaggagaccttcgaggccgccatgctgggccaggccgaggaggtggtgcaggagagaatctgcgacgacgagctgatcctgatcaagaacaccaaggccagaaccagcgccagcatcatcctgagaggcgccaacgacttcatgtgcgacgagatggagagaagcctgcacgacgccctgtgcgtggtgaagagagtgctggagagcaagagcgtggtgcccggcggcggcgccgtggaggccgccctgagcatctacctggagaactacgccaccagcatggactggagctag

SEQ ID NO: 219801 - DNA, 1671 bp, Artificial Sequence
  derived and/or modified sequence
atggagggacccctgtctgtcttcggtgatcgcagcaccggggaaacaatccggagtcaaaatgtcatggctgccgcttcgatagctaacatagtgaaatccagtcttgggccagtaggtctggataagatgctcgtggatgatatcggcgatgtcaccattaccaatgatggagctacaattctgaagctgttggaggtggagcacccagctgcaaaggtcttgtgcgaactggctgatcttcaggataaggaagtaggagatggaacaactagtgtggtgattattgccgccgaactgcttaagaatgccgatgagctggttaagcagaaaatccacccaacatcagtgatctcagggtaccgcctggcttgtaaggaggccgtgcgttatatcaatgaaaatttgatcgtgaacacggacgagcttggccgggactgcctgataaacgctgctaagacatcgatgtccagtaagatcattgggatcaatggagatttttttgcaaatatggttgtggacgccgtgctggcaataaagtacactgacatcaggggccaacctagatatccagtaaactccgttaacatcttgaaagcgcacggtagatctcagatggaaagtatgctgatcagtgggtacgccctcaattgtgtggtgggctctcaaggcatgccaaaaaggattgttaacgccaaaatcgcctgcctcgatttctctttgcagaaaaccaagatgaaattgggggtgcaagttgtgatcacagatccagaaaaactggatcagatccgtcagagagaatccgacattaccaaggagcggattcaaaagattctggccacgggagccaacgtgattttgaccacaggagggattgacgacatgtgtttaaagtacttcgttgaagccggagcaatggctgtgcgacgcgtgttgaagcgcgatctgaagaggattgcgaaggcgtcgggagcgaccatattgtccacactagctaatcttgaaggagaagagacattcgaagcggccatgttaggccaggcagaggaggtggtccaggaaagaatttgcgacgacgaactaatcctgattaaaaacacaaaagctcggacctctgcttccatcatcctgaggggagctaacgattttatgtgcgacgagatggaacgcagcctgcacgacgctctgtgtgtggtcaaaagagtcctggagtcaaagtcagtggtgcccggcggtggcgctgtggaggcagcccttagcatttacctggaaaactatgccaccagcatgggctcacgcgagcaactcgccattgcagagttcgctcgctctctcctggtgattccaaacacactcgctgtcaacgccgcgcaagattctacagacttggtcgcgaagttaagggcatttcataatgaagctcaggtcaatcctgagcgaaaaaacctgaagtggatcggactggacctttctaatggcaaaccaagggataataaacaagccggcgtgttcgaaccgaccatcgtgaaggtgaaatcacttaagtttgctaccgaggccgccattactatactgcggatcgatgacctcatcaagttacatcctgagagcaaagacgacaaacatggctcctacgaagacgctgtgcactccggagcactaaatgactag

SEQ ID NO: 219802 - DNA, 1302 bp, Artificial Sequence
  derived and/or modified sequence
atggaaggcccgctgagtgtgtttggcgaccgcagcacaggagagacaatccgctcccagaatgtcatggcagctgccagtattgctaacatcgtgaagtcttcattaggacccgtgggccttgacaaaatgcttgtggatgatatcggagatgtgaccatcaccaacgacggcgctaccatcctcaagctgcttgaggtcgagcatcccgctgccaaagtactgtgtgagctcgccgaccttcaggataaggaggtgggagatggaacaacatcagtagtcattattgctgcagagttgctaaagaatgccgacgaacttgtcaagcagaagatccaccccaccagcgtgatcagtggctacagattagcatgcaaggaggctgtgcggtatatcaatgagaacctcattgttaacaccgacgagcttggccgcgattgtctcattaatgcggccaaaacatccatgtcaagcaagatcataggcattaatggggatttctttgctaatatggttgtggacgccgtgctggcaattaaatatactgacatccgaggacaaccgagatatccagtcaactccgtaaacatcctcaaggctcatggtcggtcccaaatggaatccatgctgatttctggctatgccctgaattgcgtggtgggttcacagggaatgccaaagcggattgtcaacgcaaagatagcctgcctggattttagcttgcaaaaaaccaaaatgaaacttggcgtgcaggtggtgattactgacccggagaagctggaccagatccgtcagagggagagcgatatcacaaaagaacggatccaaaaaatcctggccacgggtgccaatgtgatcctgacgactggtggtatagacgacatgtgtctaaagtatttcgtggaagcaggtgccatggctgttcgaagggttcttaagagggatcttaagcgcatcgcgaaggcatccggcgccacgattctttctaccctcgcaaatctggagggtgaagagacctttgaggcagcaatgctgggacaggcagaagaagtcgtgcaggagagaatttgtgacgacgagttgattctcattaagaacaccaaggcaagaacctctgcaagtatcatcttgcgtggagctaacgattttatgtgcgacgaaatggaacgctctttgcatgacgctctgtgcgtggtaaaacgagtattagagagcaagtctgtagtgcccggaggtggggcggtcgaggcggcattatctatctatctggagaactacgccaccagtatggactggtcgtag

SEQ ID NO: 219803 - DNA, 1671 bp, Artificial Sequence
  derived and/or modified sequence
atggagggccccctgtctgtgtttggagacaggagcactggagagaccatccgcagccagaatgtgatggctgctgccagcatcgccaacatcgtgaagagcagcctgggccctgtgggcctggacaagatgctggtggatgacattggagatgtgaccatcaccaatgatggagccaccatcctgaagctgctggaggtggagcaccctgctgccaaggtgctgtgtgagctggccgacctgcaggacaaggaggtgggagatggcaccacctctgtggtgatcatcgctgctgagctgctgaagaatgctgatgagctggtgaagcagaagatccaccccaccagcgtcatcagcggctaccgcctggcctgcaaggaggccgtgcgctacatcaatgaaaacctgattgtgaacacagatgagctgggccgggactgcctgatcaatgctgccaagacctccatgagcagcaagatcatcggcatcaacggggacttctttgccaacatggtggtggatgctgtgctggccatcaagtacacagacatccggggccagccccgctaccctgtgaacagcgtgaacatcctgaaggcccacggccgcagccagatggagagcatgctgatcagcggctacgccctgaactgtgtggtgggcagccagggcatgcccaagagaattgtgaatgccaagatcgcctgcctggacttcagcctgcagaagaccaagatgaagctgggcgtgcaggtggtgatcacagatcctgagaagctggaccagatccggcagcgggagagtgacatcaccaaggagcgcatccagaagatcctggccactggagccaacgtcatcctgaccactggaggcattgatgacatgtgcctgaagtactttgtggaggccggggccatggctgtgagaagagtgctgaagagggacctgaagagaattgccaaggccagcggggccaccatcctgagcaccctggccaacctggagggggaggagacctttgaggccgccatgctgggccaggccgaggaggtggtgcaggagcgcatctgtgatgatgagctgatcctgatcaagaacaccaaggcccggaccagcgccagcatcatcctgcggggggccaatgacttcatgtgtgatgagatggagaggagcctgcatgatgccctgtgtgtggtgaagagggtgctggagagcaagtctgtggtgcctgggggcggcgctgtggaggccgccctgagcatctacctggagaactatgccacctccatgggcagccgggagcagctggccatcgccgagtttgcccggagcctgctggtgatccccaacaccctggccgtgaatgctgcccaggacagcacagacctggtggccaagctgcgggccttccacaatgaggcccaggtgaaccctgagaggaagaacctgaagtggattggcctggacctgagcaatggcaagccccgggacaacaagcaggccggcgtgtttgagcccaccatcgtgaaggtgaagagcctgaagtttgccacagaggccgccatcaccatcctgagaattgatgacctgatcaagctgcaccctgagagcaaggatgacaagcacggcagctatgaagatgctgtgcacagcggggccctgaatgactag

SEQ ID NO: 219804 - DNA, 1302 bp, Artificial Sequence
  derived and/or modified sequence
atggagggccccctgtctgtgtttggagacaggagcactggagagaccatccgcagccagaatgtgatggctgctgccagcatcgccaacatcgtgaagagcagcctgggccctgtgggcctggacaagatgctggtggatgacattggagatgtgaccatcaccaatgatggagccaccatcctgaagctgctggaggtggagcaccctgctgccaaggtgctgtgtgagctggccgacctgcaggacaaggaggtgggagatggcaccacctctgtggtgatcatcgctgctgagctgctgaagaatgctgatgagctggtgaagcagaagatccaccccaccagcgtcatcagcggctaccgcctggcctgcaaggaggccgtgcgctacatcaatgaaaacctgattgtgaacacagatgagctgggccgggactgcctgatcaatgctgccaagacctccatgagcagcaagatcatcggcatcaacggggacttctttgccaacatggtggtggatgctgtgctggccatcaagtacacagacatccggggccagccccgctaccctgtgaacagcgtgaacatcctgaaggcccacggccgcagccagatggagagcatgctgatcagcggctacgccctgaactgtgtggtgggcagccagggcatgcccaagagaattgtgaatgccaagatcgcctgcctggacttcagcctgcagaagaccaagatgaagctgggcgtgcaggtggtgatcacagatcctgagaagctggaccagatccggcagcgggagagtgacatcaccaaggagcgcatccagaagatcctggccactggagccaacgtcatcctgaccactggaggcattgatgacatgtgcctgaagtactttgtggaggccggggccatggctgtgagaagagtgctgaagagggacctgaagagaattgccaaggccagcggggccaccatcctgagcaccctggccaacctggagggggaggagacctttgaggccgccatgctgggccaggccgaggaggtggtgcaggagcgcatctgtgatgatgagctgatcctgatcaagaacaccaaggcccggaccagcgccagcatcatcctgcggggggccaatgacttcatgtgtgatgagatggagaggagcctgcatgatgccctgtgtgtggtgaagagggtgctggagagcaagtctgtggtgcctgggggcggcgctgtggaggccgccctgagcatctacctggagaactatgccacctccatggactggagctag

SEQ ID NO: 219805 - DNA, 1671 bp, Artificial Sequence
  derived and/or modified sequence
atggagggccccctgagcgtgttcggcgaccggagcaccggcgagaccatccggtcccagaacgtgatggcagcggcatcaattgccaacatcgtcaagtcctctctgggacccgtgggcttggataaaatgctggtggatgatattggagacgtcacaattacgaatgacggagccacaattctgaagctgctggaagtcgaacaccccgccgcaaaagtgctatgcgaactggctgacctgcaagataaagaagtcggggacggtacaacaagcgtggtgatcatcgcagcagagctactgaagaacgctgacgaacttgttaagcagaagatccatcctacctcagtgatttccggctacagactggcttgtaaggaagccgttcgctatataaacgagaaccttatagtgaatacggacgagctcggcagagattgcctcattaacgcagccaagacgagtatgagctcaaaaataatcgggattaacggcgactttttcgctaacatggtagtggacgctgtgctggctattaagtataccgatattcgcggccagcccaggtacccagttaattctgtaaacatactaaaagcccacggtcgctcccagatggaatctatgctgatcagtggctacgcattgaattgtgttgtgggatcacagggcatgccaaaacgaatcgtgaatgccaagattgcttgcctcgactttagcctgcaaaaaacaaagatgaagttaggtgtgcaggtagtaatcacagaccctgaaaaactcgatcagataagacagagagagtccgatattaccaaagaaagaattcagaagattctggccactggggcaaacgtcatcctgacaacaggcgggatcgacgatatgtgcctgaagtactttgtggaagcaggtgctatggctgttaggagagtgctgaaacgtgacctgaagcgcatcgcaaaggcatccggagcaacaattctgagcacattggccaatctggaaggcgaggagacatttgaggctgctatgctgggacaggctgaggaagtggtgcaggagcggatttgtgacgacgagttaatcctgatcaaaaatacaaaggcccggacatcagcctccattattttgaggggggccaatgatttcatgtgtgacgagatggagcgatcgctccacgatgcactgtgtgtcgtcaagagagtgctggaaagcaagagcgtggttccaggcggcggggcagtcgaagctgctttgtcgatttacctagaaaactacgcgacttccatgggatcgcgtgagcagctggcaatcgcggaattcgcccgttccttactcgtgatccctaacaccttagccgtgaacgccgcccaggacagtacggacctggtcgctaagctaagagccttccacaacgaggcccaggttaatcctgagcgcaagaatctcaagtggatcgggctggatctcagtaatgggaagcctcgcgacaataaacaggcgggtgtgttcgaacccactattgtcaaggtgaaatctttgaaattcgccaccgaagccgccatcactattctaaggattgacgacttgatcaagctccacccagagtccaaagatgataagcacgggagctatgaagacgctgtgcattcaggagccctgaatgactag

SEQ ID NO: 219806 - DNA, 1302 bp, Artificial Sequence
  derived and/or modified sequence
atggagggccccctgagcgtgttcggcgaccggagcaccggcgagacgattaggtcccaaaatgtcatggctgctgccagtattgccaatattgtcaaatcctctctgggccccgtaggcttagacaagatgctggtagacgacattggcgacgtgacaataacgaatgacggggccactattttaaagttactcgaagtcgaacacccagctgccaaggtactttgtgaactagcggacctgcaagataaggaagtcggtgatggcaccacttctgtggtgataatcgccgctgagttactgaaaaacgcagacgaattggtaaagcaaaagattcacccaacgtctgttatcagtggctacaggctggcatgcaaagaggccgtccggtacatcaatgagaatctaatagtgaacactgatgaactgggccgggactgccttattaacgccgccaaaacatctatgagcagcaaaattatcggcatcaatggggatttttttgcgaatatggtagttgatgctgttcttgccattaagtatactgacattcgcggacagcctcgttacccggtgaacagtgtgaacatcctcaaagcccacggccgctctcagatggagagtatgcttataagcggctacgccttgaattgtgtagtgggttctcagggaatgcctaaaagaatagttaacgcaaagatagcttgtctggacttctccctccagaagacgaaaatgaagctcggggtacaggttgtaatcacagaccccgaaaagcttgaccaaataagacagcgtgagtccgacattaccaaagaaagaatacagaagatcttagccacaggcgccaatgtgatactgaccaccgggggcatcgatgatatgtgccttaagtatttcgtcgaagctggagccatggccgtgagacgggtgctgaagagggacttgaaacggatagccaaagctagcggcgcgacgatcctgtccaccttggctaatctcgagggggaagagactttcgaagccgcaatgctcggtcaggctgaagaggtcgtgcaagagagaatctgcgacgatgagttgatactgatcaaaaatacaaaagctcggacatcagcgagcatcattctgcggggagcaaacgatttcatgtgcgacgagatggagcgctctcttcacgacgctctctgcgtggtgaagcgcgtgcttgagtctaagagcgtggttccaggggggggagcagtggaagctgctctcagcatctacctcgaaaattatgccacatcgatggactggagttag

SEQ ID NO: 219807 - DNA, 1671 bp, Artificial Sequence
  derived and/or modified sequence
atggagggcccattgtccgtgttcggagaccgcagcactggagaaacgatcaggagtcagaatgtcatggctgctgcatcaatagccaacattgtgaaaagcagccttggaccagtcggccttgacaagatgctggtggatgatatcggagacgtcacaatcaccaacgatggagccactattctgaagctacttgaggtggagcaccccgctgctaaagtcctgtgtgaactggcagaccttcaggacaaggaggtgggcgacggcacaacctctgtggtgattattgcagctgaacttctcaagaacgccgacgagttggtgaagcagaaaattcaccccacctctgtaatttctggctatcgtctggcttgcaaggaagccgtaagatatatcaacgagaacctgatcgtgaatactgatgagctcggaagagattgtctcatcaatgccgctaagaccagcatgtcaagcaaaataatcggcataaacggtgacttttttgccaacatggtggttgacgccgtgctggccattaaatataccgacatccgagggcagcccagatatcccgtgaatagtgtcaatatattgaaagctcacggtagaagtcagatggagtcaatgctgatttcaggttacgccctgaattgcgtcgtgggctcgcagggcatgcccaagcggatagtgaatgccaaaatcgcctgcctggatttcagtttgcaaaaaacaaagatgaagctcggagttcaggtggttatcactgaccccgaaaaactggatcagattcggcagcgggagtcggatatcacaaaagagcgaattcagaaaattcttgccaccggggctaacgtgattctcaccaccggtggaattgacgatatgtgccttaagtattttgtggaagccggtgcaatggctgtgcggagggtgctgaagagggacctgaagagaatagccaaagcgagtggcgctaccattctgtccaccttagccaatctggaaggagaagagacctttgaggctgccatgctaggccaggcagaggaggtcgtgcaggaacgaatctgcgacgatgaactgatcctaatcaaaaacacgaaagctaggacctcagctagtattatcctgcgcggagcgaacgacttcatgtgcgatgagatggagaggtctctgcacgatgcgctctgcgttgtgaaaagggtgctggaaagtaaatccgtggtgccaggaggcggagcggtagaagcggctttgagtatttatttagaaaactacgcgacatcgatgggatctagagagcagctcgctatcgctgagttcgccaggagccttctagtgattccaaatacactggcagtgaacgcagcccaagactccacagacctggttgctaagctgagggccttccataatgaggcccaggtcaatccagaacgcaagaacttaaaatggattggcctagacctcagtaatggaaagcctcgagataataaacaggccggagtgttcgagcccaccatagttaaggtcaagagtctgaagtttgcaactgaggcagccattaccattctgcgaatcgatgacctgatcaagctgcacccagagagtaaggacgacaagcacggcagttatgaagacgctgttcactctggcgcattgaatgactag

SEQ ID NO: 219808 - DNA, 1302 bp, Artificial Sequence
  derived and/or modified sequence
atggaagggccattaagtgtgttcggcgatcgcagcacaggcgaaacaatacgaagccagaatgtaatggcggctgcctcaatcgctaacattgtaaagtccagtctcggccctgtcggcctggataaaatgctcgtagatgacataggcgatgtcaccattactaatgatggcgctactattcttaagttgttagaggtggaacaccctgccgctaaggtgctgtgtgaactcgcggacctccaggacaaggaggtgggtgacggaacaactagcgtcgtgattatagctgccgagttgttaaagaatgctgacgagctcgtgaaacagaagattcaccccacatctgttatttcaggctaccggcttgcctgtaaggaagccgttaggtatataaatgagaatctgatcgtgaatacagatgagttgggcagagactgcttgattaacgcagccaaaacttccatgtcttccaaaatcatcggcatcaacggtgacttctttgccaatatggtcgtagatgccgttcttgccatcaaatataccgatatccgcggtcaaccgaggtatccagtcaattcggtaaatattctcaaggcccatggtagaagtcaaatggagtcaatgcttatctctggctacgcgctgaactgcgttgttggctcccagggcatgccaaaacgtattgtgaacgctaaaattgcctgcttggacttttctctccagaaaaccaaaatgaagctgggggtgcaagtggtgatcacggacccagagaagctcgaccagattagacagagagagtctgacatcaccaaggagcggatccagaagattttggcgaccggcgctaacgtgatcctgactactggtggaattgatgacatgtgtttgaagtattttgtggaggccggagctatggcggtacgacgcgtgcttaagcgggacctcaagcggattgctaaggctagcggcgctactatcctatccactttagctaatcttgagggcgaggaaacctttgaggccgcaatgctgggacaggccgaagaagtggttcaggagagaatctgcgacgacgagctgattctcatcaaaaacactaaagcaaggacgtctgcttccattatcctgcgaggggctaacgacttcatgtgcgatgaaatggagaggagcttgcatgacgctctgtgcgtggtgaagcgcgtactcgaatccaaatccgttgtccccggagggggtgcggtggaagcagctttgagtatttacttagagaactatgcgacatctatggactggtcttag

SEQ ID NO: 219809 - DNA, 2499 bp, Artificial Sequence
  derived and/or modified sequence
aaaaatgccgaccccgccccttccccggagcctcacttccgtcacagtcctgtttctctccctgttgtccctgcctctttttccttcccgccgtgccccgcggccgggccggggcagccgggaagcgggtggggtggtgtgttacccagtagctcctgggacatcgctcgggtacgctccacgccgtcgcagccactgctgtggtcgccggtcggccgaggggccgcgatactggttgcccgcggtgtaagcagaattcgacgtgtatcgctgccgtcaagatggaggggcctttgtccgtgttcggtgaccgcagcactggggaaacgatccgctcccaaaacgttatggctgcagcttcgattgccaatattgtaaaaagttctcttggtccagttggcttggataaaatgttggtggatgatattggtgatgtaaccattactaacgatggtgcaaccatcctgaagttactggaggtagaacatcctgcagctaaagttctttgtgagctggctgatctgcaagacaaagaagttggagatggaactacttcagtggttattattgcagcagaactcctaaaaaatgcagatgaattagtcaaacagaaaattcatcccacatcagttattagtggctatcgacttgcttgcaaggaagcagtgcgttatatcaatgaaaacctaattgttaacacagatgaactgggaagagattgcctgattaatgctgctaagacatccatgtcttccaaaatcattggaataaatggtgatttctttgctaacatggtagtagatgctgtacttgctattaaatacacagacataagaggccagccacgctatccagtcaactctgttaatattttgaaagcccatgggagaagtcaaatggagagtatgctcatcagtggctatgcactcaactgtgtggtgggatcccagggcatgcccaagagaatcgtaaatgcaaaaattgcttgccttgacttcagcctgcaaaaaacaaaaatgaagcttggtgtacaggtggtcattacagaccctgaaaaactggaccaaattagacagagagaatcagatatcaccaaggagagaattcagaagatcctggcaactggtgccaatgttattctaaccactggtggaattgatgatatgtgtctgaagtattttgtggaggctggtgctatggcagttagaagagttttaaaaagggaccttaaacgcattgccaaagcttctggagcaactattctgtcaaccctggccaatttggaaggtgaagaaacttttgaagctgcaatgttgggacaggcagaagaagtggtacaggagagaatttgtgatgatgagctgatcttaatcaaaaatactaaggctcgtacgtctgcatcgattatcttacgtggggcaaatgatttcatgtgtgatgagatggagcgctctttacatgatgcactttgtgtagtgaagagagttttggagtcaaaatctgtggttcccggtgggggtgctgtagaagcagccctttccatataccttgaaaactatgcaaccagcatggggtctcgggaacagcttgcgattgcagagtttgcaagatcacttcttgttattcccaatacactagcagttaatgctgcccaggactccacagatctggttgcaaaattaagagcttttcataatgaggcccaggttaacccagaacgtaaaaatctaaaatggattggtcttgatttgagcaatggtaaacctcgagacaacaaacaagcaggggtgtttgaaccaaccatagttaaagttaagagtttgaaatttgcaacagaagctgcaatcaccattcttcgaattgatgatcttattaaattacatccagaaagtaaagatgataaacatggaagttatgaagatgctgttcactctggagcccttaatgattgatctgatgttccttttatttataacaatgttaaatgcaattgtcttgtaccttgagttgagtattacacattaaagtaaagtacaagctgtaaacttgggtttttgtgatgtaggaaatggtttccatctgtactttggtcctctgatttcacatattgcaacctagtactttattagtttaaaaagaaattgaggttgttcaaagtttaagcaattcattctctctgaacacacattgctattcccatcccacccccaatgcacagggctgcaacaccacgacttctgcccattctctccagtgtgtgtaacagggtcacaagaattcgacagccagatgctccaagagggtggcccaaggctatagcccctccttcaatattgacctaacgggggagaaaagatttagattgtttattcttctgtggacacagtttaaaatcttaaacttgtctttttcctcttaatgtatcagcatgctaccctttcaaactcaaattttcattttaactgcttaggaataaatttacacctttgtgaaaattca

SEQ ID NO: 219810 - DNA, 1878 bp, Artificial Sequence
  derived and/or modified sequence
gtcctgtttctctccctgttgtccctgcctctttttccttcccgccgtgccccgcggccgggccggggcagccgggaagcgggtggggtggtgtgttacccagtagctcctgggacatcgctcgggtacgctccacgccgtcgcagccactgctgtggtcgccggtcggccgaggggccgcgatactggttgcccgcggtgtaagcagaattcgacgtgtatcgctgccgtcaagatggaggggcctttgtccgtgttcggtgaccgcagcactggggaaacgatccgctcccaaaacggatgtaaccattactaacgatggtgcaaccatcctgaagttactggaggtagaacatcctgcagctaaagttctttgtgagctggctgatctgcaagacaaagaagttggagatggaactacttcagtggttattattgcagcagaactcctaaaaaatgcagatgaattagtcaaacagaaaattcatcccacatcagttattagtggctatcgacttgcttgcaaggaagcagtgcgttatatcaatgaaaacctaattgttaacacagatgaactgggaagagattgcctgattaatgctgctaagacatccatgtcttccaaaatcattggaataaatggtgatttctttgctaacatggtagtagatgctgtacttgctattaaatacacagacataagaggccagccacgctatccagtcaactctgttaatattttgaaagcccatgggagaagtcaaatggagagtatgctcatcagtggctatgcactcaactgtgtggtgggatcccagggcatgcccaagagaatcgtaaatgcaaaaattgcttgccttgacttcagcctgcaaaaaacaaaaatgaagcttggtgtacaggtggtcattacagaccctgaaaaactggaccaaattagacagagagaatcagatatcaccaaggagagaattcagaagatcctggcaactggtgccaatgttattctaaccactggtggaattgatgatatgtgtctgaagtattttgtggaggctggtgctatggcagttagaagagttttaaaaagggaccttaaacgcattgccaaagcttctggagcaactattctgtcaaccctggccaatttggaaggtgaagaaacttttgaagctgcaatgttgggacaggcagaagaagtggtacaggagagaatttgtgatgatgagctgatcttaatcaaaaatactaaggctcgtacgtctgcatcgattatcttacgtggggcaaatgatttcatgtgtgatgagatggagcgctctttacatgatgcactttgtgtagtgaagagagttttggagtcaaaatctgtggttcccggtgggggtgctgtagaagcagccctttccatataccttgaaaactatgcaaccagcatggggtctcgggaacagcttgcgattgcagagtttgcaagatcacttcttgttattcccaatacactagcagttaatgctgcccaggactccacagatctggttgcaaaattaagagcttttcataatgaggcccaggttaacccagaacgtaaaaatctaaaatggattggtcttgatttgagcaatggtaaacctcgagacaacaaacaagcaggggtgtttgaaccaaccatagttaaagttaagagtttgaaatttgcaacagaagctgcaatcaccattcttcgaattgatgatcttattaaattacatccagaaagtaaagatgataaacatggaagttatgaagatgctgttcactctggagcccttaatgattgatctgatgttccttttatttataacaatgttaaatgcaattgtcttgtaccttgagttg

SEQ ID NO: 219811 - DNA, 1671 bp, Artificial Sequence
  derived and/or modified sequence
tccacgccgtcgcagccactgctgtggtcgccggtcggccgaggggccgcgatactggttgcccgcggtgtaagcagaattcgacgtgtatcgctgccgtcaagatggaggggcctttgtccgtgttcggtgaccgcagcactggggaaacgatccgctcccaaaacgttatggctgcagcttcgattgccaatattgtaaaaagttctcttggtccagttggcttggataaaatgttggtggatgatattggtgatgtaaccattactaacgatggtgcaaccatcctgaagttactggaggtagaacatcctgcagctaaagttctttgtgagctggctgatctgcaagacaaagaagttggagatggaactacttcagtggttattattgcagcagaactcctaaaaaatgcagatgaattagtcaaacagaaaattcatcccacatcagttattagtggctatcgacttgcttgcaaggaagcagtgcgttatatcaatgaaaacctaattgttaacacagatgaactgggaagagattgcctgattaatgctgctaagacatccatgtcttccaaaatcattggaataaatggtgatttctttgctaacatggtagtagatgctgtacttgctattaaatacacagacataagaggccagccacgctatccagtcaactctgttaatattttgaaagcccatgggagaagtcaaatggagagtatgctcatcagtggctatgcactcaactgtgtggtgggatcccagggcatgcccaagagaatcgtaaatgcaaaaattgcttgccttgacttcagcctgcaaaaaacaaaaatgaagcttggtgtacaggtggtcattacagaccctgaaaaactggaccaaattagacagagagaatcagatatcaccaaggagagaattcagaagatcctggcaactggtgccaatgttattctaaccactggtggaattgatgatatgtgtctgaagtattttgtggaggctggtgctatggcagttagaagagttttaaaaagggaccttaaacgcattgccaaagcttctggagcaactattctgtcaaccctggccaatttggaaggtgaagaaacttttgaagctgcaatgttgggacaggcagaagaagtggtacaggagagaatttgtgatgatgagctgatcttaatcaaaaatactaaggctcgtacgtctgcatcgattatcttacgtggggcaaatgatttcatgtgtgatgagatggagcgctctttacatgatgcactttgtgtagtgaagagagttttggagtcaaaatctgtggttcccggtgggggtgctgtagaagcagccctttccatataccttgaaaactatgcaaccagcatggattggtcttgatttgagcaatggtaaacctcgagacaacaaacaagcaggggtgtttgaaccaaccatagttaaagttaagagtttgaaatttgcaacagaagctgcaatcaccattcttcgaattgatgatcttattaaattacatccagaaagtaaagatgataaacatggaagttatgaagatgctgttcactctggagcccttaatgattgatctgatgttccttttatttataacaatgttaaatgcaattgtcttgtaccttgagttgag

SEQ ID NO: 219812 - protein, 355 aa, Artificial Sequence
  derived and/or modified sequence
MEPHLLGLLLGLLLGGTRVLAGYPIWWSLALGQQYTSLGSQPLLCGSIPGLVPKQLRFCRNYIEIMPSVAEGVKLGIQECQHQFRGRRWNCTTIDDSLAIFGPVLDKATRESAFVHAIASAGVAFAVTRSCAEGTSTICGCDSHHKGPPGEGWKWGGCSEDADFGVLVSREFADARENRPDARSAMNKHNNEAGRTTILDHMHLKCKCHGLSGSCEVKTCWWAQPDFRAIGDFLKDKYDSASEMVVEKHRESRGWVETLRAKYSLFKPPTERDLVYYENSPNFCEPNPETGSFGTRDRTCNVTSHGIDGCDLLCCGRGHNTRTEKRKEKCHCIFHWCCYVSCQECIRIYDVHTCK

SEQ ID NO: 219813 - DNA, 1068 bp, Artificial Sequence
  derived and/or modified sequence
atggaacctcacctgctgggactgttactgggcttgctactgggcggcactcgcgtacttgccggctaccccatttggtggtcacttgcactcgggcaacaatataccagcctgggtagtcagcccctgctgtgcggctcaatccctgggctcgtccctaagcagttgagattctgccgaaattacatcgagattatgccgtctgtggcagagggcgtcaagttggggattcaggagtgccaacatcagttcaggggaaggcgctggaactgcaccaccatcgacgatagccttgccatctttggcccagtactggacaaagctaccagggagagtgccttcgtgcacgctattgcaagcgctggggtggcctttgcggtgactcgttcctgcgctgagggaacctctaccatctgtggatgcgattcacatcataagggccctccaggcgaaggctggaagtggggaggctgtagcgaagatgctgattttggggtgctcgtgtcacgggagtttgcagatgctagagagaaccgcccagacgcgcgaagtgcaatgaataagcacaacaatgaggctggaagaacaaccatccttgatcacatgcaccttaaatgtaaatgccatggactgtctggtagctgtgaggtcaaaacttgctggtgggcccaaccagacttcagagcaatcggcgattttctgaaagataagtacgactccgcttctgagatggttgttgagaaacatcgagaatccagaggctgggttgaaaccctccgcgccaagtattccctgttcaagccccctaccgagcgggatctagtgtactatgaaaatagcccgaacttttgcgaaccaaatcctgagacgggttcctttggcacacgagaccggacctgcaacgtgacctcacacgggatagatgggtgtgacttgctctgttgcggccggggccataacacacgcacagaaaagcgcaaagaaaagtgtcactgcatcttccattggtgttgttacgtctcatgtcaggaatgcatccggatctacgatgtgcacacctgcaagtag

SEQ ID NO: 219814 - DNA, 1068 bp, Artificial Sequence
  derived and/or modified sequence
atggagccccacctgctgggcctgctgctgggcctgctgctgggcggcaccagggtgctggccggctaccccatctggtggagcctggccctgggccagcagtacaccagcctgggcagccagcccctgctgtgtggcagcatccctggcctggtgcccaagcagctgcgcttctgcaggaactacatcgagatcatgcccagcgtggccgagggcgtgaagctgggcatccaggagtgccagcaccagttccggggccgccgctggaactgcaccaccattgatgacagcctggccatctttggacctgtgctggacaaggccacccgggagagcgcctttgtgcacgccatcgccagcgctggggtggcctttgctgtgaccaggagctgtgccgagggcaccagcaccatctgtggctgtgacagccaccacaagggccccccaggagagggctggaagtggggcggctgcagtgaagatgctgactttggagtgctggtgtcccgggagtttgctgatgccagagaaaatagaccagatgcccggagcgccatgaacaagcacaacaatgaagctggccgcaccaccatcctggaccacatgcacctgaagtgcaagtgccacggcctgagcggcagctgtgaggtgaagacctgctggtgggcccagcctgacttccgggccatcggggacttcctgaaggacaagtatgacagcgccagcgagatggtggtggagaagcaccgggagagccggggctgggtggagaccctgcgggccaagtacagcctcttcaagccacccacagagcgggacctggtgtactatgagaacagccccaacttctgtgagcccaaccctgagaccggcagctttggcacccgggacaggacctgcaatgtgaccagccatggaattgatggctgtgacctgctgtgctgcggccggggccacaacaccaggacagagaagaggaaggagaagtgccactgcatcttccactggtgctgctacgtgtcctgccaggagtgcatccgcatctatgatgtgcacacctgcaagtag

SEQ ID NO: 219815 - DNA, 1068 bp, Artificial Sequence
  derived and/or modified sequence
atggagccccacctgctgggcctgctgctgggcctgctgctgggcggaacccgtgtgctcgctggttatccaatttggtggagcctggcgctgggtcagcagtacacctccctgggcagccaacctttgttatgcggtagcatcccgggcctcgtaccaaagcagctacgcttttgcagaaactatattgagataatgccttctgtagccgagggcgtgaagttaggcattcaggagtgtcagcaccagtttcgtggccggagatggaactgtactacgattgatgattctctggctatcttcggtcctgttctggataaagccacacgcgagagcgccttcgttcacgccatcgcatcagctggcgttgccttcgcagtgacaaggtcctgcgcagagggaaccagtacaatttgcggatgtgattctcatcacaagggtccccccggggaggggtggaaatggggaggatgtagcgaggacgcagatttcggagtactggtcagccgcgagtttgctgatgccagagagaaccgcccagatgcccgctcagctatgaacaaacacaacaatgaagctggccgaacaactattctggaccacatgcatttaaaatgcaagtgccatggattaagcggtagctgtgaagtgaaaacttgctggtgggcacaacccgatttcagggcaatcggggatttcctgaaagataaatacgattcggcgtctgagatggtggtcgagaaacatcgcgagagcaggggctgggtggagaccttgcgcgccaagtattcacttttcaagcccccaacagaacgcgacctggtgtattacgaaaattccccaaacttttgtgagcctaaccctgagacaggcagcttcggtaccagggatcgaacgtgtaacgtgacctctcacgggatcgatggctgcgacctgctttgctgtgggcggggacacaacactaggacagaaaagcggaaggagaagtgtcattgtatcttccactggtgctgttacgtctcctgccaggagtgtatacgcatttacgacgtacacacttgcaagtag

SEQ ID NO: 219816 - DNA, 1068 bp, Artificial Sequence
  derived and/or modified sequence
atggaacctcacctgcttgggctactcctgggcctgcttctaggcggtacacgagtcctggctggctatccaatctggtggagccttgccttaggccaacagtacacctctctcgggtcacagccactgctttgcggcagtattcctggtctcgtgccaaagcagcttagattttgccggaattatattgaaataatgccaagtgtagccgagggcgtcaaactaggcatacaggagtgccagcatcagttccgcggtcggaggtggaactgcacaacgatcgatgatagcttagccatattcggtcccgtgctggacaaggcaaccagagaatcggcttttgtgcacgccattgctagcgccggagtcgcctttgcggtgacacgctcgtgcgctgagggcacatcaaccatctgcggctgtgactcccaccacaagggaccacctggggagggctggaaatgggggggatgcagtgaggacgcagattttggggtgcttgtctcgcgggaattcgcagacgcgcgagaaaataggcctgatgctcgttcagccatgaataaacacaacaatgaggcaggacgcaccaccatcctggatcatatgcaccttaagtgcaaatgtcatggactgagtggcagctgtgaggtgaagacatgttggtgggcacaacccgacttccgggctatcggggacttcctgaaggataaatacgactccgcaagtgagatggtcgttgaaaagcacagggagagccgcggatgggtggagaccctacgggctaaatattccctctttaagcctcccactgagcgtgacctcgtctactacgaaaacagccccaatttctgtgagcccaaccctgaaactggcagttttggcacccgcgacaggacctgcaatgtcacatcacacggtattgacggatgtgacttgctgtgctgtggaaggggccataacacacggaccgagaaaagaaaggagaaatgccactgcatcttccactggtgttgctatgtctcctgtcaggaatgtattaggatctacgacgtccacacctgcaagtag

SEQ ID NO: 219817 - DNA, 1068 bp, Artificial Sequence
  derived and/or modified sequence
atggagccccacctgctgggcctgctgctgggcctgctgctgggcggcaccagagtgctggccggctaccccatctggtggagcctggccctgggccagcagtacaccagcctgggcagccagcccctgctgtgcggcagcatccccggcctggtgcccaagcagctgagattctgcagaaactacatcgagatcatgcccagcgtggccgagggcgtgaagctgggcatccaggagtgccagcaccagttcagaggcagaagatggaactgcaccaccatcgacgacagcctggccatcttcggccccgtgctggacaaggccaccagagagagcgccttcgtgcacgccatcgccagcgccggcgtggccttcgccgtgaccagaagctgcgccgagggcaccagcaccatctgcggctgcgacagccaccacaagggcccccccggcgagggctggaagtggggcggctgcagcgaggacgccgacttcggcgtgctggtgagcagagagttcgccgacgccagagagaacagacccgacgccagaagcgccatgaacaagcacaacaacgaggccggcagaaccaccatcctggaccacatgcacctgaagtgcaagtgccacggcctgagcggcagctgcgaggtgaagacctgctggtgggcccagcccgacttcagagccatcggcgacttcctgaaggacaagtacgacagcgccagcgagatggtggtggagaagcacagagagagcagaggctgggtggagaccctgagagccaagtacagcctgttcaagccccccaccgagagagacctggtgtactacgagaacagccccaacttctgcgagcccaaccccgagaccggcagcttcggcaccagagacagaacctgcaacgtgaccagccacggcatcgacggctgcgacctgctgtgctgcggcagaggccacaacaccagaaccgagaagagaaaggagaagtgccactgcatcttccactggtgctgctacgtgagctgccaggagtgcatcagaatctacgacgtgcacacctgcaagtag

SEQ ID NO: 219818 - DNA, 1489 bp, Artificial Sequence
  derived and/or modified sequence
gcgcttctgacaagcccgaaagtcatttccaatctcaagtggactttgttccaactattgggggcgtcgctccccctcttcatggtcgcgggcaaacttcctcctcggcgcctcttctaatggagccccacctgctcgggctgctcctcggcctcctgctcggtggcaccagggtcctcgctggctacccaatttggtggtccctggccctgggccagcagtacacatctctgggctcacagcccctgctctgcggctccatcccaggcctggtccccaagcaactgcgcttctgccgcaattacatcgagatcatgcccagcgtggccgagggcgtgaagctgggcatccaggagtgccagcaccagttccggggccgccgctggaactgcaccaccatagatgacagcctggccatctttgggcccgtcctcgacaaagccacccgcgagtcggccttcgttcacgccatcgcctcggccggcgtggccttcgccgtcacccgctcctgcgccgagggcacctccaccatttgcggctgtgactcgcatcataaggggccgcctggcgaaggctggaagtggggcggctgcagcgaggacgctgacttcggcgtgttagtgtccagggagttcgcggatgcgcgcgagaacaggccggacgcgcgctcggccatgaacaagcacaacaacgaggcgggccgcacgactatcctggaccacatgcacctcaaatgcaagtgccacgggctgtcgggcagctgtgaggtgaagacctgctggtgggcgcagcctgacttccgtgccatcggtgacttcctcaaggacaagtatgacagcgcctcggagatggtagtagagaagcaccgtgagtcccgaggctgggtggagaccctccgggccaagtactcgctcttcaagccacccacggagagggacctggtctactacgagaactcccccaacttttgtgagcccaacccagagacgggttcctttggcacaagggaccggacttgcaatgtcacctcccacggcatcgatggctgcgatctgctctgctgtggccggggccacaacacgaggacggagaagcggaaggaaaaatgccactgcatcttccactggtgctgctacgtcagctgccaggagtgtattcgcatctacgacgtgcacacctgcaagtagggcaccagggcgctgggaaggggtgaagtgtgtggctgggcggattcagcgaagtctcatgggaagcaggacctagagccgggcacagccctcagcgtcagacagcaaggaactgtcaccagccgcacgcgtggtaaatgacccagacccaactcgcctgtggacggggaggctctccctctctctcatcttacatttctcaccctactctggatggtgtgtggtttttaaagaagggggctttctttttagttctctagggtctgataggaacagacctgaggcttatctttgcacatgtt

SEQ ID NO: 219819 - protein, 122 aa, Artificial Sequence
  derived and/or modified sequence
MKLLTGLVFCSLVLSVSSRSFFSFLGEAFDGARDMWRAYSDMREANYIGSDKYFHARGNYDAAKRGPGGAWAAEVISNARENIQRLTGRGAEDSLADQAANKWGRSGRDPNHFRPAGLPEKY

SEQ ID NO: 219820 - DNA, 369 bp, Artificial Sequence
  derived and/or modified sequence
atgaaactgcttacaggtttggtgttctgcagccttgtgttgtccgtgagcagtcgatcgttcttctccttccttggggaagcttttgacggtgctagggacatgtggagggcatatagcgatatgagggaggccaactatatagggagcgacaaatacttccacgcaaggggcaattatgacgccgcgaaaagaggcccagggggggcatgggcagctgaagtaatttcaaacgcccgagaaaatatccagcgtctgactggccgcggcgcagaggactcccttgccgatcaagccgccaacaaatggggaagaagcggccgagacccgaatcatttccgacctgcaggtctgcctgagaagtattag

SEQ ID NO: 219821 - DNA, 369 bp, Artificial Sequence
  derived and/or modified sequence
atgaaactcctgactggtctggtcttttgcagcctggtgctcagtgtcagctctaggagtttctttagcttcctgggcgaggcctttgatggcgcacgtgatatgtggagagcctacagcgacatgcgcgaggccaactacattggtagcgataaatattttcacgcaagaggaaattacgacgcagcaaaacgagggcctggcggagcgtgggcggctgaggtgatctcgaatgcaagagaaaacatacaacgtcttacgggccgcggggctgaggacagcctcgctgaccaggcagcaaacaagtgggggagatcaggtcgagatcctaatcacttcagacccgcaggattgccagagaaatattag

SEQ ID NO: 219822 - DNA, 369 bp, Artificial Sequence
  derived and/or modified sequence
atgaaactgctcacagggctggtcttttgcagccttgttttatcagtcagctctcgcagtttcttttcattccttggtgaggcttttgatggagcgagagatatgtggcgcgcttacagcgatatgcgagaggccaattatatcgggtctgataaatattttcacgcacgtggaaattatgacgcagcaaagcggggcccgggtggggcctgggccgcagaggtcatatcaaacgcgcgcgagaacatacagcgcctgaccggtaggggggcggaagactccttggctgaccaggcggccaataaatggggaagaagtggacgggaccctaatcactttcgtcctgctggactccctgaaaaatattag

SEQ ID NO: 219823 - DNA, 369 bp, Artificial Sequence
  derived and/or modified sequence
atgaagctgctgaccggcctggtgttctgcagcctggtgctgtctgtgagcagccgctccttcttctccttcctgggggaggcctttgatggagcccgggacatgtggagggcctacagcgacatgagggaggccaactacatcggcagtgacaagtacttccacgcccggggcaactatgatgctgccaagaggggccctggaggagcctgggccgctgaggtgatcagcaatgcccgggagaacatccagaggctgaccggcagaggagctgaggacagcctggccgaccaggccgccaacaagtggggccgcagcggccgggaccccaaccacttccggcctgctggcctgcctgagaagtactag

SEQ ID NO: 219824 - DNA, 369 bp, Artificial Sequence
  derived and/or modified sequence
atgaagctgctgaccggcctggtgttctgcagcctggtgctgagcgtttcctccaggagtttcttttcgttccttggagaagccttcgatggcgccagggacatgtggcgcgcctatagcgacatgcgcgaggcaaattacattggaagtgacaaatattttcatgctagggggaactatgatgcagccaaaaggggccctgggggcgcatgggcagccgaagtcataagtaacgccagagagaacatccagagactgactggcaggggtgctgaggactctcttgccgaccaagcagccaataagtggggaaggtcaggacgagatcccaaccacttccgtcctgctgggctgcccgaaaagtactag

SEQ ID NO: 219825 - DNA, 369 bp, Artificial Sequence
  derived and/or modified sequence
atgaagctgctgaccggcctggtgttctgcagcctggtgctgagcgtgtctagccggtcttttttctctttcctcggggaagcctttgacggggccagagacatgtggagggcttactccgatatgagagaggccaattacattggctcggataagtactttcacgcacgcggaaattacgacgccgccaagagggggccaggaggcgcttgggccgccgaagtgatctctaacgctcgcgaaaatatccaacgacttacaggacggggagcagaggacagcttagctgatcaagcagcaaataagtggggaaggtctggtagggatccaaaccacttcagacccgctggccttcctgaaaagtattag

SEQ ID NO: 219826 - DNA, 369 bp, Artificial Sequence
  derived and/or modified sequence
atgaagctgctgaccggcctggtgttctgcagcctggtgctgagcgtctcaagccggagttttttcagctttctaggggaggcctttgacggggctagagacatgtggcgggcctacagcgacatgagggaagccaactatataggtagtgacaaatactttcatgcccggggtaattacgatgccgccaagcgtggacccggcggtgcatgggcagctgaggtgatttcgaatgcaagggaaaacatccagagattaacaggacggggggcggaagattccctggccgaccaggcagccaataagtggggccggtccggaagagatcctaaccacttccggccggctggcctgcctgaaaagtactag

SEQ ID NO: 219827 - DNA, 369 bp, Artificial Sequence
  derived and/or modified sequence
atgaagctgctgaccggcctggtgttctgctccttagtgctctctgtgtcctcacgatctttttttagctttctgggcgaggcctttgacggggctagagacatgtggcgggcatatagcgatatgcgagaagctaattatataggatcagacaaatattttcatgccaggggcaactatgacgcagctaagaggggtccaggaggcgcttgggcggctgaggtgattagtaacgctagagagaacatccaacggttaactggcaggggggcagaggacagcctggccgatcaggccgctaataagtggggcaggtccgggagggacccaaaccacttccgcccagcagggctccccgagaagtattag

SEQ ID NO: 219828 - DNA, 369 bp, Artificial Sequence
  derived and/or modified sequence
atgaagctgcttactggactcgtcttttgctcactggtgctgtcagtgagcagtcgatccttcttctcctttcttggagaggccttcgacggtgcgagggatatgtggcgtgcctatagcgatatgcgcgaggctaactatattggttctgataagtactttcatgccagaggaaactatgacgccgcaaaacggggtcccggtggtgcatgggccgcagaagtaatctccaatgcaagagaaaatatccaacgcctgactggccgaggcgcagaggatagcctcgccgatcaggccgctaacaagtggggacggtctggcagggatccgaatcacttccgccctgctggtctgcctgaaaaatactag

SEQ ID NO: 219829 - DNA, 369 bp, Artificial Sequence
  derived and/or modified sequence
atgaagctgctaaccggcctagtgttttgtagtctggtgctatcagtgtctagtcggagttttttctctttcctcggagaggcattcgacggtgctagagatatgtggagggcgtactccgatatgcgcgaggccaactatattggctcagacaaatacttccacgcgaggggcaattatgacgctgctaagcggggtccgggaggtgcttgggctgcagaggtcatctctaacgcgagagagaacattcaaaggctgactggtaggggcgcagaggattctctggcggatcaagcagcaaataaatggggtcgttcgggtagagatcccaatcacttcagacccgcagggctgccggaaaaatattag

SEQ ID NO: 219830 - DNA, 563 bp, Artificial Sequence
  derived and/or modified sequence
tggcagacagggacccgcagctcagctacagcacagatcagcaccatgaagcttctcacgggcctggttttctgctccttggtcctgagtgtcagcagccgaagcttcttttcgttccttggcgaggcttttgatggggctcgggacatgtggagagcctactctgacatgagagaagccaattacatcggctcagacaaatacttccatgctcgggggaactatgatgctgccaaaaggggacctgggggtgcctgggctgcagaagtgatcagcaatgccagagagaatatccagagactcacaggccgtggtgcggaggactcgctggccgatcaggctgccaataaatggggcaggagtggcagagaccccaatcacttccgacctgctggcctgcctgagaaatactgagcttcctcttcactctgctctcaggagacctggctatgaggccctcggggcagggatacaaagttagtgaggtctatgtccagagaagctgagatatggcatataataggcatctaataaatgcttaagaggtggaatttgttgaaaca

SEQ ID NO: 219831 - DNA, 687 bp, Artificial Sequence
  derived and/or modified sequence
agggacccgcagctcagctacagcacagatcaggtgaggagcacaccaaggagtgatttttaaaacttactctgttttctctttcccaacaagattatcatttcctttaaaaaaaatagttatcctggggcatacagccataccattctgaaggtgtcttatctcctctgatctagagagcaccatgaagcttctcacgggcctggttttctgctccttggtcctgagtgtcagcagccgaagcttcttttcgttccttggcgaggcttttgatggggctcgggacatgtggagagcctactctgacatgagagaagccaattacatcggctcagacaaatacttccatgctcgggggaactatgatgctgccaaaaggggacctgggggtgcctgggctgcagaagtgatcagcaatgccagagagaatatccagagactcacaggccgtggtgcggaggactcgctggccgatcaggctgccaataaatggggcaggagtggcagagaccccaatcacttccgacctgctggcctgcctgagaaatactgagcttcctcttcactctgctctcaggagacctggctatgaggccctcggggcagggatacaaagttagtgaggtctatgtccagagaagctgagatatggcatataataggcatctaataaatgcttaagaggtg

SEQ ID NO: 219832 - DNA, 610 bp, Artificial Sequence
  derived and/or modified sequence
agacagggacccgcagctcagctacagcacagatcagttatcctggggcatacagccataccattctgaaggtgtcttatctcctctgatctagagagcaccatgaagcttctcacgggcctggttttctgctccttggtcctgagtgtcagcagccgaagcttcttttcgttccttggcgaggcttttgatggggctcgggacatgtggagagcctactctgacatgagagaagccaattacatcggctcagacaaatacttccatgctcgggggaactatgatgctgccaaaaggggacctgggggtgcctgggctgcagaagtgatcagcaatgccagagagaatatccagagactcacaggccgtggtgcggaggactcgctggccgatcaggctgccaataaatggggcaggagtggcagagaccccaatcacttccgacctgctggcctgcctgagaaatactgagcttcctcttcactctgctctcaggagacctggctatgaggccctcggggcagggatacaaagttagtgaggtctatgtccagagaagctgagatatggcatataataggcatctaataaatgcttaagaggtggaatt

SEQ ID NO: 219833 - DNA, 369 bp, Artificial Sequence
  derived and/or modified sequence
atgaagctgctgaccggcctggtgttctgcagcctggtgctgagcgtgagcagcagaagcttcttcagcttcctgggcgaggccttcgacggcgccagagacatgtggagagcctacagcgacatgagagaggccaactacatcggcagcgacaagtacttccacgccagaggcaactacgacgccgccaagagaggccccggcggcgcctgggccgccgaggtgatcagcaacgccagagagaacatccagagactgaccggcagaggcgccgaggacagcctggccgaccaggccgccaacaagtggggcagaagcggcagagaccccaaccacttcagacccgccggcctgcccgagaagtactag

SEQ ID NO: 219834 - protein, 280 aa, Artificial Sequence
  derived and/or modified sequence
MAPSGSLAVPLAVLVLLLWGAPWTHGRRSNVRVITDENWRELLEGDWMIEFYAPWCPACQNLQPEWESFAEWGEDLEVNIAKVDVTEQPGLSGRFIITALPTIYHCKDGEFRRYQGPRTKKDFINFISDKEWKSIEPVSSWFGPGSVLMSSMSALFQLSMWIRTCHNYFIEDLGLPVWGSYTVFALATLFSGLLLGLCMIFVADCLCPSKRRRPQPYPYPSKKLLSESAQPLKKVEEEQEADEEDVSEEEAESKEGTNKDFPQNAIRQRSLGPSLATDKS

SEQ ID NO: 219835 - DNA, 843 bp, Artificial Sequence
  derived and/or modified sequence
atggcccccagcggcagcctggccgtgcccctggccgtgctggtgctgctgctgtggggcgccccctggacccacggcagaagaagcaacgtgagagtgatcaccgacgagaactggagagagctgctggagggcgactggatgatcgagttctacgccccctggtgccccgcctgccagaacctgcagcccgagtgggagagcttcgccgagtggggcgaggacctggaggtgaacatcgccaaggtggacgtgaccgagcagcccggcctgagcggcagattcatcatcaccgccctgcccaccatctaccactgcaaggacggcgagttcagaagataccagggccccagaaccaagaaggacttcatcaacttcatcagcgacaaggagtggaagagcatcgagcccgtgagcagctggttcggccccggcagcgtgctgatgagcagcatgagcgccctgttccagctgagcatgtggatcagaacctgccacaactacttcatcgaggacctgggcctgcccgtgtggggcagctacaccgtgttcgccctggccaccctgttcagcggcctgctgctgggcctgtgcatgatcttcgtggccgactgcctgtgccccagcaagagaagaagaccccagccctacccctaccccagcaagaagctgctgagcgagagcgcccagcccctgaagaaggtggaggaggagcaggaggccgacgaggaggacgtgagcgaggaggaggccgagagcaaggagggcaccaacaaggacttcccccagaacgccatcagacagagaagcctgggccccagcctggccaccgacaagagctag

SEQ ID NO: 219836 - DNA, 843 bp, Artificial Sequence
  derived and/or modified sequence
atggccccctcaggttccctggctgtgccattagctgtcttggttttgctgctgtggggagcaccttggactcacggaagacgctcgaatgtgcgcgtgattacagatgagaactggcgggagttgttggagggggactggatgatagagttttacgccccatggtgccctgcgtgccagaacctgcagcctgagtgggagagctttgctgagtggggggaggatctagaagtgaatatcgctaaagtggacgtgacagagcagccggggctaagtgggcggttcatcatcaccgctctgcccacaatttaccactgtaaggacggcgagttccgtcgctatcaggggcccagaaccaagaaggactttattaattttattagcgataaggagtggaaaagcatcgagcctgtctcctcttggttcggtcctggtagcgtgctgatgtcttccatgtcagccctcttccagctgtccatgtggatccgcacctgtcataactattttatagaagatctgggcctgcctgtctggggctcttacactgtctttgctttggccacgctgttctctggactgttgctgggtctttgcatgatcttcgtggcagattgcctgtgcccttccaagcggaggcggccccagccatatccttatccatccaaaaagctactgtcagagagcgctcagccgcttaagaaagttgaagaggaacaggaagctgatgaggaggacgtatcagaagaggaagctgaatctaaggaaggtaccaataaggacttccctcagaacgcgatcagacagcgcagtcttggacccagcctcgctacagacaaatcttag

SEQ ID NO: 219837 - DNA, 843 bp, Artificial Sequence
  derived and/or modified sequence
atggcccccagcggcagcctggccgtgcccctggccgtgctggtgctgctgctgtggggcgccccctggacccatggaagaagaagcaatgtgcgggtcatcacagatgagaactggagggagctgctggagggggactggatgattgagttctacgccccctggtgcccagcctgccagaacctgcagcctgagtgggagagctttgctgagtggggcgaggacctggaggtgaacatcgccaaggtggatgtgacagagcagcccggcctgagcggccgcttcatcatcacagccctgcccaccatctaccactgcaaggatggagagttccgccgctaccagggccccaggaccaagaaggacttcatcaacttcatcagtgacaaggagtggaagagcattgagcctgtgtcctcctggtttggacctggctctgtgctgatgagctccatgtctgccctcttccagctgtccatgtggatccgcacctgccacaactacttcatcgaggacctgggcctgcctgtgtggggcagctacacagtgtttgccctggccaccctcttcagcggcctgctgctgggcctgtgcatgatctttgtggccgactgcctgtgccccagcaagagaagaagaccccagccctacccctaccccagcaagaagctgctgtctgagagcgcccagcccctgaagaaggtggaggaggagcaggaggctgatgaggaggatgtgtctgaggaggaggccgagagcaaggagggcaccaacaaggacttcccccagaatgccatccggcagaggagcctgggccccagcctggccacagacaagagctag

SEQ ID NO: 219838 - DNA, 843 bp, Artificial Sequence
  derived and/or modified sequence
atggcccccagcggcagcctggccgtgcccctggccgtgctggtgctgcttctgtggggtgccccatggacacacggcagaagatccaacgtgagagtgatcacggatgagaattggagggaactactggagggagattggatgatcgagttctacgccccgtggtgtccggcgtgtcaaaaccttcagcctgagtgggagtcttttgctgaatggggagaggacctagaggtgaatatagctaaagtggacgtgactgaacagccggggctatccggaaggtttatcatcaccgctttgccaaccatctatcactgtaaagacggggaattccgaagatatcagggacccaggacaaagaaggattttatcaactttattagcgacaaggagtggaaatccattgagccagtgagctcctggtttggtcctggctccgtgctgatgtctagcatgtccgcgctgttccagcttagcatgtggatccggacgtgccataattattttatcgaggatctcggcctgcccgtatggggaagctacactgtgttcgccttggccaccctgtttagcggcctgctgctgggactgtgcatgatttttgtggccgactgcctgtgcccctcaaaacgaaggcggcctcagccctacccatatccatcaaaaaagttgctgagcgaatccgcccagcccctgaaaaaggtcgaggaggagcaggaagccgatgaagaggacgtctcagaggaggaagccgaatccaaggaaggaaccaataaggatttcccgcagaatgcgatccgccaaagaagcttgggcccatcactggccacagataagagctag

SEQ ID NO: 219839 - DNA, 843 bp, Artificial Sequence
  derived and/or modified sequence
atggctccttctggctcactcgcagtgcctctcgccgtgctggtgctactgctgtggggggcaccatggacccatggccgaagatcaaacgtgcgggtgataactgatgagaattggcgggagctgctagaaggagactggatgatcgagttttacgcaccctggtgtcccgcatgtcagaatctccagccagaatgggaatccttcgccgaatggggagaagaccttgaagtgaacattgctaaagttgatgtaaccgagcaacctggcctgtcaggaaggttcataattacagccttgccgaccatttatcactgtaaggatggcgaattcaggcgttaccaggggccaagaaccaaaaaggatttcatcaactttatttccgacaaagaatggaaatctattgagcctgtctctagttggttcgggcctggatctgtgttgatgagcagcatgtcagcattgtttcagcttagcatgtggattaggacttgtcacaactactttattgaagatcttggacttccagtgtggggttcctacaccgtattcgcgctggccaccctgttctccggcctactacttggactgtgcatgatatttgtcgccgactgtctctgcccttctaagaggaggcgtccccagccctacccctatcccagcaaaaaattgttgtccgaaagcgcccagcccctgaaaaaagtggaggaagagcaggaggcggatgaggaggacgtctccgaggaagaagccgagagcaaggaaggcacaaacaaagatttcccgcagaatgcaatcagacagcggtccctaggccctagcctggccacagacaagtcttag

SEQ ID NO: 219840 - DNA, 2490 bp, Artificial Sequence
  derived and/or modified sequence
atgcgcattgagagtcctctagacaggcgctcctcgcagcaccgtagtgcgcttgcgctgagcagcccgcgagggcggaagtgggagctgcgaccgcgctccctgtgaggtgggcaagcggcgaaatggcgccctccgggagtcttgcagttcccctggcagtcctggtgctgttgctttggggtgctccctggacgcacgggcggcggagcaacgttcgcgtcatcacggacgagaactggagagaactgctggaaggagactggatgatagaattttatgccccgtggtgccctgcttgtcaaaatcttcaaccggaatgggaaagttttgctgaatggggagaagatcttgaggttaatattgcgaaagtagatgtcacagagcagccaggactgagtggacggtttatcataactgctcttcctactatttatcattgtaaagatggtgaatttaggcgctatcagggtccaaggactaagaaggacttcataaactttataagtgataaagagtggaagagtattgagcccgtttcatcatggtttggtccaggttctgttctgatgagtagtatgtcagcactctttcagctatctatgtggatcaggacttgccataactactttattgaagaccttggattgccagtgtggggatcatatactgtttttgctttagcaactctgttttccggactgttattaggactctgtatgatatttgtggcagattgcctttgtccttcaaaaaggcgcagaccacagccgtacccatacccttcaaaaaaattattatcagaatctgcacaacctttgaaaaaagtggaggaggaacaagaggcggatgaagaagatgtttcagaagaagaagctgaaagtaaagaaggaacaaacaaagactttccacagaatgccataagacaacgctctctgggtccatcattggccacagataaatcctagttaaattttatagttatcttaatattatgattttgataaaaacagaagattgatcattttgtttggtttgaagtgaactgtgacttttttgaatattgcagggttcagtctagattgtcattaaattgaagagtctacattcagaacataaaagcactaggtatacaagtttgaaatatgatttaagcacagtatgatggtttaaatagttctctaatttttgaaaaatcgtgccaagcaataagatttatgtatatttgtttaataataacctatttcaagtctgagttttgaaaatttacatttcccaagtattgcattattgaggtatttaagaagattattttagagaaaaatatttctcatttgatataatttttctctgtttcactgtgtgaaaaaaagaagatatttcccataaatgggaagtttgcccattgtctcaagaaatgtgtatttcagtgacaatttcgtggtctttttagaggtatattccaaaatttccttgtatttttaggttatgcaactaataaaaactaccttacattaattaattacagttttctacacatggtaatacaggatatgctactgatttaggaagtttttaagttcatggtattctcttgattccaacaaagtttgattttctcttgtatttttcttacttactatgggttacattttttatttttcaaattggatgataatttcttggaaacattttttatgttttagtaaacagtatttttttgttgtttcaaactgaagtttactgagagatccatcaaattgaacaatctgttgtaatttaaaattttggccacttttttcagattttacatcattcttgctgaacttcaacttgaaattgtttttttttttttttctttttggatgtgaaggtgaacattcctgatttttgtctgatgtgaaaaagccttggtattttacattttgaaaattcaaagaagcttaatataaaagtttgcattctactcaggaaaaagcatcttcttgtatatgtcttaaatgtatttttgtcctcatatacagaaagttcttaattgattttacagtctgtaatgcttgatgttttaaaataataacatttttatattttttaaaagacaaacttcatattatcctgtgttctttcctgactggtaatattgtgtgggatttcacaggtaaaagtcagtaggatggaacattttagtgtatttttactccttaaagagctagaatacatagttttcaccttaaaagaagggggaaaatcataaatacaatgaatcaactgaccattacgtagtagacaatttctgtaatgtccccttctttctaggctctgttgctgtgtgaatccattagatttacagtatcgtaatatacaagttttctttaaagccctctcctttagaatttaaaatattgtaccattgaagagtttggatgtgtaacttgtgatgccttagaaaaatatcctaagcacaaaataaacctttctaaccacttcatt

SEQ ID NO: 219841 - protein, 459 aa, Artificial Sequence
  derived and/or modified sequence
MPQLNGGGGDDLGANDELISFKDEGEQEEKSSENSSAERDLADVKSSLVNESETNQNSSSDSEAERRPPPRSESFRDKSRESLEEAAKRQDGGLFKGPPYPGYPFIMIPDLTSPYLPNGSLSPTARTYLQMKWPLLDVQAGSLQSRQALKDARSPSPAHIVSNKVPVVQHPHHVHPLTPLITYSNEHFTPGNPPPHLPADVDPKTGIPRPPHPPDISPYYPLSPGTVGQIPHPLGWLVPQQGQPVYPITTGGFRHPYPTALTVNASMSRFPPHMVPPHHTLHTTGIPHPAIVTPTVKQESSQSDVGSLHSSKHQDSKKEEEKKKPHIKKPLNAFMLYMKEMRAKVVAECTLKESAAINQILGRRWHALSREEQAKYYELARKERQLHMQLYPGWSARDNYGKKKKRKRDKQPGETNEHSECFLNPCLSLPPITDLSAPKKCRARFGLDQQNNWCGPCSL

SEQ ID NO: 219842 - protein, 596 aa, Artificial Sequence
  derived and/or modified sequence
MPQLNGGGGDDLGANDELISFKDEGEQEEKSSENSSAERDLADVKSSLVNESETNQNSSSDSEAERRPPPRSESFRDKSRESLEEAAKRQDGGLFKGPPYPGYPFIMIPDLTSPYLPNGSLSPTARTYLQMKWPLLDVQAGSLQSRQALKDARSPSPAHIVSNKVPVVQHPHHVHPLTPLITYSNEHFTPGNPPPHLPADVDPKTGIPRPPHPPDISPYYPLSPGTVGQIPHPLGWLVPQQGQPVYPITTGGFRHPYPTALTVNASMSRFPPHMVPPHHTLHTTGIPHPAIVTPTVKQESSQSDVGSLHSSKHQDSKKEEEKKKPHIKKPLNAFMLYMKEMRAKVVAECTLKESAAINQILGRRWHALSREEQAKYYELARKERQLHMQLYPGWSARDNYGKKKKRKRDKQPGETNEHSECFLNPCLSLPPITDLSAPKKCRARFGLDQQNNWCGPCRRKKKCVRYIQGEGSCLSPPSSDGSLLDSPPPSPNLLGSPPRDAKSQTEQTQPLSLSLKPDPLAHLSMMPPPPALLLAEATHKASALCPNGALDLPPAALQPAAPSSSIAQPSTSSLHSHSSLAGTQPQPLSLVTKSLE

SEQ ID NO: 219843 - DNA, 4004 bp, Artificial Sequence
  derived and/or modified sequence
aataatctccgctcccagactactccgttcctccggatttcgatccccctttttctatctgtcaatcagcgccgcctttgaactgaaaagctctcagtctaacttcaactcactcaaatccgagcggcacgagcacctcctgtatcttcggcttccccccccctttgctctttatatctgacttcttgttgttgttggtgttttttttttttttaccccccttttttatttattatttttttgcacattgatcggatccttgggaacgagagaaaaaagaaacccaaactcacgcgtgcagaagatctccccccccttcccctcccctcctccctcttttcccctccccaggagaaaaagacccccaagcagaaaaaagttcaccttggactcgtctttttcttgcaatattttttgggggggcaaaactttttgggggtgattttttttggcttttcttcctccttcatttttcttccaaaattgctgctggtgggtgaaaaaaaaatgccgcagctgaacggcggtggaggggatgacctaggcgccaacgacgaactgatttccttcaaagacgagggcgaacaggaggagaagagctccgaaaactcctcggcagagagggatttagctgatgtcaaatcgtctctagtcaatgaatcagaaacgaatcaaaacagctcctccgattccgaggcggaaagacggcctccgcctcgctccgaaagtttccgagacaaatcccgggaaagtttggaagaagcggccaagaggcaagatggagggctctttaaggggccaccgtatcccggctaccccttcatcatgatccccgacctgacgagcccctacctccccaacggatcgctctcgcccaccgcccgaacctatctccagatgaaatggccactgcttgatgtccaggcagggagcctccagagtagacaagccctcaaggatgcccggtccccatcaccggcacacattgtctctaacaaagtgccagtggtgcagcaccctcaccatgtccaccccctcacgcctcttatcacgtacagcaatgaacacttcacgccgggaaacccacctccacacttaccagccgacgtagaccccaaaacaggaatcccacggcctccgcaccctccagatatatccccgtattacccactatcgcctggcaccgtaggacaaatcccccatccgctaggatggttagtaccacagcaaggtcaaccagtgtacccaatcacgacaggaggattcagacacccctaccccacagctctgaccgtcaatgcttccatgtccaggttccctccccatatggtcccaccacatcatacgctacacacgacgggcattccgcatccggccatagtcacaccaacagtcaaacaggaatcgtcccagagtgatgtcggctcactccatagttcaaagcatcaggactccaaaaaggaagaagaaaagaagaagccccacataaagaaacctcttaatgcattcatgttgtatatgaaggaaatgagagcaaaggtcgtagctgagtgcacgttgaaagaaagcgcggccatcaaccagatccttgggcggaggtggcatgcactgtccagagaagagcaagcgaaatactacgagctggcccggaaggagcgacagcttcatatgcaactgtaccccggctggtccgcgcgggataactatggaaagaagaagaagaggaaaagggacaagcagccgggagagaccaatgaacacagcgaatgtttcctaaatccttgcctttcacttcctccgattacagacctgagcgctcctaagaaatgccgagcgcgctttggccttgatcaacagaataactggtgcggcccttgcaggagaaaaaaaaagtgcgttcgctacatacaaggtgaaggcagctgcctcagcccaccctcttcagatggaagcttactagattcgcctcccccctccccgaacctgctaggctcccctccccgagacgccaagtcacagactgagcagacccagcctctgtcgctgtccctgaagcccgaccccctggcccacctgtccatgatgcctccgccacccgccctcctgctcgctgaggccacccacaaggcctccgccctctgtcccaacggggccctggacctgcccccagccgctttgcagcctgccgccccctcctcatcaattgcacagccgtcgacttcttccttacattcccacagctccctggccgggacccagccccagccgctgtcgctcgtcaccaagtctttagaatagctttagcgtcgtgaaccccgctgctttgtttatggttttgtttcacttttcttaatttgccccccacccccaccttgaaaggttttgttttgtactctcttaattttgtgccatgtggctacattagttgatgtttatcgagttcattggtcaatatttgacccattcttatttcaatttctccttttaaatatgtagatgagagaagaacctcatgattctaccaaaatttttatcaacagctgtttaaagtctttgtagcgtttaaaaaatatatatatatacataactgttatgtagttcggatagcttagttttaaaagactgattaaaaaacaaaaagaaaaaaaaagcaattttgaagcagccctccagaaggagttggttctgtattatttgtattaaatacgagcttgcgaaccaatcattttacatctggtttttaaaccgtaagggcaccatgaatgcagtgccgttactttttttttttttttctgtgtgaaacaactcttattgtgatgttacttgttattgtttaaatgtacagaaacaaagggtaaaaatgtgttaatataccttgttccatggtgttgttcttttggggggaggggacgctactcaacacttaatagaatcacaacgctgttgggccagtagtatttattgctttagagattgcttgtcgtacctgtatgtcgtccctttttaaatatgttttcctttttcttgaaactgtataaagtttttttcccccttagcataagcatcttatatataacaactcatttgtacaaggtttttaagtttatatataaaatgtgtatatatatttttgtttcccctttttgacttttttttttctgtatgaaacccagatgtcaccaaatggacattaatagttgcattaaggatcagtagcattaacaaaagttgctttaaaagccattatgtaaaacaagacttgaaaatgagtgagggaattttagcgacactgtctgagcagcagtgggaaccatcttcgtttcccctttgaactcccagtgggatgccctaccctgcgcccttaggacccggactgaccgtgtacaaaactttacgtgccaaaattctcagtgaatttagctttctccctctttttgatgctgtaatttttgttcatcatgttttgctgtgatgttacataggtagatttgtatgtagttttaatgtcacctataacaaaatgtgtttggtagcagattgtccagaaagcattttaaatgaagaggtataaacccttaagggccaaaattctgtatattagattactcttaaacgaaaaaccagctgccgcttttatgtacacatattacatacgagtaggcagcagactttaaaaataaaaaaaacctaggcatgttgatgttgcaaaatgctgtataaagctgaaacctgttcattcagtgccattgtagttgacatgaagcgattgtaaaactgtctccgatttttctctggtttattaaaatgctaactataacattttttgtgaatactttgaatgtttcctaacagttgtgatgttactgttccgttttatgctcttattccaagttcatttttaatggtttggaagccatttttgtaatgaataaatgttcatgctgtacagtatctgtagcatgccgttctggattaataaaagcaacttagtatgtgcagataaa

SEQ ID NO: 219844 - DNA, 1791 bp, Artificial Sequence
  derived and/or modified sequence
atgccccagctgaacggcggcggcggcgacgacctgggcgccaacgacgagctgatcagcttcaaggacgagggcgagcaggaggagaagagcagcgagaacagcagcgccgagagagacctggccgacgtgaagagcagcctggtgaacgagagcgagaccaaccagaacagcagcagcgacagcgaggccgagagaagacccccccccagaagcgagagcttcagagacaagagcagagagagcctggaggaggccgccaagagacaggacggcggcctgttcaagggccccccctaccccggctaccccttcatcatgatccccgacctgaccagcccctacctgcccaacggcagcctgagccccaccgccagaacctacctgcagatgaagtggcccctgctggacgtgcaggccggcagcctgcagagcagacaggccctgaaggacgccagaagccccagccccgcccacatcgtgagcaacaaggtgcccgtggtgcagcacccccaccacgtgcaccccctgacccccctgatcacctacagcaacgagcacttcacccccggcaacccccccccccacctgcccgccgacgtggaccccaagaccggcatccccagacccccccacccccccgacatcagcccctactaccccctgagccccggcaccgtgggccagatcccccaccccctgggctggctggtgccccagcagggccagcccgtgtaccccatcaccaccggcggcttcagacacccctaccccaccgccctgaccgtgaacgccagcatgagcagattccccccccacatggtgcccccccaccacaccctgcacaccaccggcatcccccaccccgccatcgtgacccccaccgtgaagcaggagagcagccagagcgacgtgggcagcctgcacagcagcaagcaccaggacagcaagaaggaggaggagaagaagaagccccacatcaagaagcccctgaacgccttcatgctgtacatgaaggagatgagagccaaggtggtggccgagtgcaccctgaaggagagcgccgccatcaaccagatcctgggcagaagatggcacgccctgagcagagaggagcaggccaagtactacgagctggccagaaaggagagacagctgcacatgcagctgtaccccggctggagcgccagagacaactacggcaagaagaagaagagaaagagagacaagcagcccggcgagaccaacgagcacagcgagtgcttcctgaacccctgcctgagcctgccccccatcaccgacctgagcgcccccaagaagtgcagagccagattcggcctggaccagcagaacaactggtgcggcccctgcagaagaaagaagaagtgcgtgagatacatccagggcgagggcagctgcctgagcccccccagcagcgacggcagcctgctggacagccccccccccagccccaacctgctgggcagcccccccagagacgccaagagccagaccgagcagacccagcccctgagcctgagcctgaagcccgaccccctggcccacctgagcatgatgccccccccccccgccctgctgctggccgaggccacccacaaggccagcgccctgtgccccaacggcgccctggacctgccccccgccgccctgcagcccgccgcccccagcagcagcatcgcccagcccagcaccagcagcctgcacagccacagcagcctggccggcacccagccccagcccctgagcctggtgaccaagagcctggagtag

SEQ ID NO: 219845 - DNA, 1791 bp, Artificial Sequence
  derived and/or modified sequence
atgcctcaactgaatgggggaggcggtgacgacctcggagccaatgatgagctcatttcctttaaagacgagggagagcaggaagaaaaatccagcgaaaactcatcagccgagagagacttagctgatgttaaatcttccttggtgaatgagagcgagacaaaccagaattcgagtagcgactcggaagcagagagaagacctccccctagatccgagtcctttagagacaaaagtcgggaatctctagaggaggctgctaaaaggcaggatggaggcctttttaagggccccccttatcctggctatccctttatcatgattcccgacctgacgtccccttatctgccaaacggatctctttcacccactgcccggacctaccttcagatgaagtggccactcttggatgtgcaggccgggagcttgcagtcaaggcaggcccttaaagacgcaagaagtcctagcccagcccacatcgtcagcaataaggttcccgtggtgcagcatccgcatcacgttcacccgttaacaccactcatcacttatagcaatgagcacttcacgcccggtaatccccctccgcatctaccagcggacgtcgatcctaaaactggcatcccccggcccccccaccctcccgatatctccccttattatccgctctctccaggcacggtgggacaaatccctcatcccctgggatggttagtgccacaacaagggcagcccgtgtacccaattaccacgggggggttccggcacccctatccgacagcactgacagtgaacgcctctatgtctagattcccacctcacatggttcctccccatcacaccctgcacaccactggcatacctcacccagctattgtgaccccgacagtgaagcaggagagttcccagtcagacgtgggttcactacatagtagtaaacaccaggattcgaagaaggaggaggagaaaaaaaaaccacacattaaaaagccgctaaacgctttcatgttgtacatgaaagagatgagggccaaagtggtcgcggagtgcacccttaaagagagcgccgctatcaaccagattcttggcaggagatggcacgctctaagtagggaggaacaggccaaatactatgagctggctcgtaaagagagacagctgcatatgcagctctacccaggctggagcgcacgtgacaactacggaaagaagaaaaagagaaagcgcgataaacagcctggtgagacaaacgaacattctgagtgctttcttaatccctgcctgtccctgccacctattacagatctcagtgctcccaagaagtgccgggcccgatttggcctcgatcagcagaacaactggtgtggaccttgtcggcggaagaagaaatgcgttcggtatattcagggagaggggtcatgtctgagccccccgtcttcagacggctctctgcttgatagtccccccccgtcccctaatctgttaggcagtcccccaagagacgcaaaatcccagactgaacagacgcagcccttgtcattaagcctgaagccggacccactggctcacctatccatgatgccaccccctcccgcactgctccttgctgaggcgactcacaaggcatcagctctatgtccaaacggcgctctagacctccctcccgcggccctgcaacccgccgctccttcatcttctatcgcccaaccatccacatctagtctccactcccattcgtctctggccggaacgcagccccagcccctaagtctggttacaaaatcgctggaatag

SEQ ID NO: 219846 - DNA, 1791 bp, Artificial Sequence
  derived and/or modified sequence
atgccccagctgaatggaggcggcggagatgacctgggcgccaatgatgagctgatctccttcaaggatgaaggagagcaggaggagaagagcagcgagaacagcagcgctgagcgggacctggctgatgtgaagagcagcctggtgaatgaaagtgagaccaaccagaacagcagcagtgacagcgaggccgagcggcggcccccacccaggtctgagagcttccgggacaagagccgggagagcctggaggaggccgccaagaggcaggacggcggcctcttcaagggccccccctacccaggctaccccttcatcatgatcccagacctgaccagcccctacctgcccaacggcagcctgagccccacagcccggacctacctgcagatgaagtggcccctgctggatgtgcaggccggcagcctgcagagccggcaggccctgaaggatgcccggagccccagccctgcccacatcgtgagcaacaaggtgcctgtggtgcagcacccccaccacgtgcaccccctgacccccctcatcacctacagcaatgagcacttcaccccaggcaaccccccaccccacctgcctgcagatgtggaccccaagacaggcatcccccggcccccccaccccccagacatcagcccctactaccccctgagccctggcaccgtgggccagatcccccaccccctgggctggctggtgccccagcagggccagcctgtgtaccccatcaccaccggcggcttccgccacccctaccccacagccctgactgtgaatgcctccatgagccgcttccccccccacatggtgcccccccaccacaccctgcacaccaccggcatcccccacccagccatcgtgacccccaccgtgaagcaggagagcagccagagtgatgtgggcagcctgcacagcagcaagcaccaggacagcaagaaggaggaggagaagaagaagccccacatcaagaagcccctgaatgccttcatgctgtacatgaaggagatgagggccaaggtggtggccgagtgcaccctgaaggagagcgctgccatcaaccagatcctgggccgccgctggcacgccctgagccgggaggagcaggccaagtactatgagctggccaggaaggagcggcagctgcacatgcagctgtacccaggctggagcgcccgggacaactacggcaagaagaagaagaggaagagggacaagcagcccggggagaccaatgagcacagcgagtgcttcctgaacccctgcctgagcctgccccccatcacagacctgagcgcccccaagaagtgccgggccaggtttggcctggaccagcagaacaactggtgtggcccctgcaggaggaagaagaagtgtgtgcgctacatccagggcgagggcagctgcctgagcccccccagcagtgatggcagcctgctggacagccccccacccagccccaacctgctgggcagccccccaagagatgccaagagccagacagagcagacccagcccctgagcctgagcctgaagccagaccccctggcccacctgtccatgatgcctcctcctccagccctgctgctggccgaggccacccacaaggccagcgccctgtgccccaatggagccctggacctgcccccagctgccctgcagcctgctgcccccagcagcagcatcgcccagcccagcaccagcagcctgcacagccacagcagcctggccggcacccagccccagcccctgagcctggtgaccaagagcctggagtag

SEQ ID NO: 219847 - DNA, 1791 bp, Artificial Sequence
  derived and/or modified sequence
atgccccagctgaacggcggcggcggcgacgacctgggcgccaacgacgagctgataagttttaaggacgagggggaacaagaggagaaatcctcagaaaattcttctgcagaaagggacctggctgatgtgaagtcaagcctggttaatgagtccgaaacaaaccaaaattcgagctctgattcagaggccgaaagacggccacccccaaggagcgagtcatttcgcgataagtcacgtgaatctcttgaggaagccgcaaaacgacaggacgggggcctttttaaaggtccaccataccccgggtatcccttcattatgattccagacttaaccagtccctatttacccaacgggagcctgagtccaacggcccggacttacctgcagatgaaatggcccttgcttgatgtccaagcagggtccctccagagtagacaggcgctgaaggacgcccggtccccctcaccagcccacatcgtctccaataaagtgcccgttgtccagcatcctcatcacgtgcatcctctcaccccacttatcacttatagcaatgaacactttactccaggaaatccaccacctcatcttccagcagacgtggaccccaagaccgggattcccaggcctccccatccacccgatatctccccctattatcctttaagtccaggtactgttggccagatcccccacccattagggtggctggtgccccagcagggacagccggtgtacccaatcacgacgggcggcttcagacatccttatcccactgcactaactgtgaacgcatccatgtctaggttcccaccccatatggtgccccctcatcacactctccacactacgggcatccctcacccagccattgttactcccactgtaaagcaggaaagttctcaatcagacgtagggagcctacactcaagcaaacaccaagacagtaaaaaggaggaggagaagaaaaaaccccatatcaagaagccgctgaacgcctttatgctctacatgaaggagatgcgtgcaaaggtcgtggcagaatgcaccctgaaggaatctgcagctattaaccaaatcctgggaaggagatggcacgctctgtcccgcgaagagcaggctaagtactacgagttagccagaaaagaaaggcagttgcatatgcagctgtacccaggctggtctgcacgggataattatggaaagaagaaaaagagaaaaagagataaacagccgggcgagacaaatgagcacagcgagtgcttcctgaacccctgcctttccctgccccctattacggatctctccgctccaaaaaaatgccgagcacggtttggacttgatcaacagaataattggtgtggcccttgtagaagaaaaaagaaatgtgttcgttatattcagggagagggatcttgtctttcccctccatcctccgacggtagcctccttgacagtcctccccccagtcccaacctcctcgggagccctcctagggatgctaaatctcagaccgaacagacccaacccttatcgctctctctcaaacctgacccattagcccacttgtcaatgatgcccccgccacctgctctactcctcgctgaagcaacccataaggctagtgcgctgtgtccgaacggtgcgttggacttaccaccagcagcgctgcagccagctgccccttcatcctccattgcccaaccttctacatcaagtctgcattctcactcttccctggccggaacgcagccacagccgttgtccctggtgactaagtctctggaatag

SEQ ID NO: 219848 - DNA, 1791 bp, Artificial Sequence
  derived and/or modified sequence
atgccccagctgaacggaggaggtggcgatgacctgggagctaacgatgaactgatctcttttaaggacgaaggcgaacaggaggagaagagctcagaaaactcgagcgccgagcgtgaccttgccgatgtaaagtctagcctggtgaatgaaagcgagacaaatcagaattcgagctccgacagtgaggcagaaaggcggcctccgccacgttcagaatcttttagggacaagagtcgcgagagcttagaggaggccgcaaagagacaggatggagggttgttcaaagggccaccctacccagggtaccctttcatcatgataccagatttgacaagtccttacctgccaaacggctcactgagcccaactgccagaacgtacctgcagatgaagtggcccctcctagacgtgcaggcgggtagtcttcagtcccggcaagctctgaaagatgctcgatcccccagtccggctcacatcgtctctaacaaggtacctgtggtgcagcatccgcaccacgtgcaccctctgacacctctgatcacttatagcaacgagcattttaccccaggcaatcctcccccacacctgcccgcagacgtcgacccgaaaacaggaatcccgcgacccccacaccccccagatatctccccatactatcccctgtcacctggcacggtcgggcagataccccacccccttggttggctggtcccacagcagggccagccagtgtaccccatcactaccggcggtttcagacacccttaccccaccgctctgacagttaatgccagtatgtcaagatttcctcctcacatggtgccaccccatcacaccctacacactactgggattcctcaccccgcaattgtgacaccaacagtcaaacaagagagcagccagtcggatgtgggtagccttcactcatccaaacaccaagattccaaaaaggaggaggagaaaaaaaaaccccatataaaaaagcccctgaatgccttcatgttgtacatgaaagagatgagagcaaaggttgtcgccgaatgcactttaaaggaatcagccgcaataaaccagatcctgggcagaaggtggcacgctctcagtcgtgaggagcaagcaaaatattacgaattagccagaaaggaaagacagcttcacatgcagctgtatccaggatggagcgcccgagataactatgggaagaaaaagaaaaggaagcgggacaaacagccaggagagaccaacgagcacagcgagtgttttctaaacccctgcctcagcctcccccctatcacggacctcagcgctccaaaaaagtgtcgagcaaggttcggtctcgatcaacagaacaactggtgcggaccctgtcggcgaaagaagaagtgcgtgcgctacatccaaggcgagggttcctgcttgagcccccctagttccgacggttccctgcttgatagcccgcctcctagtcccaacctgctcggttcacccccaagagacgctaagtcacagaccgaacagacacagcctttatccctctctttgaagcccgaccctttggcccatctgagcatgatgccccctccacccgcactccttctcgccgaggccacccacaaggcaagcgctctttgccccaatggcgcactggacctcccacccgcagcactgcagccagctgctccatcaagctctattgcccagcctagcacatcctcccttcactcgcattccagtcttgcaggcacacaaccacaacctctgtccttggtcactaagagccttgagtag

SEQ ID NO: 219849 - DNA, 3802 bp, Artificial Sequence
  derived and/or modified sequence
ttttttttttttaccccccttttttatttattatttttttgcacattgatcggatccttgggaacgagagaaaaaagaaacccaaactcacgcgtgcagaagatctccccccccttcccctcccctcctccctcttttcccctccccaggagaaaaagacccccaagcagaaaaaagttcaccttggactcgtctttttcttgcaatattttttgggggggcaaaactttttgggggtgattttttttggcttttcttcctccttcatttttcttccaaaattgctgctggtgggtgaaaaaaaaatgccgcagctgaacggcggtggaggggatgacctaggcgccaacgacgaactgatttccttcaaagacgagggcgaacaggaggagaagagctccgaaaactcctcggcagagagggatttagctgatgtcaaatcgtctctagtcaatgaatcagaaacgaatcaaaacagctcctccgattccgaggcggaaagacggcctccgcctcgctccgaaagtttccgagacaaatcccgggaaagtttggaagaagcggccaagaggcaagatggagggctctttaaggggccaccgtatcccggctaccccttcatcatgatccccgacctgacgagcccctacctccccaacggatcgctctcgcccaccgcccgaacctatctccagatgaaatggccactgcttgatgtccaggcagggagcctccagagtagacaagccctcaaggatgcccggtccccatcaccggcacacattgtctctaacaaagtgccagtggtgcagcaccctcaccatgtccaccccctcacgcctcttatcacgtacagcaatgaacacttcacgccgggaaacccacctccacacttaccagccgacgtagaccccaaaacaggaatcccacggcctccgcaccctccagatatatccccgtattacccactatcgcctggcaccgtaggacaaatcccccatccgctaggatggttagtaccacagcaaggtcaaccagtgtacccaatcacgacaggaggattcagacacccctaccccacagctctgaccgtcaatgcttccatgtccaggttccctccccatatggtcccaccacatcatacgctacacacgacgggcattccgcatccggccatagtcacaccaacagtcaaacaggaatcgtcccagagtgatgtcggctcactccatagttcaaagcatcaggactccaaaaaggaagaagaaaagaagaagccccacataaagaaacctcttaatgcattcatgttgtatatgaaggaaatgagagcaaaggtcgtagctgagtgcacgttgaaagaaagcgcggccatcaaccagatccttgggcggaggtggcatgcactgtccagagaagagcaagcgaaatactacgagctggcccggaaggagcgacagcttcatatgcaactgtaccccggctggtccgcgcgggataactatggaaagaagaagaagaggaaaagggacaagcagccgggagagaccaatgaacacagcgaatgtttcctaaatccttgcctttcacttcctccgattacagacctgagcgctcctaagaaatgccgagcgcgctttggccttgatcaacagaataactggtgcggcccttgcaggagaaaaaaaaagtgcgttcgctacatacaaggtgaaggcagctgcctcagcccaccctcttcagatggaagcttactagattcgcctcccccctccccgaacctgctaggctcccctccccgagacgccaagtcacagactgagcagacccagcctctgtcgctgtccctgaagcccgaccccctggcccacctgtccatgatgcctccgccacccgccctcctgctcgctgaggccacccacaaggcctccgccctctgtcccaacggggccctggacctgcccccagccgctttgcagcctgccgccccctcctcatcaattgcacagccgtcgacttcttccttacattcccacagctccctggccgggacccagccccagccgctgtcgctcgtcaccaagtctttagaatagctttagcgtcgtgaaccccgctgctttgtttatggttttgtttcacttttcttaatttgccccccacccccaccttgaaaggttttgttttgtactctcttaattttgtgccatgtggctacattagttgatgtttatcgagttcattggtcaatatttgacccattcttatttcaatttctccttttaaatatgtagatgagagaagaacctcatgattctaccaaaatttttatcaacagctgtttaaagtctttgtagcgtttaaaaaatatatatatatacataactgttatgtagttcggatagcttagttttaaaagactgattaaaaaacaaaaagaaaaaaaaagcaattttgaagcagccctccagaaggagttggttctgtattatttgtattaaatacgagcttgcgaaccaatcattttacatctggtttttaaaccgtaagggcaccatgaatgcagtgccgttactttttttttttttttctgtgtgaaacaactcttattgtgatgttacttgttattgtttaaatgtacagaaacaaagggtaaaaatgtgttaatataccttgttccatggtgttgttcttttggggggaggggacgctactcaacacttaatagaatcacaacgctgttgggccagtagtatttattgctttagagattgcttgtcgtacctgtatgtcgtccctttttaaatatgttttcctttttcttgaaactgtataaagtttttttcccccttagcataagcatcttatatataacaactcatttgtacaaggtttttaagtttatatataaaatgtgtatatatatttttgtttcccctttttgacttttttttttctgtatgaaacccagatgtcaccaaatggacattaatagttgcattaaggatcagtagcattaacaaaagttgctttaaaagccattatgtaaaacaagacttgaaaatgagtgagggaattttagcgacactgtctgagcagcagtgggaaccatcttcgtttcccctttgaactcccagtgggatgccctaccctgcgcccttaggacccggactgaccgtgtacaaaactttacgtgccaaaattctcagtgaatttagctttctccctctttttgatgctgtaatttttgttcatcatgttttgctgtgatgttacataggtagatttgtatgtagttttaatgtcacctataacaaaatgtgtttggtagcagattgtccagaaagcattttaaatgaagaggtataaacccttaagggccaaaattctgtatattagattactcttaaacgaaaaaccagctgccgcttttatgtacacatattacatacgagtaggcagcagactttaaaaataaaaaaaacctaggcatgttgatgttgcaaaatgctgtataaagctgaaacctgttcattcagtgccattgtagttgacatgaagcgattgtaaaactgtctccgatttttctctggtttattaaaatgctaactataacattttttgtgaatactttgaatgtttcctaacagttgtgatgttactgttccgttttatgctcttattccaagttcatttttaatggtttggaagccatttttgtaatgaataaatgttcatgctgtacagtatctgtagcatgccgttctggattaataaaagcaacttagtatgtgcagataaa

SEQ ID NO: 219850 - protein, 916 aa, Artificial Sequence
  derived and/or modified sequence
MGKAAAPSRGGGCGGRSRGLSSLFTVVPCLSCHTAAPGMSASTSGSGPEPKPQPQPVPEPERGPLSEQVSEAVSEAVPRSEPVSETTSEPEPGAGQPSELLQGSRPGSESSSGVGAGPFTKAASEPLSRAVGSATFLRPESGSLPALKPLPLLRPGQAKTPLGVPMSGTGTTSSAPLALLPLDSFEGWLLKWTNYLKGYQRRWFVLGNGLLSYYRNQGEMAHTCRGTINLSTAHIDTEDSCGILLTSGARSYHLKASSEVDRQQWITALELAKAKAVRVMNTHSDDSGDDDEATTPADKSELHHTLKNLSLKLDDLSTCNDLIAKHGAALQRSLTELDGLKIPSESGEKLKVVNERATLFRITSNAMINACRDFLELAEIHSRKWQRALQYEQEQRVHLEETIEQLAKQHNSLERAFHSAPGRPANPSKSFIEGSLLTPKGEDSEEDEDTEYFDAMEDSTSFITVITEAKEDSRKAEGSTGTSSVDWSSADNVLDGASLVPKGSSKVKRRVRIPNKPNYSLNLWSIMKNCIGRELSRIPMPVNFNEPLSMLQRLTEDLEYHHLLDKAVHCTSSVEQMCLVAAFSVSSYSTTVHRIAKPFNPMLGETFELDRLDDMGLRSLCEQVSHHPPSAAHYVFSKHGWSLWQEITISSKFRGKYISIMPLGAIHLEFQASGNHYVWRKSTSTVHNIIVGKLWIDQSGDIEIVNHKTNDRCQLKFLPYSYFSKEAARKVTGVVSDSQGKAHYVLSGSWDEQMECSKVMHSSPSSPSSDGKQKTVYQTLSAKLLWKKYPLPENAENMYYFSELALTLNEHEEGVAPTDSRLRPDQRLMEKGRWDEANTEKQRLEEKQRLSRRRRLEACGPGSSCSSEEEKEADAYTPLWFEKRLDPLTGEMACVYKGGYWEAKEKQDWHMCPNIF

SEQ ID NO: 219851 - DNA, 2751 bp, Artificial Sequence
  derived and/or modified sequence
atgggaaaggccgccgcacccagcaggggcggagggtgcggcggtaggtcgcgcggcctgtccagtttgttcacggtcgttccatgcctgtcttgccacacggctgctccaggcatgtccgccagtacttccgggagtggtcctgagccaaaaccccagcctcagccagttccagaacctgagcgaggacctctgtctgaacaagtctccgaggcagtgagcgaagccgtacccaggagcgagcctgtgtctgaaaccaccagtgagcctgagcccggcgccggacagcccagcgaactgctgcagggcagtaggcccggcagtgagtctagcagcggagtcggggcagggccttttaccaaggcggcaagcgagccactcagcagagccgtcggctcagcgacatttctgagacccgaaagcggctccttgcctgccctgaaaccactcccacttctacggccaggacaggcaaaaaccccattgggtgtgcccatgagcgggaccggcacaaccagctccgctcccctcgccctattacccctggactctttcgaggggtggttactgaagtggacgaattatttgaaaggataccaaagacggtggtttgtgctgggcaatgggctcctgtcttactatcgaaatcaaggggagatggcacatacttgcagaggaactatcaacctttccaccgctcatattgacacagaggatagctgtggcatattattgaccagtggcgcgagatcatatcacctgaaggcaagctccgaggtggatagacagcagtggattactgctcttgagctagccaaggctaaggccgttagggttatgaacactcattctgacgatagtggagacgacgacgaggcaactacgccagctgacaagtcagagctccaccacaccttgaagaatctctctcttaaattagacgatctctcaacctgcaatgatctgattgccaaacacggcgctgccctacagcgcagccttacagagcttgatggcctcaagattccttctgaaagtggcgagaaactgaaggtggtgaatgaaagagctactctctttcggataacatctaatgctatgatcaatgcatgtcgggacttcttagagctggctgagattcattcacgcaaatggcagagggccttgcagtacgagcaagagcagcgagtgcacttggaggagaccattgaacaactggccaagcagcacaactccttagaacgtgcatttcactccgctcccggcagacctgccaatccgagcaagtctttcatcgagggaagcttactgacccccaagggggaggacagcgaggaggacgaagacacagagtacttcgatgctatggaggacagcacatcatttattactgtaataactgaggccaaagaggactcccggaaagcagagggatccacgggcacatctagtgtagactggtcctctgccgacaacgtgctggacggagcctcacttgttcctaagggatcatccaaggtgaagcggagggtgcggatcccgaacaagcccaattacagtttaaacttgtggagcatcatgaaaaattgcatcggccgggagttgagtaggattcctatgcccgtaaattttaacgagcccctcagcatgcttcagaggttgaccgaagatctcgagtaccatcacttgttagacaaagccgttcattgcacaagctcagttgagcagatgtgcctggttgccgcatttagtgtgagctcctacagtactaccgtgcatcgcattgccaagcctttcaatccgatgctgggcgaaacttttgagttggatagacttgacgacatggggctaagatccttgtgtgaacaggtcagccatcacccccccagtgcagctcactatgtgttcagcaaacacgggtggagtctgtggcaggagattacaatatcgagtaagttccgaggcaaatacatcagtatcatgcccctgggggctatacacctagaattccaggcatccggaaatcactatgtctggcgaaaaagcacttccaccgtccacaatattatagtgggaaagctttggattgaccagtccggagatattgagattgtgaaccataaaaccaatgaccgctgccagttgaagttcctcccatatagttacttttccaaagaggccgcccggaaagtaaccggggtggtctctgatagccagggaaaagcgcactacgtactgagcggctcctgggacgagcagatggagtgcagcaaggtgatgcacagctcaccatcaagcccttcgagcgacggaaagcagaaaacagtgtatcagacactttctgctaagctactgtggaagaaataccctctgcccgaaaacgcagagaatatgtactacttttcagaactcgcactgacgctgaatgagcacgaagagggcgttgcccctaccgattcacgtctccgcccagaccagcggctgatggaaaagggaaggtgggacgaggctaacacggaaaagcaacgcctggaagagaaacaaaggctatctcgcagaagacgcctggaggcttgtggtcccggctcctcatgttcttcggaggaggaaaaagaggctgacgcctacaccccgctctggttcgaaaagcgccttgaccccctgaccggtgagatggcatgtgtctataagggcggctattgggaagcaaaggaaaagcaggactggcacatgtgtcctaacatcttttag

SEQ ID NO: 219852 - DNA, 2751 bp, Artificial Sequence
  derived and/or modified sequence
atgggcaaggctgctgcccccagccggggcggcggctgcggcggccgcagccggggcctgagcagcctcttcaccgtggtgccctgcctgagctgccacacagctgcccctggcatgtctgccagcaccagcggcagcggccctgagcccaagccccagccccagcctgtgcctgagcctgagcggggccccctgtctgagcaggtgtctgaggccgtgtctgaggccgtgcccaggtctgagcctgtgtctgagaccaccagcgagcctgagcccggggccggccagcccagcgagctgctgcagggcagccggcccggcagcgagagcagcagcggcgtgggcgccggccccttcaccaaggccgccagcgagcccctgagcagagctgtgggcagcgccaccttcctgcggcctgagagcggcagcctgcctgccctgaagcccctgcccctgctgcggcccggccaggccaagacccccctgggcgtgcccatgtctggaacaggcaccaccagcagcgcccccctggccctgctgcccctggacagctttgagggctggctgctgaagtggaccaactacctgaagggctaccagaggcgctggtttgtgctgggcaatggcctgctgagctactacagaaaccagggcgagatggcccacacctgccggggcaccatcaacctgagcacagcccacatcgacacagaggacagctgtggcatcctgctgaccagcggggcccggagctaccacctgaaggccagcagcgaggtggaccggcagcagtggatcacagccctggagctggccaaggccaaggctgtgcgggtgatgaacacccacagtgatgattctggagatgatgatgaggccaccaccccagctgacaagtctgagctgcaccacaccctgaagaacctgagcctgaagctggatgacctgagcacctgcaatgacctgattgccaagcacggggccgccctgcagaggagcctgacagagctggatggcctgaagatccccagcgagagcggggagaagctgaaggtggtgaatgaaagagccaccctcttccgcatcaccagcaatgccatgatcaatgcctgccgggacttcctggagctggccgagatccacagcaggaagtggcagagggccctgcagtatgagcaggagcagagggtgcacctggaggagaccatcgagcagctggccaagcagcacaacagcctggagcgggccttccacagcgcccctggccggcctgccaaccccagcaagagcttcatcgagggcagcctgctgacccccaagggggaggacagcgaggaggatgaggacacagagtactttgatgccatggaggacagcaccagcttcatcaccgtcatcacagaggccaaggaggacagcaggaaggccgagggcagcacaggcaccagctctgtggactggagcagcgctgacaacgtgctggatggagccagcctggtgcccaagggcagcagcaaggtgaagagaagagtgcgcatccccaacaagcccaactacagcctgaacctgtggagcatcatgaagaactgcatcggccgggagctgagccgcatccccatgcctgtgaacttcaatgagcccctgtccatgctgcagaggctgacagaggacctggagtaccaccacctgctggacaaggctgtgcactgcaccagctctgtggagcagatgtgcctggtggccgccttctctgtgtcctcctacagcaccaccgtgcacagaattgccaagcccttcaaccccatgctgggggagacctttgagctggaccggctggatgacatgggcctgcggagcctgtgtgagcaggtgagccaccacccccccagcgctgcccactacgtgttcagcaagcacggctggagcctgtggcaggagatcaccatcagcagcaagttccggggcaagtacatcagcatcatgcccctgggcgccatccacctggagttccaggccagcggcaaccactacgtgtggaggaagagcaccagcacagtgcacaacatcatcgtgggcaagctgtggattgaccagagcggggacatcgagatcgtgaaccacaagaccaatgaccgctgccagctgaagttcctgccctacagctacttcagcaaggaggccgccaggaaggtgactggagtggtgtctgacagccagggcaaggcccactacgtgctgagcggctcctgggatgagcagatggagtgcagcaaggtgatgcacagcagccccagcagccccagcagtgatggcaagcagaagacagtgtaccagaccctgagcgccaagctgctgtggaagaagtaccccctgcctgaaaatgctgagaacatgtactacttcagcgagctggccctgaccctgaatgaacatgaggagggcgtggcccccacagacagccggctgcggccagaccagaggctgatggagaagggccgctgggatgaggccaacacagagaagcagaggctggaggagaagcagaggctgagcagaagaagaaggctggaggcctgtggccctggcagcagctgcagcagcgaggaggagaaggaggctgatgcctacacccccctgtggtttgagaagaggctggaccccctgactggagagatggcctgtgtgtacaagggcggctactgggaggccaaggagaagcaggactggcacatgtgccccaacatcttctag

SEQ ID NO: 219853 - DNA, 2751 bp, Artificial Sequence
  derived and/or modified sequence
atgggcaaggccgccgcccccagccggggcggcggctgcggcggccgtagccgtggactaagttctctcttcacggtcgtcccatgtctctcctgtcacacagccgcgcctggtatgtcggcctctacgagcgggtccgggcccgagccaaaaccacagccgcagcccgtaccagagcctgagcgcggcccgctgtccgaacaggtatcagaggcagttagtgaagcagttcctcggtccgaaccagtcagcgaaactacatctgaacctgagcccggagctgggcagccaagtgagctgctgcagggctctaggccaggttccgaaagttcttctggagttggagctggccctttcacaaaggccgcaagtgaacccctgtctcgggcggtgggttccgccacttttctgcgcccggagtcaggctccctccccgccctgaaacctctccctctcctgaggccagggcaagccaaaacccccctgggggtgcccatgagcgggacaggcacaacatctagcgccccactcgccctattaccactagatagttttgagggctggctgcttaagtggacaaattaccttaaagggtatcagcggcggtggtttgtgctcgggaacggcctgctttcctactatagaaatcagggggagatggcgcacacatgccgggggactataaatctgagcactgcgcatatcgacacagaggacagctgcggaatcttgttgacctccggggcgcgatcatatcaccttaaggcctccagcgaagtcgaccggcagcagtggatcaccgcactcgagctggctaaggcgaaggcggtccgggtaatgaacacgcacagtgatgatagcggtgatgacgatgaggccacaaccccggccgataagtctgagctgcaccacactctgaagaatctctcactcaagctggatgatctctccacgtgtaacgacttgattgcgaagcatggcgcagcacttcagcgatccctgaccgagctagacgggctgaagatcccttccgagagcggcgagaagttgaaagttgttaacgaaagggccaccctgttccgcataacctccaacgccatgataaatgcttgtagggactttctggagctggccgaaatccacagtagaaaatggcaaagagccctgcagtacgaacaagagcagcgggtgcacctcgaggagacaatcgagcagctagcaaaacagcataactccctcgagagggccttccattctgctcccggccgaccagctaaccccagcaagtcattcatcgagggatccctgcttacgccaaaaggtgaggatagcgaggaggatgaggacacagagtacttcgacgctatggaggacagtacttcatttatcacagtgatcactgaggctaaagaggatagtaggaaggcggagggctctacgggcacctcttccgttgactggagctcggccgataatgtactggacggtgcttcactggtgcccaagggctcttctaaggtgaagagacgagtgcgcataccaaataaaccgaattacagtttaaatctgtggtccataatgaagaattgcatcggtcgcgaattgagtaggattccaatgccagttaatttcaacgagcctctcagtatgctgcaaagacttacagaagacctggagtaccaccaccttctggataaagctgtccactgcacctccagcgtggaacagatgtgtttggtggctgcttttagtgtaagttcttatagtactacagtccatagaattgctaagccgttcaacccgatgctcggcgagactttcgagctggatcgcctcgacgatatgggtctaaggagcctttgtgagcaggtttcccaccatccaccgagcgcagctcactacgtgttttccaagcatggttggtccttgtggcaggaaatcacgatctcgtcaaagttccggggcaagtacatcagtattatgcctctcggagctatacatctggagttccaagcgagtggaaatcactatgtgtggcggaagtctacatctacagtgcacaatataatcgtgggcaagctttggattgaccagtctggcgacattgagatcgttaatcacaagaccaatgataggtgtcagctcaaattcttgccctactcgtatttctccaaggaagcggctcgcaaggtgaccggcgtggtgtccgatagccagggcaaagcccactatgtgctgtcaggaagttgggacgagcaaatggagtgtagtaaggtgatgcatagttctcccagtagcccttcaagcgatggcaaacagaagactgtgtatcagactctgtccgcgaagctcctttggaagaaataccccctgcctgagaacgcagaaaacatgtattacttcagcgaactcgccttgaccctgaatgagcacgaagaaggtgttgcccctaccgattcccgccttcggccagaccagagattgatggagaaaggtaggtgggacgaagctaacaccgaaaaacaacggctcgaagagaaacagagactctcgcgccggcgcaggctggaagcatgcgggccgggatcctcgtgcagtagtgaagaggagaaggaggcagacgcctacactcccttgtggtttgagaagcgtttagaccccttgacaggcgaaatggcatgtgtatacaagggaggctactgggaagccaaggaaaagcaggactggcacatgtgccccaacatcttctag

SEQ ID NO: 219854 - DNA, 4340 bp, Artificial Sequence
  derived and/or modified sequence
gcccccgcctcgcgccgcgcgcacgtgactgcgcccccggccccgcccccggcctgccccccgcccccactggccgctcggccgcgcgcgggtcggccggctctatggggaaagcggcggctccgagccgaggcggcggctgtggcggccgctcccgcgggctctcgtcgctgttcacggttgtcccctgcctgtcgtgccacacggcggcgccgggcatgagcgcttccacgtccggctccgggccggagcccaagccccagccccagcccgtgcccgaaccggagcggggaccgctgtcagaacaggtgtcggaggcagtttcggaggcagtgccaagatcggaacctgtgtccgagacgacgtctgagccggagccaggggctgggcagccatcggaactgctgcaggggtcgcggccggggtcagagtcaagctcaggtgtaggggctgggcccttcactaaggccgcatcggagccgctctcccgggcggtggggagcgcgacctttctcagacccgagtcaggatcgctgccagcgttaaagcccctgcctcttctgcgaccaggacaggcgaagactcctcttggggttccaatgtcggggactggcacgacctccagtgccccactggccttactgcctctggacagcttcgagggctggcttctcaagtggaccaactatctgaagggctaccagcgccgctggttcgtgctgggcaatggtttgctctcttactacagaaatcagggtgaaatggcccacacgtgccgtggaaccatcaacctgtccaccgcgcacattgacacggaggactcttgtggtatcttgctgaccagtggggccaggagctaccacctcaaggccagctcagaggtggaccggcagcagtggatcaccgccctggagctggccaaggccaaggctgtccgcgtgatgaacactcattcagatgactctggggacgacgacgaggctaccaccccagccgacaagagcgagctgcaccacaccctgaagaatctttccctgaagttagatgacctcagcacgtgcaatgacctcatcgccaagcacggcgctgcactccagcgctccctgacagagctggacggcctcaagatcccatctgagagtggggagaagctgaaggtggtgaatgagcgggccaccctcttccgcatcacatccaatgctatgatcaacgcctgcagggacttcttggaactagcagagatacacagtcggaaatggcagcgggcactgcagtatgagcaggagcagcgcgtgcacttggaggaaaccattgagcagctggcgaagcagcacaacagcctcgagcgggccttccacagtgcccctggccggccggccaacccctccaagagcttcattgagggaagcctcttgactcccaaaggagaggacagtgaggaagatgaagataccgagtactttgatgccatggaagactccacatccttcatcaccgtgatcaccgaggccaaggaagacagcagaaaagctgaaggtagcaccgggacaagttccgtggactggagctcagcagacaatgtactagatggtgcctcgctcgtgcccaagggttcatccaaagtcaagaggcgagtccgcattcccaacaagcccaactacagccttaacctctggagcatcatgaagaactgcatcggccgggagctctccaggatccccatgccggtgaacttcaatgagcccctgtccatgctccagcggctgacagaggacctggagtaccaccacctgctggacaaggcagtgcactgcaccagctcagtggagcagatgtgcctggtggccgccttctctgtgtcctcctactccaccacagtgcaccgcatcgccaagcccttcaaccccatgctgggggagaccttcgagctggaccgcctcgacgacatgggcctgcgctccctctgtgagcaggtgagccaccaccccccctcagctgcgcactacgtgttctccaagcatggctggagcctctggcaggagatcaccatctccagcaagttccggggaaaatacatctccatcatgccgctaggtgccatccacttagaattccaggccagtgggaatcactacgtgtggaggaagagcacctcaactgttcacaacatcatcgtgggcaagctctggatcgaccagtcaggggacatcgagattgtgaaccataagaccaatgaccggtgccagctgaagttcctgccctacagctacttctccaaagaggcagcccggaaggtgacaggagtggtgagtgacagccagggcaaggcccattacgtgctgtccggctcgtgggatgaacaaatggagtgctccaaggtcatgcatagcagtcccagcagccccagctctgacgggaagcagaagacagtgtaccagaccctgtcagccaagctgctgtggaagaagtacccgctgccggagaacgcggagaacatgtactacttctcagagctggccctgaccctcaacgagcacgaggagggcgtagcgccaaccgacagccgcctgcggcccgaccagcggctgatggagaagggccgttgggacgaggccaataccgagaagcagcggctggaggagaagcagcgcctgtcgcggcgccggcggctggaggcctgcgggccgggcagcagctgcagctcggaggaagagaaggaggcggatgcctacacgccactgtggtttgagaagaggctggatccgctgaccggggagatggcctgtgtgtacaagggcggctactgggaggccaaggagaagcaagactggcatatgtgccccaacatcttctgagcgccacccttgcaacaaatacaggcgcctgcacagcctggcccacctgttcattaatgcactcaatttagtactgaatggtctttctcccagcccattcccagcccttcctatttcctttcctattttttttttctccccacactttcttgggactcccaccttggaaggaggaagggctgacctgggttctctccagcccccaggtgcgccgggtcacccgtgccccttcattatggacctgggccctaccggaacccctgccccagttaccacaactcaggccggctggcccgggccatgggctgcgcaaatcaccagcccccaacccagggaggaactggcccctcctagggagcctcttcgacttttttagaaaaatgatctccatttctttccagccatgatgtttagtaaatatttttagtaccgcacttagcagacagctttccaagtgtgctttcttgccacaaaagtgtcctggcaagagccccttatttttaagacatcaggaagccagaccgctttgagttgggagaattttgtagctcaacatatcaagtcctcgatggtatctgagctgcccacacccccacctgccaaggccccacagagcccaaaacagaagggggctgccccagcccagcagagcacagagtttctggagctcccatccacagatgcaggagggggtactgatggtaacccccatgtggatttgagggcagcagtccctggcctcaccctagccagcctgggtggctccctagccccaagaggccaggaagggctggaaggcagggcctgcaggtgctccccgccctgagacccaggccccaaatcagcaataatgaacaaacccttggcccagcctgggctggtgacctgggcaccagagaccttgcatccctcctcatcctaggaggcccctaggggtgccccatctcagtgtcccctgaactctttatttgcctaatttatatatatatatatgagatatataaatatatataaaatagctattttgcttaaatttctacagtatgtaaaagtgaaaaaatgatgaagacgggtgcacctgtctgagtttggccctcatgtgagctgtgcccttccctctcctcatgcccccttccagcggcttctgccaaccatggggggctggaccaccatggccactgacccagcccctcagaatcccacactccaatcctttccatttcagtttagtcctaaaagttcatcacagggtctttctttctactccaggactggttttgtttttatatatataaaaaaaaaaagtgaaaacaccaatgtgtgaaatgccttacaatgcccactggagaggcggggcggggtggggcaggatggccccactggggctcctacagagctgtggaatgtacctctccccaacactgttttgttagcgagcaccttttgaccagtaataaaaaaccttggctttggagttttccactg

SEQ ID NO: 219855 - DNA, 2751 bp, Artificial Sequence
  derived and/or modified sequence
atgggtaaagccgctgcaccctcaagaggtgggggatgtgggggtagaagtaggggccttagcagtctctttactgtggtcccctgtctgtcatgccataccgctgccccaggtatgagcgcctcaacgagcggcagcggtccagaacctaaaccgcagccccagcccgtaccggagcctgaacgcggtcccttgtctgagcaagtatcggaggccgtgtccgaggctgtaccacggagtgagcctgtgtcagagacgacttcagaaccagaacccggagctggtcagccttcagagctcttacaagggtcacgccctggaagcgaatcctcaagcggagttggtgccggaccattcaccaaagccgcatccgagcccctcagtcgcgctgtgggcagcgctacctttctgagaccagaaagcggctccctccccgcacttaaaccactgcctctactgagaccaggccaggccaaaacacccttaggagtgccaatgagcggtaccggaaccacgtcctccgcaccactggcccttcttccactcgattctttcgaaggatggctcctgaagtggacaaactacttaaagggctatcagaggcggtggttcgtgctgggaaacggtttgctgagttattataggaaccagggcgaaatggcacacacatgtagaggaacaattaatctgtcgaccgcccatattgataccgaggatagctgcgggattctgctcacatccggagccagatcctaccatctcaaggcatcctcagaggttgacagacagcagtggattaccgctttggaacttgcgaaggccaaagcggtccgagtgatgaatacccatagtgacgattctggggacgatgacgaggccacgacaccggcagataagtccgaactccatcatacactgaagaacctctcactgaagctggacgacttgtccacctgcaacgatcttattgccaagcatggggctgcattgcagcgctcactgacagagctggacggactcaaaatcccaagcgaaagcggtgagaaattgaaggttgtgaacgagcgcgctacgctgtttcggatcacaagcaacgctatgattaatgcttgtagggatttcctcgagctggccgagatccactcccgaaaatggcaacgtgctttgcagtacgagcaggaacagagagttcacttggaggaaaccatcgaacagcttgccaagcagcataattcacttgaacgagctttccattcggccccaggacgccctgccaacccaagcaaaagcttcattgaaggttcattgttaactccaaagggagaggattccgaggaagatgaagacactgagtactttgacgccatggaagacagtacttctttcattaccgtcattacagaggctaaagaggactcccggaaggcggaagggtctacggggacatccagcgtggactggtcaagtgcagacaacgtgttggatggtgcatctctggtccctaaagggagctccaaggttaagagacgagtgcggatccctaacaaaccaaattactcactaaatctttggagcataatgaagaattgtataggaagggagctgtctagaatccctatgcccgtaaactttaatgaacctctctcaatgcttcaaaggttaacggaagatctggagtatcatcatttgctggataaagcagtgcactgcacgtctagcgtggagcaaatgtgcctagtggcagcattctccgttagttcctattctacaacggttcaccgcatcgccaaaccttttaaccccatgctaggcgaaacttttgaattagacagactggatgatatgggtctgcgaagtctatgcgaacaagttagtcaccacccaccgtcagccgcacattatgtgttcagcaagcacggatggagcttgtggcaggaaataactattagcagcaagtttagaggcaagtatatttctatcatgccattgggcgctatacacctagaatttcaggcctctggaaaccactatgtgtggcggaagtctacgagcacagtccacaatattattgtgggaaagctctggattgatcaatccggtgatatcgagattgtaaaccataagactaacgaccgatgtcagctgaaattcttaccatattcgtatttttccaaggaagcggctcgcaaagtcacaggcgtggtttctgactcacagggcaaagcccactacgtcctgtcgggctcttgggatgaacagatggaatgttctaaagtgatgcattcaagtccctctagtccttctagcgatgggaaacaaaaaaccgtttaccagacattaagcgcaaaactcctgtggaagaaatacccactgcctgaaaacgccgagaacatgtattatttttccgagctagctctgactctgaacgagcatgaggaaggagtcgcccctaccgatagcaggctacggcctgatcagagattgatggagaagggtcggtgggacgaggccaacactgagaagcagagacttgaagagaagcaacggctgagcaggagacgcaggctagaagcttgtggcccaggctctagctgttcatcagaagaagagaaagaggctgacgcgtatactcctttgtggtttgagaaacggttggaccctttaaccggcgagatggcttgtgtgtataaggggggttattgggaggcaaaagaaaagcaggactggcacatgtgcccaaatatcttctag

SEQ ID NO: 219856 - DNA, 2751 bp, Artificial Sequence
  derived and/or modified sequence
atgggcaaggccgccgcccccagcagaggcggcggctgcggcggcagaagcagaggcctgagcagcctgttcaccgtggtgccctgcctgagctgccacaccgccgcccccggcatgagcgccagcaccagcggcagcggccccgagcccaagccccagccccagcccgtgcccgagcccgagagaggccccctgagcgagcaggtgagcgaggccgtgagcgaggccgtgcccagaagcgagcccgtgagcgagaccaccagcgagcccgagcccggcgccggccagcccagcgagctgctgcagggcagcagacccggcagcgagagcagcagcggcgtgggcgccggccccttcaccaaggccgccagcgagcccctgagcagagccgtgggcagcgccaccttcctgagacccgagagcggcagcctgcccgccctgaagcccctgcccctgctgagacccggccaggccaagacccccctgggcgtgcccatgagcggcaccggcaccaccagcagcgcccccctggccctgctgcccctggacagcttcgagggctggctgctgaagtggaccaactacctgaagggctaccagagaagatggttcgtgctgggcaacggcctgctgagctactacagaaaccagggcgagatggcccacacctgcagaggcaccatcaacctgagcaccgcccacatcgacaccgaggacagctgcggcatcctgctgaccagcggcgccagaagctaccacctgaaggccagcagcgaggtggacagacagcagtggatcaccgccctggagctggccaaggccaaggccgtgagagtgatgaacacccacagcgacgacagcggcgacgacgacgaggccaccacccccgccgacaagagcgagctgcaccacaccctgaagaacctgagcctgaagctggacgacctgagcacctgcaacgacctgatcgccaagcacggcgccgccctgcagagaagcctgaccgagctggacggcctgaagatccccagcgagagcggcgagaagctgaaggtggtgaacgagagagccaccctgttcagaatcaccagcaacgccatgatcaacgcctgcagagacttcctggagctggccgagatccacagcagaaagtggcagagagccctgcagtacgagcaggagcagagagtgcacctggaggagaccatcgagcagctggccaagcagcacaacagcctggagagagccttccacagcgcccccggcagacccgccaaccccagcaagagcttcatcgagggcagcctgctgacccccaagggcgaggacagcgaggaggacgaggacaccgagtacttcgacgccatggaggacagcaccagcttcatcaccgtgatcaccgaggccaaggaggacagcagaaaggccgagggcagcaccggcaccagcagcgtggactggagcagcgccgacaacgtgctggacggcgccagcctggtgcccaagggcagcagcaaggtgaagagaagagtgagaatccccaacaagcccaactacagcctgaacctgtggagcatcatgaagaactgcatcggcagagagctgagcagaatccccatgcccgtgaacttcaacgagcccctgagcatgctgcagagactgaccgaggacctggagtaccaccacctgctggacaaggccgtgcactgcaccagcagcgtggagcagatgtgcctggtggccgccttcagcgtgagcagctacagcaccaccgtgcacagaatcgccaagcccttcaaccccatgctgggcgagaccttcgagctggacagactggacgacatgggcctgagaagcctgtgcgagcaggtgagccaccacccccccagcgccgcccactacgtgttcagcaagcacggctggagcctgtggcaggagatcaccatcagcagcaagttcagaggcaagtacatcagcatcatgcccctgggcgccatccacctggagttccaggccagcggcaaccactacgtgtggagaaagagcaccagcaccgtgcacaacatcatcgtgggcaagctgtggatcgaccagagcggcgacatcgagatcgtgaaccacaagaccaacgacagatgccagctgaagttcctgccctacagctacttcagcaaggaggccgccagaaaggtgaccggcgtggtgagcgacagccagggcaaggcccactacgtgctgagcggcagctgggacgagcagatggagtgcagcaaggtgatgcacagcagccccagcagccccagcagcgacggcaagcagaagaccgtgtaccagaccctgagcgccaagctgctgtggaagaagtaccccctgcccgagaacgccgagaacatgtactacttcagcgagctggccctgaccctgaacgagcacgaggagggcgtggcccccaccgacagcagactgagacccgaccagagactgatggagaagggcagatgggacgaggccaacaccgagaagcagagactggaggagaagcagagactgagcagaagaagaagactggaggcctgcggccccggcagcagctgcagcagcgaggaggagaaggaggccgacgcctacacccccctgtggttcgagaagagactggaccccctgaccggcgagatggcctgcgtgtacaagggcggctactgggaggccaaggagaagcaggactggcacatgtgccccaacatcttctag

SEQ ID NO: 219857 - protein, 482 aa, Artificial Sequence
  derived and/or modified sequence
MDEGIPHLQERQLLEHRDFIGLDYSSLYMCKPKRSMKRDDTKDTYKLPHRLIEKKRRDRINECIAQLKDLLPEHLKLTTLGHLEKAVVLELTLKHLKALTALTEQQHQKIIALQNGERSLKSPIQSDLDAFHSGFQTCAKEVLQYLSRFESWTPREPRCVQLINHLHAVATQFLPTPQLLTQQVPLSKGTGAPSAAGSAAAPCLERAGQKLEPLAYCVPVIQRTQPSAELAAENDTDTDSGYGGEAEARPDREKGKGAGASRVTIKQEPPGEDSPAPKRMKLDSRGGGSGGGPGGGAAAAAAALLGPDPAAAAALLRPDAALLSSLVAFGGGGGAPFPQPAAAAAPFCLPFCFLSPSAAAAYVQPFLDKSGLEKYLYPAAAAAPFPLLYPGIPAPAAAAAAAAAAAAAAAAFPCLSSVLSPPPEKAGAAAATLLPHEVAPLGAPHPQHPHGRTHLPFAGPREPGNPESSAQEDPSQPGKEAP

SEQ ID NO: 219858 - protein, 370 aa, Artificial Sequence
  derived and/or modified sequence
MDEGIPHLQERQLLEHRDFIGLDYSSLYMCKPKRSMKRDDTKDTYKLPHRLIEKKRRDRINECIAQLKDLLPEHLKLTTLGHLEKAVVLELTLKHLKALTALTEQQHQKIIALQNGERSLKSPIQSDLDAFHSGFQTCAKEVLQYLSRFESWTPREPRCVQLINHLHAVATQFLPTPQLLTQQVPLSKGTGAPSAAGSAAAPCLERAGQKLEPLAYCVPVIQRTQPSAELAAENDTDTDSGYGGEAEARPDREKGKGAGASRVTIKQEPPGEDSPPPPPRSPACPRCCRPLPRRRAPPPRPSCRTRWRPLGRRTPSTRTAAPTCPSPGPASRGTRRALLRKIPRSQERKLPESLRPEGRRFKQSEKLKYP

SEQ ID NO: 219859 - DNA, 3796 bp, Artificial Sequence
  derived and/or modified sequence
ctggtctggccggcgacgcgcgtgccctgtggccaaacactgcctggagtgagagcaaactaccagcgcagtggggccggcgcgagtgtgcgtgtgtgtgcgtgtgtgtgtgcgagcgcggtggaggggggggaccaactgcttcacactttcaacactgcactgaagagggagagcgagagagagactggagacgcacagatccccccaaggtctcccaagcctaccgtcccacagattattgtacagagccccaaaaatcgaaacagaggaaacgaacagcagttgaacatggacgaaggaattcctcatttgcaagagagacagttactggaacatagagattttataggactggactattcctctttgtatatgtgtaaacccaaaaggagcatgaaacgagacgacaccaaggatacctacaaattaccgcacagattaatagaaaagaaaagaagagaccgaattaatgaatgcattgctcagctgaaagatttactgcctgaacatctgaaattgacaactctgggacatctggagaaagctgtagtcttggaattaactttgaaacacttaaaagctttaaccgccttaaccgagcaacagcatcagaagataattgctttacagaatggggagcgatctctgaaatcgcccattcagtccgacttggatgcgttccactcgggatttcaaacatgcgccaaagaagtcttgcaatacctctcccggtttgagagctggacacccagggagccgcggtgtgtccagctgatcaaccacttgcacgccgtggccacccagttcttgcccaccccgcagctgttgactcaacaggtccctctgagcaaaggcaccggcgctccctcggccgccgggtccgcggccgccccctgcctggagcgcgcggggcagaagctggagcccctcgcctactgcgtgcccgtcatccagcggactcagcccagcgccgagctcgccgccgagaacgacacggacaccgacagcggctacggcggcgaagccgaggcccggccggaccgcgagaaaggcaaaggcgcgggggcgagccgcgtcaccatcaagcaggagcctcccggggaggactcgccggcgcccaagaggatgaagctggattcccgcggcggcggcagcggcggcggcccggggggcggcgcggcggcggcggcagccgcgcttctggggcccgaccctgccgccgcggccgcgctgctgagacccgacgccgccctgctcagctcgctggtggcgttcggcggaggcggaggcgcgcccttcccgcagcccgcggccgccgcggcccccttctgcctgcccttctgcttcctctcgccttctgcagctgccgcctacgtgcagcccttcctggacaagagcggcctggagaagtatctgtacccggcggcggctgccgccccgttcccgctgctataccccggcatccccgccccggcggcagccgcggcagccgccgccgccgctgccgccgccgccgccgcgttcccctgcctgtcctcggtgttgtcgccccctcccgagaaggcgggcgccgccgccgcgaccctcctgccgcacgaggtggcgccccttggggcgccgcacccccagcacccgcacggccgcacccacctgcccttcgccgggccccgcgagccggggaacccggagagctctgctcaggaagatccctcgcagccaggaaaggaagctccctgaatccttgcgtcccgaaggacggaggttcaagcagagtgagaagttaaaatacccttaaggaggttcaagcagagtgagaagttaaaatacccttaaggtctttaagggaggaagtgtaatagatgcacgacaggcataaacaagaacaacaaaacaggtgttatgtgtacattcggagttcctgttttgctcatcccgcaccaccccaccctccacacactaacatccctttcttccccccaccagctgtaaaagatcctatgcgaaagacactggctcttttttttaatcccccaaataaattttgcccccttttaggccatgttccattatctcttaaaattggaacctaattcgagaggaagtaagaagggtctgttctgtggctgagctaggtgaaccccggggtaggggaaagatgttaacacctttgacgtctttggagttgacatggaacagcaggtagttgttatgtagagctagttctcaaagctgccctgcctgttttaggaggcgttccacaaacagattgaggctcttttagaattgaatttactcttcagtattttctaatgttcagctttctaaaaggcatatatttttcaaagaagtgaggatgcagtttctcacgttgcaacctattctgaagtggtttaaatggtatctcttagtaacttgcactcgttaaagaaacacggagctgggccatcgtcagaactaagtcagggaaggagatggatgagaaggccagaatcattcctagtacatttgctaacactttattgagaaattgaccatgaattaatggactcatcttaatttcttctaagtccatatatagatagatatctatctgtacagatttctatttatccatagataggtatctatacatacacatctcaagtgcatctattcccactctcattaatccatcatgttcctaaatttttgtaatcttactgtaaaaaaaagtgcactgaacttcaaaacaaaacaaaaaacaacaacaacaaaaaacaagtccaaactgatatatcctatattctgttaaaattcaaaagtgaacgaaagcatttaactggccagttttgattgcaaatgctgtaaagatatagaatgaagtcctgtgaggccttcctatctccaagtctatgtattttctggagaccaaaccagataccagataatcacaaagaaagcttttttaataaggcttaaaccaagaccttgtctagatatttttagtttgttgccaaggtagcactgtgagaaatctcacttggatgttatgtaaggggtgagacacaacagtctgactatgagtgaggaaaatatctgggtcttttcgtcagtttggtgcatttgctgctgctgttgctactgtttgcctcaaacgctgtgtttaaacaacgttaaactcttagcctacaaggtggctcttatgtacatagttgttaatacatccaattaatgatgtctgacatgctatttttgtagggagaaaatatgtgctaatgatattttgagttaaaatatcttttggggaggatttgctgaaaagttgcacttttgttacaatgcttatgcttggtacaagcttatgctgtcttaaattattttaaaaaaataaatactgtctgtgagaaaccagctggtttagaaaagtttagtatgtgacgataaactagaaattacctttatattctagtattttcagcactccataaattctattacctaaatattgccacactattttgtgatttaaaaattcttactaaggaataaaaactttaatatacgatatgatattgtctaataattaaaaaagacataatggatgctcaattagttttaagatatctataactatagggatacaaatcactacagttctcagatttacagcttttttttgtcattggcttgatgtcacacatttccaatctcttgcaagcctccaggctctggctttgtctacctgctcgttcccaatgtatcttaatgaaaagtgcaaaagaaaaacctaccaattaaaaaaaaaaaaaaaaaa

SEQ ID NO: 219860 - DNA, 1446 bp, Artificial Sequence
  derived and/or modified sequence
atggacgagggcatcccccacctgcaggagcgccagctgctggagcaccgcgacttcatcggcctggactacagcagcctgtacatgtgcaagcccaagcgcagcatgaagcgcgacgacaccaaggacacctacaagctgccccaccgcctgatcgagaagaagcgccgcgaccgcatcaacgagtgcatcgcccagctgaaggacctgctgcccgagcacctgaagctgaccaccctgggccacctggagaaggccgtggtgctggagctgaccctgaagcacctgaaggccctgaccgccctgaccgagcagcagcaccagaagatcatcgccctgcagaacggcgagcgcagcctgaagagccccatccagagcgacctggacgccttccacagcggcttccagacctgcgccaaggaggtgctgcagtacctgagccgcttcgagagctggaccccccgcgagccccgctgcgtgcagctgatcaaccacctgcacgccgtggccacccagttcctgcccaccccccagctgctgacccagcaggtgcccctgagcaagggcaccggcgcccccagcgccgccggcagcgccgccgccccctgcctggagcgcgccggccagaagctggagcccctggcctactgcgtgcccgtgatccagcgcacccagcccagcgccgagctggccgccgagaacgacaccgacaccgacagcggctacggcggcgaggccgaggcccgccccgaccgcgagaagggcaagggcgccggcgccagccgcgtgaccatcaagcaggagccccccggcgaggacagccccgcccccaagcgcatgaagctggacagccgcggcggcggcagcggcggcggccccggcggcggcgccgccgccgccgccgccgccctgctgggccccgaccccgccgccgccgccgccctgctgcgccccgacgccgccctgctgagcagcctggtggccttcggcggcggcggcggcgcccccttcccccagcccgccgccgccgccgcccccttctgcctgcccttctgcttcctgagccccagcgccgccgccgcctacgtgcagcccttcctggacaagagcggcctggagaagtacctgtaccccgccgccgccgccgcccccttccccctgctgtaccccggcatccccgcccccgccgccgccgccgccgccgccgccgccgccgccgccgccgccgccgccttcccctgcctgagcagcgtgctgagccccccccccgagaaggccggcgccgccgccgccaccctgctgccccacgaggtggcccccctgggcgccccccacccccagcacccccacggccgcacccacctgcccttcgccggcccccgcgagcccggcaaccccgagagcagcgcccaggaggaccccagccagcccggcaaggaggccccc

SEQ ID NO: 219861 - DNA, 1449 bp, Artificial Sequence
  derived and/or modified sequence
atggacgagggcatcccccacctgcaggagagacagctgctggagcacagagacttcatcggcctggactacagcagcctgtacatgtgcaagcccaagagaagcatgaagagagacgacaccaaggacacctacaagctgccccacagactgatcgagaagaagagaagagacagaatcaacgagtgcatcgcccagctgaaggacctgctgcccgagcacctgaagctgaccaccctgggccacctggagaaggccgtggtgctggagctgaccctgaagcacctgaaggccctgaccgccctgaccgagcagcagcaccagaagatcatcgccctgcagaacggcgagagaagcctgaagagccccatccagagcgacctggacgccttccacagcggcttccagacctgcgccaaggaggtgctgcagtacctgagcagattcgagagctggacccccagagagcccagatgcgtgcagctgatcaaccacctgcacgccgtggccacccagttcctgcccaccccccagctgctgacccagcaggtgcccctgagcaagggcaccggcgcccccagcgccgccggcagcgccgccgccccctgcctggagagagccggccagaagctggagcccctggcctactgcgtgcccgtgatccagagaacccagcccagcgccgagctggccgccgagaacgacaccgacaccgacagcggctacggcggcgaggccgaggccagacccgacagagagaagggcaagggcgccggcgccagcagagtgaccatcaagcaggagccccccggcgaggacagccccgcccccaagagaatgaagctggacagcagaggcggcggcagcggcggcggccccggcggcggcgccgccgccgccgccgccgccctgctgggccccgaccccgccgccgccgccgccctgctgagacccgacgccgccctgctgagcagcctggtggccttcggcggcggcggcggcgcccccttcccccagcccgccgccgccgccgcccccttctgcctgcccttctgcttcctgagccccagcgccgccgccgcctacgtgcagcccttcctggacaagagcggcctggagaagtacctgtaccccgccgccgccgccgcccccttccccctgctgtaccccggcatccccgcccccgccgccgccgccgccgccgccgccgccgccgccgccgccgccgccgccttcccctgcctgagcagcgtgctgagccccccccccgagaaggccggcgccgccgccgccaccctgctgccccacgaggtggcccccctgggcgccccccacccccagcacccccacggcagaacccacctgcccttcgccggccccagagagcccggcaaccccgagagcagcgcccaggaggaccccagccagcccggcaaggaggccccctag

SEQ ID NO: 219862 - DNA, 1113 bp, Artificial Sequence
  derived and/or modified sequence
atggacgagggcatcccccacctgcaggagagacagctgctggagcacagagacttcatcggcctggactacagcagcctgtacatgtgcaagcccaagagaagcatgaagagagacgacaccaaggacacctacaagctgccccacagactgatcgagaagaagagaagagacagaatcaacgagtgcatcgcccagctgaaggacctgctgcccgagcacctgaagctgaccaccctgggccacctggagaaggccgtggtgctggagctgaccctgaagcacctgaaggccctgaccgccctgaccgagcagcagcaccagaagatcatcgccctgcagaacggcgagagaagcctgaagagccccatccagagcgacctggacgccttccacagcggcttccagacctgcgccaaggaggtgctgcagtacctgagcagattcgagagctggacccccagagagcccagatgcgtgcagctgatcaaccacctgcacgccgtggccacccagttcctgcccaccccccagctgctgacccagcaggtgcccctgagcaagggcaccggcgcccccagcgccgccggcagcgccgccgccccctgcctggagagagccggccagaagctggagcccctggcctactgcgtgcccgtgatccagagaacccagcccagcgccgagctggccgccgagaacgacaccgacaccgacagcggctacggcggcgaggccgaggccagacccgacagagagaagggcaagggcgccggcgccagcagagtgaccatcaagcaggagccccccggcgaggacagccccccccccccccccagaagccccgcctgccccagatgctgcagacccctgcccagaagaagagcccccccccccagacccagctgcagaaccagatggagacccctgggcagaagaacccccagcaccagaaccgccgcccccacctgccccagccccggccccgccagcagaggcaccagaagagccctgctgagaaagatccccagaagccaggagagaaagctgcccgagagcctgagacccgagggcagaagattcaagcagagcgagaagctgaagtacccctag

SEQ ID NO: 219863 - DNA, 1449 bp, Artificial Sequence
  derived and/or modified sequence
atggatgagggtatcccccatctgcaggagcggcagttgcttgaacatcgggatttcatcggcttggactatagtagtttatacatgtgcaagcccaaaaggagcatgaaaagagatgacacgaaggacacctacaagctaccccacaggttaatcgagaaaaaaagacgggatcggattaatgagtgtattgcacagcttaaagacttgctccctgaacatctgaagctgacaaccctgggacatcttgagaaggcggttgtccttgagctgacgctcaagcatctgaaggcactgacggccctgaccgagcaacagcatcagaaaatcatcgccctccagaacggggagcggtcgctgaagagccccatccaatcagacctggatgcctttcattcaggcttccaaacatgtgcaaaagaagtgctgcaatatcttagccgattcgagtcttggactcctcgggaaccccgctgcgttcagctcattaaccacctccacgccgtagccactcagtttctacccaccccccaattattaacacagcaggtgcccctgtcaaagggtacaggagcccccagcgcagcaggtagtgcagccgcaccatgcctggaaagagcgggacaaaagctggagcccttggcgtactgcgttcccgtcatccaaagaacccagccatccgctgagctggccgctgagaacgatactgataccgattctggttacggaggcgaggctgaggctagacctgaccgagaaaagggcaaaggggctggcgctagcagagtaaccattaagcaagaacctcccggagaggactctcctgccccgaagaggatgaaactggattctcgaggtggcggttccgggggtggcccaggcggaggagccgctgcggcggccgctgccctgctcgggcctgaccctgctgcagcggcagcgctcctgcgccctgacgcagccctcctttcgtctcttgtagcgttcggcggcggcggcggagccccattcccccagcccgcggctgccgcagctcctttctgcctcccgttttgttttctcagtccctctgccgccgccgcttacgtgcagccattcctggacaagtcgggattggagaagtatttataccccgctgccgccgccgctcctttccctctactatatccaggaatccctgcccccgccgcggcagctgccgccgccgccgccgctgctgccgcagctgccgcgttcccatgccttagcagcgtgttgtcccccccccccgagaaagccggcgctgctgctgctacattgctgccacatgaagtggctccccttggagctcctcacccacagcacccccatgggcgcactcatctgccctttgccggcccacgggagcctggcaaccccgaaagcagtgcccaggaggatccttctcagcccggtaaggaagctccctag

SEQ ID NO: 219864 - DNA, 1113 bp, Artificial Sequence
  derived and/or modified sequence
atggatgaaggaattcctcacctgcaggaacgtcagctattagagcatagggattttattggtcttgactatagctccctgtacatgtgcaaacctaaacgctctatgaaacgggatgatacaaaggacacctataagctaccccacaggctgatcgaaaaaaagcggcgcgaccgtattaatgaatgtatagcccagctgaaagacttgctacccgagcacttaaagctgactaccctgggacacctcgagaaagcagtcgtgctggagctgaccttaaagcacctcaaggcactgaccgctttgacggaacagcaacaccaaaagatcatcgctttacagaacggggagcgcagcctgaaatcccctatccagtctgatctagacgccttccattcgggcttccagacctgcgccaaggaagtacttcagtatctcagccgcttcgaatcatggacacctcgagagcccagatgcgtgcagcttataaaccacttgcatgcagtcgccacgcaatttctccctacgccccaactcctaacccagcaagtgcctttatctaaaggcactggggcccccagcgccgccggaagcgcagctgcaccctgtcttgaacgggctggacagaagcttgaaccacttgcctattgtgtcccagttatacagcgtacacagccgagcgctgaactagcagccgagaatgacacagatacagatagtgggtacggcggagaggccgaagcacgacccgacagggagaaggggaagggtgccggggcttccagagtgacaattaaacaggaacctccaggcgaggacagcccacctcccccacctcggagccctgcttgcccaaggtgctgtaggcctctccctaggcggagggcgcctcctccaaggcctagttgccggacccggtggagaccgttagggagacgcaccccctcgacacgaacagcggcccctacttgtcctagtcccggcccggcctcaaggggcacacgcagggccttgcttaggaaaattccgaggtcccaggaaagaaaactgcctgagtcactgcgtcctgaagggcggcgctttaagcagtcagagaaactcaaatatccctag

SEQ ID NO: 219865 - DNA, 3837 bp, Artificial Sequence
  derived and/or modified sequence
cccccgcccccctccgggctggaccgcggatggtacgttccgcacgtgagctgggtgctggtctggccggcgacgcgcgtgccctgtggccaaacactgcctggagtgagagcaaactaccagcgcagtggggccggcgcgagtgtgcgtgtgtgtgcgtgtgtgtgtgcgagcgcggtggaggggggggaccaactgcttcacactttcaacactgcactgaagagggagagcgagagagagactggagacgcacagatccccccaaggtctcccaagcctaccgtcccacagattattgtacagagccccaaaaatcgaaacagaggaaacgaacagcagttgaacatggacgaaggaattcctcatttgcaagagagacagttactggaacatagagattttataggactggactattcctctttgtatatgtgtaaacccaaaaggagcatgaaacgagacgacaccaaggatacctacaaattaccgcacagattaatagaaaagaaaagaagagaccgaattaatgaatgcattgctcagctgaaagatttactgcctgaacatctgaaattgacaactctgggacatctggagaaagctgtagtcttggaattaactttgaaacacttaaaagctttaaccgccttaaccgagcaacagcatcagaagataattgctttacagaatggggagcgatctctgaaatcgcccattcagtccgacttggatgcgttccactcgggatttcaaacatgcgccaaagaagtcttgcaatacctctcccggtttgagagctggacacccagggagccgcggtgtgtccagctgatcaaccacttgcacgccgtggccacccagttcttgcccaccccgcagctgttgactcaacaggtccctctgagcaaaggcaccggcgctccctcggccgccgggtccgcggccgccccctgcctggagcgcgcggggcagaagctggagcccctcgcctactgcgtgcccgtcatccagcggactcagcccagcgccgagctcgccgccgagaacgacacggacaccgacagcggctacggcggcgaagccgaggcccggccggaccgcgagaaaggcaaaggcgcgggggcgagccgcgtcaccatcaagcaggagcctcccggggaggactcgccggcgcccaagaggatgaagctggattcccgcggcggcggcagcggcggcggcccggggggcggcgcggcggcggcggcagccgcgcttctggggcccgaccctgccgccgcggccgcgctgctgagacccgacgccgccctgctcagctcgctggtggcgttcggcggaggcggaggcgcgcccttcccgcagcccgcggccgccgcggcccccttctgcctgcccttctgcttcctctcgccttctgcagctgccgcctacgtgcagcccttcctggacaagagcggcctggagaagtatctgtacccggcggcggctgccgccccgttcccgctgctataccccggcatccccgccccggcggcagccgcggcagccgccgccgccgctgccgccgccgccgccgcgttcccctgcctgtcctcggtgttgtcgccccctcccgagaaggcgggcgccgccgccgcgaccctcctgccgcacgaggtggcgccccttggggcgccgcacccccagcacccgcacggccgcacccacctgcccttcgccgggccccgcgagccggggaacccggagagctctgctcaggaagatccctcgcagccaggaaaggaagctccctgaatccttgcgtcccgaaggacggaggttcaagcagagtgagaagttaaaatacccttaaggaggttcaagcagagtgagaagttaaaatacccttaaggtctttaagggaggaagtgtaatagatgcacgacaggcataaacaagaacaacaaaacaggtgttatgtgtacattcggagttcctgttttgctcatcccgcaccaccccaccctccacacactaacatccctttcttccccccaccagctgtaaaagatcctatgcgaaagacactggctcttttttttaatcccccaaataaattttgcccccttttaggccatgttccattatctcttaaaattggaacctaattcgagaggaagtaagaagggtctgttctgtggctgagctaggtgaaccccggggtaggggaaagatgttaacacctttgacgtctttggagttgacatggaacagcaggtagttgttatgtagagctagttctcaaagctgccctgcctgttttaggaggcgttccacaaacagattgaggctcttttagaattgaatttactcttcagtattttctaatgttcagctttctaaaaggcatatatttttcaaagaagtgaggatgcagtttctcacgttgcaacctattctgaagtggtttaaatggtatctcttagtaacttgcactcgttaaagaaacacggagctgggccatcgtcagaactaagtcagggaaggagatggatgagaaggccagaatcattcctagtacatttgctaacactttattgagaaattgaccatgaattaatggactcatcttaatttcttctaagtccatatatagatagatatctatctgtacagatttctatttatccatagataggtatctatacatacacatctcaagtgcatctattcccactctcattaatccatcatgttcctaaatttttgtaatcttactgtaaaaaaaagtgcactgaacttcaaaacaaaacaaaaaacaacaacaacaaaaaacaagtccaaactgatatatcctatattctgttaaaattcaaaagtgaacgaaagcatttaactggccagttttgattgcaaatgctgtaaagatatagaatgaagtcctgtgaggccttcctatctccaagtctatgtattttctggagaccaaaccagataccagataatcacaaagaaagcttttttaataaggcttaaaccaagaccttgtctagatatttttagtttgttgccaaggtagcactgtgagaaatctcacttggatgttatgtaaggggtgagacacaacagtctgactatgagtgaggaaaatatctgggtcttttcgtcagtttggtgcatttgctgctgctgttgctactgtttgcctcaaacgctgtgtttaaacaacgttaaactcttagcctacaaggtggctcttatgtacatagttgttaatacatccaattaatgatgtctgacatgctatttttgtagggagaaaatatgtgctaatgatattttgagttaaaatatcttttggggaggatttgctgaaaagttgcacttttgttacaatgcttatgcttggtacaagcttatgctgtcttaaattattttaaaaaaataaatactgtctgtgagaaaccagctggtttagaaaagtttagtatgtgacgataaactagaaattacctttatattctagtattttcagcactccataaattctattacctaaatattgccacactattttgtgatttaaaaattcttactaaggaataaaaactttaatatacgatatgatattgtctaataattaaaaaagacataatggatgctcaattagttttaagatatctataactatagggatacaaatcactacagttctcagatttacagcttttttttgtcattggcttgatgtcacacatttccaatctcttgcaagcctccaggctctggctttgtctacctgctcgttcccaatgtatcttaatgaaaagtgcaaaagaaaaacctaccaattaa

SEQ ID NO: 219866 - DNA, 1673 bp, Artificial Sequence
  derived and/or modified sequence
actgaagagggagagcgagagagagactggagacgcacagatccccccaaggtctcccaagcctaccgtcccacagattattgtacagagccccaaaaatcgaaacagaggaaacgaacagcagttgaacatggacgaaggaattcctcatttgcaagagagacagttactggaacatagagattttataggactggactattcctctttgtatatgtgtaaacccaaaaggagcatgaaacgagacgacaccaaggatacctacaaattaccgcacagattaatagaaaagaaaagaagagaccgaattaatgaatgcattgctcagctgaaagatttactgcctgaacatctgaaattgacaactctgggacatctggagaaagctgtagtcttggaattaactttgaaacacttaaaagctttaaccgccttaaccgagcaacagcatcagaagataattgctttacagaatggggagcgatctctgaaatcgcccattcagtccgacttggatgcgttccactcgggatttcaaacatgcgccaaagaagtcttgcaatacctctcccggtttgagagctggacacccagggagccgcggtgtgtccagctgatcaaccacttgcacgccgtggccacccagttcttgcccaccccgcagctgttgactcaacaggtccctctgagcaaaggcaccggcgctccctcggccgccgggtccgcggccgccccctgcctggagcgcgcggggcagaagctggagcccctcgcctactgcgtgcccgtcatccagcggactcagcccagcgccgagctcgccgccgagaacgacacggacaccgacagcggctacggcggcgaagccgaggcccggccggaccgcgagaaaggcaaaggcgcgggggcgagccgcgtcaccatcaagcaggagcctcccggggaggactcgccgccgccgccgccgcgttcccctgcctgtcctcggtgttgtcgccccctcccgagaaggcgggcgccgccgccgcgaccctcctgccgcacgaggtggcgccccttggggcgccgcacccccagcacccgcacggccgcacccacctgcccttcgccgggccccgcgagccggggaacccggagagctctgctcaggaagatccctcgcagccaggaaaggaagctccctgaatccttgcgtcccgaaggacggaggttcaagcagagtgagaagttaaaatacccttaaggaggttcaagcagagtgagaagttaaaatacccttaaggtctttaagggaggaagtgtaatagatgcacgacaggcataaacaagaacaacaaaacaggtgttatgtgtacattcggagttcctgttttgctcatcccgcaccaccccaccctccacacactaacatccctttcttccccccaccagctgtaaaagatcctatgcgaaagacactggctcttttttttaatcccccaaataaattttgcccccttttaggccatgttccattatctcttaaaattggaacctaattcgagaggaagtaagaagggtctgttctgtggctgagctaggtgaaccccggggtaggggaaagatgttaacacctttgacgtctttggagttgacatggaacagcaggtagttgttatgtagagctagttctc

SEQ ID NO: 219867 - DNA, 1449 bp, Artificial Sequence
  derived and/or modified sequence
atggatgagggcatcccccacctgcaggagcggcagctgctggagcaccgggacttcatcggcctggactacagcagcctgtacatgtgcaagcccaagaggtccatgaagagagatgacaccaaggacacctacaagctgccccacaggctcatcgagaagaagaggcgggaccgcatcaatgaatgcatcgcccagctgaaggacctgctgcctgagcacctgaagctgaccaccctgggccacctggagaaggctgtggtgctggagctgaccctgaagcacctgaaggccctgacagccctgacagagcagcagcaccagaagatcatcgccctgcagaatggagagaggagcctgaagagccccatccagagcgacctggatgccttccacagcggcttccagacctgtgccaaggaggtgctgcagtacctgagcagatttgagagctggaccccccgggagccccgctgtgtgcagctgatcaaccacctgcatgctgtggccacccagttcctgcccaccccccagctgctgacccagcaggtgcccctgagcaagggcaccggggcccccagcgctgctggcagcgctgctgccccctgcctggagagagctggccagaagctggagcccctggcctactgtgtgcctgtgatccagaggacccagcccagcgctgagctggccgcagaaaatgacacagacacagacagcggctacggcggggaggccgaggcccggccagaccgggagaagggcaagggggccggggccagccgggtgaccatcaagcaggagcccccaggagaggacagccctgcccccaagaggatgaagctggacagccggggcggcggcagcggcggcggccctgggggcggcgctgctgctgctgctgctgccctgctgggccctgaccctgctgctgctgctgccctgctgcggccagatgctgccctgctgagcagcctggtggcctttggaggcggcggcggggcccccttcccccagcctgctgctgctgctgcccccttctgcctgcccttctgcttcctgagccccagcgctgctgctgcctacgtgcagcccttcctggacaagagcggcctggagaagtacctgtacccagctgctgctgctgcccccttccccctgctgtacccaggcatcccagccccagctgctgctgctgctgctgctgctgctgctgctgctgctgctgctgccttcccctgcctgagctctgtgctgagccccccacctgagaaggccggggctgctgctgccaccctgctgccccatgaggtggcccccctgggcgccccccacccccagcacccccacggccgcacccacctgccctttgctggcccccgggagcccggcaaccctgagagcagcgcccaggaggaccccagccagcccgggaaggaggccccctag

SEQ ID NO: 219868 - DNA, 1113 bp, Artificial Sequence
  derived and/or modified sequence
atggatgagggcatcccccacctgcaggagcggcagctgctggagcaccgggacttcatcggcctggactacagcagcctgtacatgtgcaagcccaagaggtccatgaagagagatgacaccaaggacacctacaagctgccccacaggctcatcgagaagaagaggcgggaccgcatcaatgaatgcatcgcccagctgaaggacctgctgcctgagcacctgaagctgaccaccctgggccacctggagaaggctgtggtgctggagctgaccctgaagcacctgaaggccctgacagccctgacagagcagcagcaccagaagatcatcgccctgcagaatggagagaggagcctgaagagccccatccagagcgacctggatgccttccacagcggcttccagacctgtgccaaggaggtgctgcagtacctgagcagatttgagagctggaccccccgggagccccgctgtgtgcagctgatcaaccacctgcatgctgtggccacccagttcctgcccaccccccagctgctgacccagcaggtgcccctgagcaagggcaccggggcccccagcgctgctggcagcgctgctgccccctgcctggagagagctggccagaagctggagcccctggcctactgtgtgcctgtgatccagaggacccagcccagcgctgagctggccgcagaaaatgacacagacacagacagcggctacggcggggaggccgaggcccggccagaccgggagaagggcaagggggccggggccagccgggtgaccatcaagcaggagcccccaggagaggacagccccccacctccacccaggagccctgcctgcccccgctgctgccggcccctgccccggcggcgggcccccccaccccggcccagctgcaggacccgctggaggcccctgggccgccgcacccccagcaccaggacagctgcccccacctgccccagccctggccctgccagccggggcacccggcgggccctgctgaggaagatccccaggagccaggagaggaagctgcctgagagcctgcggcctgagggccgccgcttcaagcagagcgagaagctgaagtacccctag

SEQ ID NO: 219869 - DNA, 1449 bp, Artificial Sequence
  derived and/or modified sequence
atggacgagggcatcccccacctgcaggagcggcagctgctggagcatcgagacttcattgggttggattacagttccctttatatgtgcaaacctaagcggtccatgaaacgtgacgacacaaaggatacgtataaattaccccacagacttattgagaaaaaacgacgggacaggattaacgagtgcatcgcccaactgaaagaccttctacctgaacatctcaagctgacgaccctgggacatctggagaaggccgtcgttctggagctgaccctgaaacacctgaaagctctaaccgctctcacagaacagcagcaccaaaagataattgccctgcagaatggagaacgttcgttgaaatcacctatccagtcggatctggatgctttccatagtgggtttcaaacctgtgctaaggaggtcctacaatatctgagccgatttgagtcgtggacgccacgcgaaccgaggtgtgtacagcttatcaaccatctgcatgcggtggcgacgcagttcctgccaactccgcagctcctaacacagcaggtgcccctttctaagggcacaggtgcaccatctgccgcaggaagcgcagctgcaccttgtctggaacgagccggacaaaaactagagccattggcatattgtgtgccagtgatccagcggactcaaccgagcgcagagttggccgccgaaaacgacaccgatacagattcaggctatggcggcgaggccgaggctcggcccgacagagagaaagggaagggcgccggagccagtagagtgactatcaaacaagagccacctggcgaggactcccctgcgcctaagagaatgaaattagactccaggggaggaggatctggagggggtcctggcggtggcgcagccgctgcggccgccgcactattgggtcccgacccagcagctgcagctgcactgctcaggccagacgccgctctgctgagttctctggtcgcttttggcggaggaggaggagcccccttcccccagcccgccgctgccgcagcacccttttgcttgcctttctgcttcctgtctccttccgcggctgccgcctacgtgcagcccttcttagataaaagcgggctcgagaaatatctctatccagctgccgccgctgccccttttccactgctctaccccggaatacccgccccggctgcagccgccgctgcagctgctgctgcagccgcggcagctgcagcattcccttgtttatcatccgttctaagtcctccccccgaaaaagcaggggccgcagcggctactttactcccacacgaggtcgctcctctaggcgcccctcaccctcagcacccacacgggaggacccacttgccatttgcaggcccgagggaacccggcaatcctgagagtagcgctcaggaggatccctcacagccaggaaaagaagccccttag

SEQ ID NO: 219870 - DNA, 1113 bp, Artificial Sequence
  derived and/or modified sequence
atggacgagggcatcccccacctgcaggagcggcagctgctggagcacagggatttcatcggcctggactacagctcactgtatatgtgcaagccaaaaaggtccatgaaacgggatgatacaaaagatacatacaaattgccacaccggctcattgagaagaagcgacgcgacagaataaatgagtgcatcgcccaacttaaagatttactacctgaacatcttaagttgactacactcggacacctcgagaaggctgtcgtgctggagctaactctcaaacatttgaaagccttaaccgctctcaccgaacaacagcaccaaaagatcatcgccttgcaaaacggcgagagatccctaaaaagccctattcagtctgacctggacgcatttcattcaggcttccagacctgcgccaaggaggtcctccagtacctgtccagatttgaatcctggacaccgcgggagcctcgatgcgttcagctgattaaccaccttcatgctgttgctacacaatttcttccaacaccacagctcttgacacagcaggtgcctctgagcaagggtacgggggctccctcagcggccggatctgccgctgctccctgcctggagagagcaggacagaagctcgaacccctggcatactgcgttcccgtcattcagcgcacccagcccagcgccgaactggccgccgaaaacgacacggacacagattcgggttatggcggggaggccgaagcccggccagaccgcgagaaagggaagggagccggcgctagccgtgttaccatcaagcaggaaccaccaggagaggacagccctccaccacctcctcgctctccggcgtgccccagatgctgtagaccactgcctcgacgccgggccccaccaccccgtccgtcgtgcaggactcggtggagacctctcggaaggcgaacaccttcaacccgcacagccgctcccacctgcccctcacccgggcctgcatcaagggggacacggcgggcattgctgagaaagattccacggtcccaggagaggaagctgcctgagagcctgaggcccgaaggtcgccggtttaagcagagtgagaagctcaaatacccgtag

SEQ ID NO: 219871 - DNA, 1449 bp, Artificial Sequence
  derived and/or modified sequence
atggacgagggaatcccacacctgcaagagcggcagcttttggaacaccgagactttatcggattggattattcaagcttgtatatgtgcaagcctaaacgaagtatgaagcgtgacgatacaaaggatacatacaagcttccacacagattgatcgagaagaagcgtcgagaccgtataaacgagtgtattgcccagctgaaggacctactgccagaacacctgaagctcacaactcttggccatttagaaaaggctgtcgttctggagttgacattaaagcacctgaaggccctgaccgctttgactgagcaacagcatcagaagattatcgcactgcagaacggggagcgttccctgaaaagccccatacagtctgatctggacgcatttcattctgggtttcagacttgtgccaaggaggttctgcagtaccttagccgcttcgagagttggacaccgagggagcctcgctgtgtacagcttatcaatcacctccacgccgtcgctacccagttcttacccacgcctcaactacttacacagcaagtgcctctctctaagggtacgggcgctccttccgcagcgggtagcgctgccgctccttgtcttgagcgggcagggcagaagctggaaccgctggcatactgcgtccccgtaatccagcggacccagccctccgctgaactcgcagcagaaaacgatacggatacggactccggctacggaggggaggcagaagccagacctgaccgcgagaaaggtaaaggcgctggagcaagtagagtgacaatcaagcaggaacctcccggagaagatagtccggcaccaaaacgcatgaaattggacagcaggggtggtgggtcaggaggcggtccaggcggtggcgcagcagctgccgctgcggcactactcggccctgatccagccgcagcagctgctctgcttagaccagatgccgctctgttatcctcacttgtggctttcggaggcggtggtggagccccttttccccagccggctgcagccgctgcaccattctgcctcccattttgctttttaagccccagtgccgctgcagcatacgtgcaaccattcctggacaagtcaggcctcgaaaaatatctctacccagccgctgcagccgctccattccccctgctgtatcccggaatcccagcccctgccgctgccgcagctgccgctgcagcggctgctgccgcagcggcagcttttccttgcctgagctctgtactgtcaccacccccagaaaaggcgggagccgcagccgctacactcctacctcacgaggtggcgccactgggcgctcctcatcctcagcatccccacggtagaacacatttgcccttcgctggccctagagaaccaggaaaccctgagtcatccgcacaggaggaccccagccagccaggaaaggaagcaccatag

SEQ ID NO: 219872 - DNA, 1113 bp, Artificial Sequence
  derived and/or modified sequence
atggatgaggggatacctcacctacaagaaaggcaactgctcgaacatcgcgacttcatcggccttgattattcttccctttacatgtgcaaaccaaaacggagcatgaaaagagatgacacaaaggacacttacaaactgccccacaggctcatcgagaagaagagaagagatagaatcaacgagtgcattgctcaactgaaggatctcctgcctgaacacctgaaactaacaaccttggggcacctggagaaagctgtggtgcttgagctgaccctaaaacacctgaaagccttgaccgcactgaccgaacaacaacaccaaaaaatcattgcgcttcagaacggagagcgctcccttaaaagtcctattcaatcagacctggacgcattccactccggttttcaaacttgtgctaaggaggtgctacaatatctatctaggtttgaaagctggacccctcgcgaaccaagatgtgtccagctgattaaccatcttcacgctgtcgctacacagttcctcccaacaccccagctcctaactcagcaggtgcccctgtccaagggtacgggagccccttcagccgcagggtccgctgctgctccttgtctggagcgcgctggacagaaactggaaccattggcttattgcgttcccgtgattcagaggacccaacccagtgccgaactggcggctgaaaatgataccgacaccgactccggctatgggggagaggcagaggcccgtccggatcgggagaaggggaagggcgcaggggcaagccgagtcacgattaaacaagagccacctggcgaagacagtccaccacctccacctcgtagcccggcatgccccagatgttgcagaccattacccagaagacgggcaccccctcctcgacctagttgccgaactcgttggcggccattgggacgccgaacccccagcactcggacggcggcaccaacatgcccctccccgggacccgcttcaagaggtacaagaagggctctgttacggaagattcccagaagccaggaaagaaaactgcctgaaagcctgcgccctgagggtcgacgattcaaacagagtgagaagctgaaatatccttag

SEQ ID NO: 219873 - DNA, 1446 bp, Artificial Sequence
  derived and/or modified sequence
atggacgaaggcatcccgcacctgcaggaacgacagctgttggagcatcgggatttcatcggactggactactcgtcactgtacatgtgcaagccgaaacggtccatgaagcgcgacgataccaaagacacttacaagctgccacaccgcttgatcgaaaagaaacgccgcgaccgcatcaatgaatgcatcgcacagctcaaagatttgcttccggaacacctgaagctgacgactcttggacatctggaaaaggcggtggtgctcgaacttaccctgaagcatctcaaagcactgactgccctcactgaacagcagcaccagaagatcatcgccctccagaacggagagaggtcccttaagtcgccaatccagtcggatctggatgcttttcactccggcttccagacttgcgcgaaggaggtcctgcagtatctgtcaaggttcgaatcatggaccccacgcgaacccaggtgcgtgcaactcattaatcatctgcatgcggtcgccacccagttcctgcctacgccgcaactccttacccagcaggtgccgctgtcgaagggaaccggcgctccctcagcggcgggatcggcagctgccccgtgcctggagcgggcgggacagaagctggagcccctcgcatactgtgtcccagttattcagcgcacccaaccgagcgctgaattggcggcagaaaatgacactgatactgattcgggatacgggggagaagccgaagcccgcccagacagggaaaagggtaaaggagccggagcatctcgggtgaccatcaagcaagaaccgcccggagaggactcccctgcccccaagcggatgaagctcgattcgcggggcggtggctcaggaggcggacccgggggaggtgcggccgccgctgcggcagcgctcctcggaccggatccggcggcagccgccgcactcctgcgtcctgatgcagcactgctctccagcctggtcgcttttggaggaggaggtggagccccgttcccacagcctgccgcggccgccgcgccgttttgcctgccgttctgcttcctcagcccctccgccgccgccgcctacgtccagcccttcctggataagtccgggctggaaaagtacctgtacccggcagccgcagccgcgccattcccattgttgtaccctggaatcccggcgccagcagcagcagcggctgcagcggctgcggccgcggcggctgcagctgccttcccgtgtttgtcaagcgtgttgagccctccaccggagaaggcaggggctgcggcagctactctcctgccacatgaggtcgcaccattgggagctccccatcctcaacatccgcatgggcgcactcatctcccttttgcgggaccacgggagcccggaaaccccgagtcgtcggcccaggaagatccatcacagcctggcaaggaagcgcct

SEQ ID NO: 219874 - DNA, 1446 bp, Artificial Sequence
  derived and/or modified sequence
atggacgagggtattccccaccttcaggaacgccaattgcttgaacatagagacttcatcggactcgattacagcagtctctacatgtgtaagcccaagcggtcgatgaaacgcgatgatactaaggatacgtataagctgccccatcggctgatagagaaaaagcggagggaccgcatcaacgagtgtatcgcacaactgaaggatctgctccccgagcatctcaaactgactaccctgggacacctggaaaaagcggtggtgcttgagctcaccttgaagcatctgaaggctctgacggccctcactgaacagcagcaccagaagattatcgccctgcaaaatggagagcgctcgctgaagtcaccgatccagtcagacctcgacgccttccactcaggattccaaacctgcgccaaggaggtcctgcagtacttgtccagattcgaatcgtggaccccgcgcgagccgagatgcgtccagctgatcaaccacctgcatgccgtggcaactcagttcctgccgaccccgcagttgctcactcagcaagtgccactgagcaagggaaccggagcgccgtccgctgctggctcggcagcggccccgtgcttggaacgggccggtcaaaagttggaaccattggcgtactgcgtgcccgtcattcagcgtacccagccaagcgctgagctcgctgcggaaaatgataccgatactgactctggatacggtggggaggcagaagcccgccccgatcgggagaagggaaagggggcgggagcgtcgagggtgactatcaagcaagagcctccgggtgaggactcccctgccccaaagagaatgaagctggactccaggggaggagggtccggagggggaccgggagggggagcagcagccgccgcagcagcattgctgggaccggacccggccgccgccgcggctctgttgcgaccagacgcagcactcctcagcagcttggtggcttttggcggcggtggaggggctccattccctcaaccggcagcggcggccgctccgttttgcctgccgttctgcttcctgtctccatcggcggcagcagcttacgttcagccgttcctcgacaaatccggactcgaaaagtacctgtacccggccgcagctgccgcaccattccctttgctctaccccggaatccccgcaccggccgctgctgcggccgcggcagcggcagctgcagcagcggcggctgcgttcccttgcctctcctcggtgctgtccccgccgccggaaaaggctggagccgcagccgcaactctgctgccgcatgaggttgcccctctgggggccccgcacccccaacatccacacggtaggacccatctgccgttcgcaggaccacgcgaacctggaaacccggaaagctcggcgcaggaagatccctcgcagccaggaaaggaggcacct

SEQ ID NO: 219875 - DNA, 1446 bp, Artificial Sequence
  derived and/or modified sequence
atggatgagggaatcccgcatctccaggaacggcagcttctggagcaccgggacttcatcggcctggactacagctccctgtacatgtgcaagccaaagagatcaatgaaacgcgatgacaccaaggacacctacaaactgccacacagactgatcgaaaagaaacgccgagatcgaatcaacgagtgcatcgcacaactgaaggacctgctgcctgagcacctgaaactcactaccttgggacatctggaaaaggccgtggtgctggagctgactttgaagcatctgaaggcattgaccgcactgactgaacagcaacaccagaagattatcgcactgcagaacggagaaagatcgctgaagtcgcccatccaatcggacctggatgcgttccacagcggattccagacctgcgcgaaggaggtgctgcaatacttgtcgcgcttcgagtcatggaccccacgcgagccgagatgcgtgcaactgatcaaccatctgcatgccgtggcaacccagtttctcccgactccgcagctgctgacgcaacaggttccgctgtcgaaggggacgggagccccgtcagctgcgggatcggccgcggccccatgtctcgaacgcgccgggcagaaattggaacctctcgcttactgcgtgccagtgatccagcgcactcagccatccgctgagctcgcggcagaaaatgatactgatactgactccggatacggtggagaggctgaagcaagacctgatcgcgaaaagggaaagggcgctggcgcgagccgcgtgactatcaagcaagaaccgccaggggaggactcaccggcccccaagcggatgaaacttgattcgcggggaggtggatccggaggcggtccaggcggaggcgccgcggcagcagctgccgcactgctgggaccagacccagcggcggcagccgctctgttgcgcccggacgccgccctgctgtccagcctcgtcgccttcggcggtggaggaggcgcaccatttccacaacctgctgctgcagccgcgccgttctgcctccctttttgctttttgtcgccctcggctgccgcggcctacgtccagccgttcctcgataagtcgggactggagaaatatctgtaccctgcggcagcggcggccccttttcctctgctctaccctggcatccccgcaccggcagcagcagcggctgcggcagccgcggccgccgccgctgcggcggcgttcccttgtctgtcgtcagtgctgtcgccccctccagagaaagcaggggcggcggcggcgactttgcttccgcacgaagtggccccgctcggagcacctcacccgcagcacccccatggcagaactcacctcccatttgccggaccgagagagcccggaaaccctgaatcgagcgcacaggaagatccatcgcagccggggaaggaggcgcca

SEQ ID NO: 219876 - DNA, 1446 bp, Artificial Sequence
  derived and/or modified sequence
atggatgaggggataccacatctgcaggaacgacaactgctggagcatagagattttattggactcgactacagctcgctctacatgtgtaaacctaaaagaagcatgaagagagatgacacgaaagacacatacaagttgccccatagactcatcgagaagaaacggagagaccggatcaacgaatgtattgctcagctgaaagacctactgcctgagcatttgaaactgaccacattgggccatctagagaaggcagtagtgttggagctaacgctaaaacacctgaaggccctaacagccctcaccgaacagcaacatcagaagatcattgcgcttcaaaatggcgagcggtctctcaaatctccaatacagagcgatctggacgcatttcactctggcttccaaacctgtgctaaggaagtactgcagtatctcagccggttcgagtcttggactcctcgcgaacctcgatgcgtgcagctgatcaaccacctgcacgcggtcgccactcaatttctccctacgcctcaactattgacacaacaggtcccgctctcaaaggggactggagctccatcagccgcgggttctgccgccgctccatgtctcgaacgcgcagggcagaaacttgaacccctggcatactgtgttccagtgatacagagaacgcagccctctgcggaactggcggccgagaacgatactgacactgattctggctatggcggtgaagcagaagcacgtcctgaccgtgagaaggggaagggcgctggcgcatcacgtgttacaatcaagcaagagccacccggtgaggactcccctgcaccaaagcgaatgaaattagactcgagaggcggaggcagcggcggcggcccaggtggaggggccgcggctgctgccgccgcgctcctggggccagatcccgctgccgccgcggccttgctgcgcccagacgccgccctgctgagcagtctagttgcttttggcggggggggaggtgctccgttcccccaacctgctgcggcagctgcccctttttgtttaccattctgcttcctgtcgccgtcagccgccgcagcatacgtccagccattcttagacaagtccggcctcgagaagtatctgtacccagccgccgctgccgctccatttccccttctctacccaggcatcccggcgcccgctgcagccgctgcggccgcagctgccgccgccgcagcagcagccgccttcccatgcctgagttcagtgctgtcccccccccccgagaaggcaggagcagcggccgcaacgcttcttccccatgaagtggcccctttaggagccccacacccacagcaccctcacggcagaacacacctgccgtttgctgggccgcgggagccaggaaatcccgagagtagcgcccaggaggaccctagccaacccggcaaagaagccccc

SEQ ID NO: 219877 - DNA, 1446 bp, Artificial Sequence
  derived and/or modified sequence
atggacgaaggtattcctcacttgcaagagcgtcagttgctagaacacagggactttattggactggattattcatccctgtatatgtgtaagcctaaaagatccatgaagcgcgacgacactaaagatacatacaagttacctcatagactcattgagaagaagcggagagatcgaattaacgagtgcatagctcaactcaaggacctacttcctgaacacctgaagctgacaactctgggccacctggaaaaagccgtggtgttagaactcacactgaagcatctgaaagctctgacggccctgacagagcagcagcaccagaaaattatcgcgctgcagaacggagagcgaagtctgaagtctcccatacagagtgacctcgatgccttccattcaggattccagacctgtgcaaaggaagtactgcaatacctgtcgcggttcgagtcctggacaccccgtgaaccgaggtgcgtgcagctgatcaatcacctgcatgcagttgccacgcagtttctccccaccccgcagctgctgacacagcaggtgccactcagcaagggcaccggtgcaccctcagccgccggcagtgctgctgccccgtgcttagaacgcgctgggcaaaaattagagccgcttgcctactgcgttcctgttattcagcgtactcagcccagcgccgagctcgccgccgaaaacgatactgacaccgatagcggatatgggggtgaagctgaggccagaccagatagagagaaagggaaaggggctggagcatccagagtaaccatcaaacaagagccacctggagaagattcacccgccccgaagagaatgaagttagatagtaggggaggcgggtctggaggaggtccaggcggcggcgcggccgcggcggcagctgcactcctgggtcctgatccggccgctgctgcagcactgttacggccagatgccgccctgctgagcagcctagtggctttcggaggtgggggcggcgccccattcccccagccagccgccgcagccgctccattctgtctcccattttgttttctgtcacccagcgccgcagccgcttacgttcagcctttcctggacaaatccgggttggaaaagtatctttatccagcagcagccgccgccccattccccttgctgtaccctggtattcccgcccccgccgcagccgcggccgccgccgccgctgcggcggctgcggctgccgcgttcccctgcctaagcagtgtgttatcccccccgcctgagaaggcgggggccgcagccgcaactcttctccctcacgaggtagcccccctaggagccccacacccccagcaccctcatgggcgaacacacctgccttttgccggcccccgcgagcccgggaatcctgaatcatctgcacaggaggatccgtcacagccaggaaaggaggctcct

SEQ ID NO: 219878 - DNA, 1446 bp, Artificial Sequence
  derived and/or modified sequence
atggacgaggggattccccatctgcaggagagacagctgctcgagcatcgggattttataggcctcgactactcctcgctgtatatgtgcaaacctaaacgttccatgaaacgagatgacactaaagatacatacaaattgcctcaccgattgatcgagaagaagcgaagggatcgcattaacgagtgtatcgcccagctgaaggacctgttgcccgaacatctgaagcttactacgctcggtcacctggagaaggcagttgtgctggagctaaccctcaagcaccttaaggccttgacagctctgactgagcagcagcaccaaaagatcattgccctgcagaatggcgaaaggtccctcaaaagcccaatccagagtgacctcgatgctttccactctggctttcagacttgtgccaaggaagtgctgcagtatctttcccgctttgagtcttggacccctagagaaccgcgctgcgtgcagctgataaaccacttacatgccgtagccacccagtttctgccaaccccccagctgctcacccagcaagtgccattgtcgaaaggtacgggggcacctagcgctgcggggtcagcggccgcgccttgtctggagagagccggacagaagctagagcccttggcgtactgcgtgcctgttatccagcgcacacagcctagcgccgaacttgcagcagaaaacgatactgacacggacagcgggtacggcggggaagcagaggcgcggccagaccgggagaagggaaagggcgccggggcctctagggtcacaatcaagcaggagcccccaggcgaggactccccagcaccaaaacggatgaagcttgactcacggggcggaggcagcggcggaggtcctggcggaggcgctgccgctgccgccgcggctctgctggggccagaccccgccgccgcagctgccctgctccgacccgacgccgccttgctgagttctctggtcgccttcggaggcggcggtggggcccccttcccccaaccagcagccgcagctgcgccattctgcctacctttctgcttcctcagccctagtgcagccgctgcctatgtgcagccttttctcgacaagagtgggctggagaagtacctttacccggctgccgctgctgccccttttccattgctgtatccagggatccctgcacctgcagcagccgcagcagcagcggccgccgcggccgcagccgccgctgcttttccatgcttgtccagcgttcttagcccacctcctgagaaggcaggcgctgccgctgcaacactgttgccccatgaggtcgctccactgggggcgcctcaccctcagcacccccatggccgaacacatttaccatttgccggcccccgggagcctggcaatccagagtcaagcgcccaggaggaccccagccaaccgggcaaagaagctcct

SEQ ID NO: 219879 - DNA, 1446 bp, Artificial Sequence
  derived and/or modified sequence
atggacgaagggatcccacaccttcaggaaagacagctacttgagcatagggatttcataggcctggactacagttcactgtacatgtgcaagccaaaaaggtctatgaagcgcgacgataccaaggacacttacaagctgccacaccgactgatcgaaaaaaaacggagggaccggatcaacgagtgtatagctcagttgaaagatctgctcccggaacacctgaagctcaccacacttggccatttggaaaaggctgtggtgctagaacttaccctgaagcacttgaaagcactgacggccttgactgagcagcaacatcagaaaatcatcgcccttcagaatggggaacgaagtctcaaatcacctattcagtccgatttggacgctttccattccggattccagacgtgcgcaaaggaagtactgcagtacctaagcaggtttgaatcctggactccacgggagccccgatgtgtgcagctaatcaaccatctccacgccgtggctactcagtttctgcctacaccacagttacttacccagcaggtgcctctctctaagggcacaggtgctcccagtgcagccggctccgctgccgctccctgtctggagcgtgcgggccagaagctggagccattagcttactgtgtcccggtcatccagcgaacccagccctccgcggagctcgcagcagagaatgatacagacacagacagtgggtacggcggggaagcagaagctcgccccgatcgggaaaagggtaagggagcaggcgcaagcagagtcacaataaagcaggaaccaccaggggaagactcaccggcccctaaacgcatgaagctagactctcggggcggagggtctggagggggccctggcgggggcgctgctgccgctgctgccgcactgctggggcccgatcccgctgctgcagccgccctattgcgcccggatgcagctctcctgagcagcttggtggcattcgggggcggcgggggggcaccctttccacagcctgctgccgcggccgcacctttttgtctcccattctgcttcctgtcgcccagtgccgctgctgcctatgtgcagccattcctcgataaaagtggcctggagaagtacctctaccccgctgctgccgccgctccgtttcccctgctttatcctggaattcccgcccctgcagcggcagcggccgccgccgctgctgctgccgcagccgcggccgcgtttccttgcttgtctagtgtgcttagtccaccccctgagaaggctggcgccgcagctgccaccttattgccccacgaggtcgcgcccctcggtgcacctcatcctcaacatcctcatggcagaacccatcttccgttcgccgggccaagggagcctggcaatccagaatcatccgctcaggaggatccatcccagccgggcaaggaggctcct

SEQ ID NO: 219880 - DNA, 1446 bp, Artificial Sequence
  derived and/or modified sequence
atggatgaaggtataccgcatttacaagaacgacaattactagaacatcgtgattttataggtttagattattcgtcgctatatatgtgtaaaccgaaacgatcgatgaaacgtgatgatacgaaagatacgtataaactaccgcatcgactaatagaaaaaaaacgtcgagatcgaataaatgaatgtatagcgcaactaaaagatttactaccggaacatttaaaattaacgacgttaggtcatttagaaaaagcggtagtattagaactaacgctaaaacatttaaaagcgctaacggcgttaacggaacaacaacatcaaaaaataatagcgctacaaaatggtgaacgatcgttaaaatcgccgatacaatcggatttagatgcgtttcattcgggttttcaaacgtgtgcgaaagaagttttacaatatttatcgcgttttgaatcgtggacgccgcgtgaaccgcgatgtgttcaactaataaatcatctacatgcggttgcgacgcaatttttaccgacgccgcaactattaacgcaacaagtaccgttatcgaaaggtacgggtgcgccgtcggcggcgggttcggcggcggcgccgtgtctagaacgagcgggtcaaaaactagaaccgctagcgtattgtgttccggttatacaacgaacgcaaccgtcggcggaattagcggcggaaaatgatacggatacggattcgggttatggtggtgaagcggaagcgcgtccggatcgtgaaaaaggtaaaggtgcgggtgcgtcgcgtgtaacgataaaacaagaaccgccgggtgaagattcgccggcgccgaaacgaatgaaattagattcgcgtggtggtggttcgggtggtggtccgggtggtggtgcggcggcggcggcggcggcgttattaggtccggatccggcggcggcggcggcgttactacgaccggatgcggcgttattatcgtcgttagttgcgtttggtggtggtggtggtgcgccgtttccgcaaccggcggcggcggcggcgccgttttgtttaccgttttgttttttatcgccgtcggcggcggcggcgtatgtacaaccgtttttagataaatcgggtttagaaaaatatttatatccggcggcggcggcggcgccgtttccgctactatatccgggtataccggcgccggcggcggcggcggcggcggcggcggcggcggcggcggcggcggcggcgtttccgtgtctatcgtcggttttatcgccgccgccggaaaaagcgggtgcggcggcggcgacgttactaccgcatgaagtagcgccgctaggtgcgccgcatccgcaacatccgcatggtcgtacgcatctaccgtttgcgggtccgcgtgaaccgggtaatccggaatcgtcggcgcaagaagatccgtcgcaaccgggtaaagaagcgccg

SEQ ID NO: 219881 - DNA, 1446 bp, Artificial Sequence
  derived and/or modified sequence
atggacgaaggaataccacatctccaggagcgccagttgctggagcatcgggacttcatcggtttggattacagttcgctgtacatgtgtaagcctaagcgaagcatgaagcgcgatgacaccaaagacacttacaaactgccccaccgtcttattgaaaagaaacgaagagatcgcatcaacgaatgcatcgcgcagctgaaagacttgctcccagaacatcttaagctcaccactctgggtcacctggagaaggcggtggtgctcgagctcactctgaaacacctgaaggccctgacggccctgactgaacaacagcaccaaaagatcatcgcactccaaaatggagagagatcccttaagtctccgatccagtccgacctggatgcgtttcacagcggcttccagacttgcgccaaggaggtgctccagtatctctcccgcttcgaaagctggactccgcgtgaacctcggtgcgtccagctcattaaccatctgcacgcggtcgccacgcagttcctgccaactccgcaactgctgacccaacaggtgccactctctaagggaacgggagcaccttcggcggcagggagcgcagccgccccatgcctcgagagggctgggcagaagctcgaacctcttgcgtactgtgtccctgtgatccaacggacccaaccatccgcggagctggcggccgaaaacgacaccgataccgattcgggttacggaggagaagccgaagcccggcccgacagagaaaaaggcaagggggccggagcttcacgggtgactatcaagcaggaacctccaggtgaagattcgcctgcgcctaaaagaatgaaattggactcgagaggaggcggatcgggaggcggacccggaggaggcgctgcggcggccgcagcagctctgctcggccccgacccggcagcagctgccgcccttctgcgcccagacgctgctctgctctctagcctcgtggcgtttggaggcggaggaggggcgccgttcccgcaaccagccgccgctgcagcaccgttctgcctgccgttttgcttcctgtccccgagtgcggcagccgcctacgtgcagccgttcctcgataagtcgggcctggagaagtacctgtacccagcggcagcagccgcgccattcccgctcctgtaccctggtatcccagcccctgctgcggctgcggcggcagccgcagctgccgctgcagccgctgctgcttttccgtgtctgagctcagttcttagcccaccacctgagaaggcgggcgctgcagcagccaccctgttgccgcacgaagtcgcacccctgggagcgccgcacccccagcatcctcacggccggacccatcttccgttcgccggtccgcgagaaccgggaaatcccgagtcgtcggcacaagaggaccccagccagcctggaaaggaagcacca

SEQ ID NO: 219882 - DNA, 1446 bp, Artificial Sequence
  derived and/or modified sequence
atggatgaaggtatcccccacctgcaggaaagacagctgctggagcatcgggacttcattgggctggactattcttctctgtacatgtgcaagccaaaacgctccatgaaacgtgacgataccaaggatacctacaaactccctcatcgactcattgaaaaaaaacgtcgagataggattaacgagtgcattgcgcagctgaaagacctcctgccagagcacctgaaattgaccaccctgggccacttggaaaaagctgtggtccttgagctcacacttaaacacctgaaggccctaaccgcgctgacagaacagcaacaccagaaaattatcgcactgcagaacggggagcggtctctgaagtcacccatccagagcgacctggatgcatttcactccggatttcagacatgcgccaaggaggtgctgcagtacttatctcgtttcgagagctggacaccgcgtgagcctaggtgcgttcagttgattaaccacctccacgccgtcgccacgcagttcctgccgacgccccagttgctgactcagcaagttcctctgtcaaaagggactggcgccccttccgccgctggctccgccgctgccccctgtttggagcgtgcaggtcagaagctggagccactcgcctattgcgttcctgtgatacagcgcacccaaccgtctgccgagctggccgccgaaaacgatacagacaccgatagcggatatggtggagaggcagaggcacgccctgaccgagagaagggaaagggcgcaggagctagtcgtgtcaccattaagcaggaaccacctggtgaggactcccccgctccaaaacggatgaagctggactcgagaggaggcggatcaggtgggggcccgggcggtggagcggccgccgctgctgccgccttactgggcccggatcctgcagccgcggcagcacttctgcgccctgacgctgccctgctaagctcccttgtcgccttcggcggcggaggaggagctccttttcctcagcccgccgcagccgccgctccattctgtctcccgttttgctttttgtcaccatccgcagccgccgcatacgtccagcctttcctggataagagtgggctcgagaaatatctttatcccgccgcagccgccgcacccttccccttgctctatccagggatccctgcgcctgccgccgccgctgctgccgcggctgcggctgcagccgcagcagccgcctttccgtgtctgtcatccgtgctgtcacctcctccagagaaggctggtgccgccgctgccacactgctgccccacgaggtagcaccacttggagctccccaccctcaacacccacacggaagaacgcatttaccgtttgcgggacctcgcgagcccggcaaccccgagagctcagcacaggaggatccctcccagccagggaaggaagcccca

SEQ ID NO: 219883 - DNA, 1446 bp, Artificial Sequence
  derived and/or modified sequence
atggacgaagggatccctcatctccaggagcgccagttactggagcatagggatttcatcggtctagactattcatccttgtacatgtgcaagcctaagcgctccatgaaacgcgatgacacgaaggacacttacaagttgccacatcgactgatcgaaaagaagagaagagataggatcaacgaatgcattgctcagctcaaagacctcttgccagagcacctgaaactgactactctgggacacctggagaaggcagtggtcttggaactcacacttaagcacctcaaggccctgacggccttaactgaacaacaacaccagaaaatcatcgccctccaaaatggcgaaaggtcccttaagtccccaattcagtctgatctggatgcatttcactcaggctttcagacatgcgccaaggaagtgcttcagtatcttagtcggtttgaatcgtggactcctagagagcctcgctgtgtgcagctcatcaatcacctgcatgccgtggctacacaattcttgccaacccctcagctgctgacgcagcaggtacccctctccaaaggaaccggagctccatctgctgccgggtcggcagccgccccatgtttggaaagggcagggcagaaactggagcccctggcctactgcgtgcccgtcatccagcgaacccaaccgagtgccgagcttgcagctgagaacgatactgataccgactcagggtacgggggagaagcagaagcaaggccggaccgcgagaaaggaaagggtgccggagcgagcagagtgactatcaagcaagaaccgcccggagaggatagccctgcgcccaagcgcatgaaactggactcgcggggcggcgggagtggtgggggaccaggggggggagctgctgcagccgcagctgcactgctggggcccgaccctgccgccgctgccgcactgttgagacctgacgctgccctattaagcagtctggtggcctttggcggtgggggaggggctccttttccccaacccgccgcagcagccgcccctttctgcctaccattttgcttcctgagtcctagtgccgccgccgcctatgtgcagcccttcctagataagagcggcctggaaaagtatctgtatcctgccgccgcagcagctcctttccctcttctgtaccccggtatccccgctcccgctgctgcagccgcagcagcggcggctgcggctgcggccgcagcagcctttccttgtctgtcctctgtactgtctcctccaccggagaaggccggtgcagccgcagcaaccttattgccgcacgaggtagcccctttaggggcccctcacccccaacacccacatggtcgaacacacctgccattcgcggggcccagagagcctggcaatcccgagtcttcagcccaggaggatccatctcaaccggggaaggaagcacct

SEQ ID NO: 219884 - DNA, 1446 bp, Artificial Sequence
  derived and/or modified sequence
atggacgagggaatcccgcacctgcaagagcggcaactgcttgagcaccgtgattttattggcctcgactattccagcctgtatatgtgcaaacctaagcggtcaatgaaaagggacgacactaaagatacatacaagctaccacacagattgatagagaagaaaaggcgggatcggattaatgaatgcatcgcccagctgaaggacctgcttccggaacacctgaagctcaccaccctgggacaccttgagaaagctgtcgtgctcgagctaaccttgaaacatctgaaagccttaacagctctgacagagcagcagcatcaaaaaatcatcgcactccagaatggtgagcgctccctgaagtcccccatccagagtgatctggatgcctttcattctggatttcaaacatgtgctaaggaggtgctgcaatacctgtccagattcgaatcctggactccccgcgagcccaggtgtgtacagttgatcaaccatctgcacgcggtcgcaactcagtttctcccgactcctcaactcttgacacagcaggttcccctgtccaagggaaccggcgcgccaagcgccgccgggtccgccgctgcaccatgtctggagagggctggccagaaacttgaacctttggcgtactgtgtgcctgtaattcagagaactcagccaagcgccgaactggctgcggagaatgacaccgatacggacagcgggtatggaggcgaagctgaagcccggcccgatcgcgaaaaagggaagggggcaggcgcttcccgcgtaactattaagcaggaacctcctggagaggacagccctgcccccaaacgcatgaagttggactcgagagggggcggatccggtggaggccctggcggtggtgccgccgccgctgctgcggctctattaggacccgatccagcagcggccgcagctctacttcggccagatgccgccctcctctcatctttagtggcttttgggggagggggtggtgccccgtttccgcaaccagctgctgctgccgccccattctgtcttcccttctgctttttgtctcccagcgcagccgccgcatatgtgcagcctttcctagataaatcgggtctggagaaatatctataccccgccgccgcggcagcgccgttccctctgttataccctgggatcccagctccagctgccgccgctgctgcagcggccgcggcagccgctgcggcggcagctttcccctgcctgtcctccgtgctatcaccccctcctgaaaaggccggcgcggctgctgcaaccctgttaccacacgaagttgcccccctgggggcaccccatccccaacatcctcacgggcgtacccacctgccctttgccggacctcgggaaccaggaaacccagaaagctctgcgcaggaagatccatcacaacccgggaaagaagcccca

SEQ ID NO: 219885 - DNA, 1446 bp, Artificial Sequence
  derived and/or modified sequence
atggacgaaggaatcccccacctccaggaaaggcaattgctcgaacaccgggacttcattggactggactactcatccctgtacatgtgtaaacccaagcggtcgatgaagcgcgacgacactaaagacacgtataaactgccccatcggctgatcgaaaagaagcgcagggaccgcatcaatgaatgtatcgcgcagctcaaggacctcttgcccgagcacctgaagctgaccacgctgggccatctggaaaaggccgtggtcctggaattgactctgaagcacctcaaggccctcactgcactgaccgagcagcagcatcagaaaatcattgctctgcagaatggagaaaggtcactcaagtcgccaatccagtccgaccttgacgctttccactccggctttcaaacgtgtgctaaggaagtgcttcagtacctgtcccgcttcgagtcctggactccgcgagaaccgaggtgcgtgcagctgatcaaccacctgcacgcagtcgccactcaattcctgcctacccctcaactcctcactcagcaggtccccctgtccaagggaaccggagcgccgtcggccgccggaagcgccgcagcgccatgtctggaaagagccggtcaaaagttggaacctctcgcctactgtgtgccagtgatccagcggactcagccctcggctgaactggctgccgaaaatgacaccgacacggattcgggttacggaggcgaagctgaagcaagaccggatcgcgaaaagggcaaaggtgcgggcgcatcccgggtgaccattaagcaagagccgccgggagaggactcaccggcaccaaagcgcatgaagctcgactcccgcggaggcgggtcgggtggcggcccgggcggaggagccgcagccgcagcggctgcgctcctcggaccagaccctgcagcagccgctgcccttctgcggccggatgcggctctgctgtcgtcactggtcgcgttcggaggtggagggggagcgccatttcctcagccagctgcggccgctgctccgttctgcctcccattctgcttcctctcgcccagcgccgcggccgcatacgtccagccgttcctggacaagtcaggactggagaaatacctgtacccggccgctgcagccgctccatttccgcttctgtacccaggaatcccagcgccggcggcagccgccgccgcggctgccgctgccgcagcagcagccgcagccttcccgtgcctgtcaagcgtgctgtcccctcccccggagaaagctggcgccgctgccgcgactctgctccctcatgaagtggcccccctcggagcgcctcaccctcagcacccccatggccggactcatctcccattcgcaggtccccgggaaccggggaacccggagtcgtcagctcaggaagatccaagccaaccaggaaaggaagcccca

SEQ ID NO: 219886 - DNA, 1446 bp, Artificial Sequence
  derived and/or modified sequence
atggatgaaggaattccacatttacaagaaagacaacttcttgaacatcgagatttcattggattagactattcatcattatatatgtgtaaaccaaagcgtagtatgaagcgagatgatactaaagatacatataagttaccacatagattaatagaaaaaaaacgtagagatcgtattaacgaatgtattgctcaattaaaggatttacttccagaacatttaaagttaacaacattaggacatttagaaaaagccgtagtgcttgaattaactttgaaacatttaaaagcacttacggctcttacagaacaacaacatcaaaaaattatagctttacaaaacggggaaagatcacttaaatctccaattcaaagtgatttagatgcattccattcaggttttcaaacttgtgctaaagaagttcttcaatatctttcaagatttgaatcatggactccaagagagccaagatgtgttcaattaattaatcatttacatgcagttgctacacaatttttgccaactccacaattgttaactcagcaagttccattaagtaaaggtacaggagctccatcagcagcaggatcagctgctgcaccatgtcttgaacgagcaggacaaaaattggaaccattagcatactgtgttcctgtaattcaaagaacacaaccatcggctgaattagctgcagaaaatgatacagatacagatagtggttatggtggtgaggctgaagcaagaccagatagagaaaaaggaaaaggtgctggagcaagtcgagtaacaattaaacaagaaccaccaggagaagatagtcctgcaccaaaaagaatgaaattagattcacgtggaggaggatctggaggagggccaggaggtggagctgcagcagcagctgctgcacttcttgggccagatccagctgcagctgcagctttattaagaccagatgcagcacttctttcttctcttgtagcttttggtggaggaggaggagcaccatttcctcaaccagctgcagcagctgctccattttgccttccattctgttttttatcaccatccgctgccgcagcttatgttcaaccttttcttgataaatctggattagaaaaatatttatatccagctgctgcagcagctcctttcccattattgtatcctggaattccagcaccagctgctgctgcagcagcagctgcagcagctgccgcagcagcagctgcttttccatgtctaagttctgtattatctccaccaccagaaaaagcaggagcagcagctgctacattacttccacatgaggttgcaccattaggagctccacatccacaacatccacacggtagaactcacttaccatttgcaggaccaagagaaccaggaaacccagaaagttcagcacaagaagatccatcgcaaccaggtaaagaagctcca

SEQ ID NO: 219887 - DNA, 1446 bp, Artificial Sequence
  derived and/or modified sequence
atggacgaaggtattccccatttacaggagagacagctgctggagcaccgggattttatagggctagattactcttctctgtacatgtgtaagcccaagcgctcaatgaaacgtgacgacaccaaagacacctataagcttcctcatagactcatcgaaaaaaaaagacgtgatcggatcaatgaatgcattgcccaactgaaggatttgctgccagaacacctgaaactgaccactctagggcacctggagaaagctgttgtcctcgagctcacactgaagcatctgaaggccctaaccgcactgaccgagcagcagcaccagaagattatcgcacttcagaacggcgagagaagtctcaagtcacccatccaatcagatctcgacgccttccacagtggcttccagacctgtgcaaaagaggttctccagtatcttagtagatttgaatcttggacccctcgagaacctcgatgcgtacaactcatcaaccacctccacgccgtggcaacccagttcctgcctaccccccaactgctcacccagcaagtgcccctgagcaaaggcacaggggctccgagcgctgctggcagtgccgccgcgccttgcctcgaaagggcaggccagaagttagagcctctcgcctactgtgttcccgtcattcagcgcacccagccttccgcagaattggccgcagagaatgataccgatacggactcgggatacggcggtgaggccgaggccagacctgaccgggaaaaagggaagggcgccggggcgagccgggtgacgattaagcaggagcctccaggagaggatagcccggcccctaagaggatgaaacttgatagcagaggcggcggcagcgggggtggaccagggggcggcgcagccgctgccgcagcagccctgcttggcccagatcccgcagctgcagccgcgctcctccggccagatgccgctctactttcttctttggtcgctttcggggggggtggtggtgcacctttccctcagcctgctgccgctgccgctcccttctgtctgcccttttgtttcctttcacctagcgcggcagcggcttatgtgcaaccatttctcgacaaatccgggctagaaaagtacctgtaccccgctgctgctgccgctccatttccactgctgtaccctggcattccagctccagctgcagcagccgccgccgctgctgccgccgcagccgctgcagctgcgtttccatgtctttcttccgtcctttcccctccacccgagaaagctggagctgcagccgcgacactgctcccacacgaggtagctccactgggggcaccacaccctcagcacccacacggtcgcacacatctaccatttgccggtcctcgagagccaggaaacccggagagttccgctcaggaggacccgtcccagccaggcaaagaagcccct

SEQ ID NO: 219888 - DNA, 1446 bp, Artificial Sequence
  derived and/or modified sequence
atggacgagggaataccacatttgcaagaacgccagcttctggaacatcgcgacttcatcggacttgactacagcagcctgtacatgtgtaagccaaagcgctccatgaaaagagatgacacgaaagatacttacaagctgccccataggctgattgagaaaaagagaagggatcgcattaacgagtgtatcgctcagctcaaagatttgctcccggagcaccttaagctcactacgctcggacatcttgaaaaagcagtggtgctggaacttactctgaagcatctgaaggccctcactgcacttactgaacagcaacaccagaaaatcattgcactccaaaatggcgaacgatccctcaaatcccctattcaaagcgaccttgatgcgtttcactcaggatttcaaacctgtgcaaaggaagttctccaatacctgtctcgcttcgagtcctggacgccaagagagccacgttgtgtgcaactgattaatcaccttcacgcggtcgcaacccaatttctgcctactccccaacttctgacccagcaagtgccattgtccaagggtaccggtgcgccttcagccgctgggtcggcagcagcaccatgccttgaaagagcaggacagaaactcgaacctctcgcctactgtgtgcctgtcatccagcggacccagccgagcgcagaattggcagccgaaaacgatacggacaccgattccggatatggcggtgaagcagaagcacgcccggatagagagaagggaaagggagcaggtgcttcgagggttaccattaagcaggagcctcctggtgaggacagcccagcacctaagcggatgaagctggattctaggggaggagggtccggaggaggaccagggggaggagcagctgctgccgccgcggcgcttctggggcctgatcctgcggctgcagcggcgttgctgaggccagatgcagcgcttctgtcctcactcgtggcgttcggaggaggcgggggcgccccgtttcctcaacccgcggcggctgcggcacctttctgtctgccattttgcttcctgtcgccgtcggccgcagccgcatacgtgcaaccatttcttgacaagtcagggcttgaaaagtacctttaccctgcggcggccgcagccccatttccactcctttaccccggaataccagcgcccgccgcagctgctgcggcagccgcagcggcagcagccgccgcagcagccttcccttgcctttcgtcggtgctttcacccccgccagaaaaggcaggcgcagctgcagcaactctgctgccacatgaggtggcacctttgggagccccacacccacagcatcctcatggcaggactcatttgccttttgctgggccgcgggaacctggcaacccggaaagctcggcgcaagaggatcctagccagcccggcaaagaggcaccc

SEQ ID NO: 219889 - DNA, 1446 bp, Artificial Sequence
  derived and/or modified sequence
atggacgagggtattccccacctccaggagcgtcagctgttggaacatcgggattttatcggcctcgactacagctctttgtatatgtgcaaaccgaaaaggtccatgaagcgggatgacacgaaagatacgtacaaactgccacataggctgatcgagaagaaaagaagagaccgaattaatgaatgtatcgctcagctgaaagacttgctgcctgaacacctcaagctgaccactttgggccaccttgagaaggccgttgtgctggaactgaccctgaagcatctgaaggctctgacagctttaaccgagcagcagcaccaaaaaatcattgctctccagaatggcgaacgttccctgaagtctcccattcagtctgacctcgacgcttttcactcgggtttccagacatgtgcaaaggaggtgttgcagtatttatcaaggttcgaatcctggacccccagagaaccacgctgcgtgcagcttattaatcacctacacgctgtggcgacacagttcctacctaccccacagctgttaacacagcaggtgccactatccaaaggcacaggcgcacccagcgctgcggggagtgccgctgctccgtgcctggagcgagctggtcagaaactggaacctcttgcttactgtgtgcctgttatccaaagaacccagccatccgctgaactggctgccgaaaacgataccgataccgattctggctacggcggtgaagctgaggccaggcccgacagggagaagggcaaaggggccggggcctctcgcgtaaccatcaagcaggaacccccaggcgaggattcacctgcccctaagaggatgaagttggattccaggggcggaggctcaggcggcggacccggtggcggtgccgcggccgctgcagccgccctgctgggacccgaccctgcagcagccgccgcacttctgcggcctgacgccgctctactttcaagtctggtggcttttggcggaggcggaggtgcaccatttccccaacccgcagccgctgcggcacccttctgtctgcctttctgtttcctaagtccgtcggcggccgcagcgtatgtacaaccctttctggataagtccgggttagagaaatatctgtacccagccgctgccgcagctcccttcccgctgctgtaccccgggattccggcaccagccgctgccgcagcagcagcagccgctgcggccgctgccgccgcagccttcccatgcctgagctccgttttgagtcctcctcctgaaaaagcaggtgctgcagccgctaccctcctaccccatgaggtagcccctctgggggcccctcacccacagcacccgcatggcagaacgcacctgccttttgcggggcccagggaacctgggaaccccgagagtagtgcccaggaagatccctctcagccgggaaaagaagcccca

SEQ ID NO: 219890 - DNA, 1446 bp, Artificial Sequence
  derived and/or modified sequence
atggatgaaggcatcccacacctgcaagagcggcaactccttgagcatagagactttatcggactcgactatagctcgctttacatgtgtaaacccaagagatcaatgaagagagacgataccaaggacacttacaaactgccccatcggctgatcgaaaagaagcgcagggatcggatcaatgagtgtattgcccagttgaaggatcttctccccgaacatttgaaacttactaccctgggccacttggaaaaagcagtggtgctggaacttaccctgaaacatctgaaagcccttactgctcttactgaacaacaacaccagaagattatcgccctgcaaaatggtgaaagatctctgaagagccccatccagtcggatctcgatgcatttcactcgggttttcaaacttgtgcaaaggaggttcttcagtacctttcccggtttgagtcttggactccacgggagcctcgctgtgtgcaactgataaatcaccttcatgcggtcgctacccaattcctccctaccccacagctgcttacccagcaagtgccactgtcgaagggaactggggctccctcagccgctggatccgcggcagcgccatgtcttgaacgagcaggtcaaaagctcgagcctcttgcatactgcgtgccagtcattcaaaggactcaaccgagcgcagagcttgcagctgagaacgacaccgatactgatagcggatacggcggagaagccgaggccaggccagatagagaaaagggcaagggagcaggtgcctcgagggtcacgattaagcaggaaccaccaggagaggattccccggcaccaaagagaatgaaactcgattcaaggggcggagggtccggtggaggcccgggtggaggagcagcagcagccgcggcagcactgctggggcctgatcctgccgcagcagccgccctcctccgccccgacgccgcactgctgtcctcgctggtcgcgtttgggggaggaggtggcgccccttttcctcagcctgcggcagcagcggccccattctgtctccctttttgctttctgtccccaagtgcagcggcagcatacgtgcagccatttctcgataaaagcggactcgagaaatacctctacccagccgcagcagcagcaccgtttccacttctttacccgggtattccagcacccgcggcggcagcagctgcagcggctgccgcagcggccgccgctgctgcttttccgtgcctgagcagcgtgctttcgcctcctccagagaaagcaggagccgcggcggctaccctgctgccacatgaggtcgcaccactcggtgcccctcaccctcaacacccccacgggcgcactcatctgccttttgctggcccaagagaaccgggcaaccctgagagctcggctcaagaggacccatcgcagcccgggaaggaagcgcca

SEQ ID NO: 219891 - DNA, 1446 bp, Artificial Sequence
  derived and/or modified sequence
atggacgaaggaatcccgcaccttcaggaaaggcagctgctggagcaccgggatttcataggcctggactactcgagcctgtatatgtgtaagcccaagcgctctatgaagcgcgatgacactaaggacacctacaagctgcctcaccgcctcatcgagaaaaagcgccgtgaccgcattaatgaatgcatcgcccagcttaaggatctgctcccagagcacctcaagctcaccactctgggtcatctggaaaaggccgtggtcttggaactgacgctgaagcatctcaaagccctgaccgccttgaccgaacaacaacatcagaagatcattgcgcttcaaaatggcgaaagatcactgaaatcgccgattcaatcggatctggacgcctttcactctggtttccagacgtgcgcaaaagaagtgctgcagtacctgtcacggttcgaatcgtggactcctcgcgagcctcgctgtgtgcaacttatcaaccacctgcacgccgtggctactcagttcttgccgacccctcagctcctcacccaacaggtgcccctgtcgaaaggaactggcgcgccaagcgcagccggaagcgcggcagccccatgtctcgaaagagccggccaaaagctggaaccgctcgcctactgcgtgcctgtcatccagcggacccagccttcagctgagctcgctgcggagaatgacaccgacactgactccggttatggaggagaggccgaagcacgaccagacagagaaaagggcaagggcgctggagcctcccgcgtcaccataaagcaggaaccgcctggagaggactcgcccgcccctaagagaatgaaactcgattcccgcggaggcgggtcaggcggcggtccgggaggaggagccgctgcggctgcggcagccttgttgggaccagatccggcagctgctgcagctctgctgcgaccagacgcggcactgctcagctccttggtggcgttcggaggaggaggcggcgcaccgttcccgcaacctgcagcggcggctgcgccgttctgcctgccgttttgcttcctctcaccttccgccgcggccgcgtacgttcaaccttttctggataaatcgggacttgaaaagtatctgtacccggcggcggcggccgcaccttttccgctgctttacccgggcatcccggcgcccgccgccgcggcagcggctgccgccgctgctgcagcggccgcggcagctttcccatgcttgtcctcggtcctgagcccaccgccggagaaggccggggcagcggcagcaaccctgctgcctcacgaagtggccccgctgggagcaccgcacccacagcaccctcatggacggacccacctgccttttgccggcccccgggagcctggaaaccccgaatccagcgctcaggaagatccgtcccagccgggaaaggaggcgccg

SEQ ID NO: 219892 - DNA, 1446 bp, Artificial Sequence
  derived and/or modified sequence
atggacgagggcatcccacacctgcaagagcggcaactgcttgaacatagagattttatcggtttggattattcatctttgtacatgtgtaaaccaaagagatctatgaaacgtgatgatactaaggacacatacaagctgcctcatcgcttgatcgaaaaaaagcgcagggataggataaacgagtgtatcgcccagctaaaggacctcctgcctgaacacctaaagttgaccacgcttggccacctcgagaaggccgtggttctagaactaaccttgaagcaccttaaggccttgacggcactcacagaacaacagcaccagaaaatcatcgccttacagaatggggaaaggtctttgaagtcaccaattcagtctgatctagacgcgtttcactcaggctttcagacatgtgccaaggaagtgttacagtatttgagcagatttgaaagctggaccccccgagagccccgatgcgttcagctgatcaatcatttgcacgctgtggccacccagtttttacccacaccccagctgctgacccaacaagtacctctctccaaagggaccggagcccctagcgcggccgggtccgcagccgcaccttgcctggagcgagcagggcagaagctggagccactcgcatattgtgtaccagtaatccaaagaacccagcccagcgctgaattagcggcagaaaatgacacggatacagatagcggttatggaggagaggccgaagctagacctgaccgggaaaagggcaagggagcaggcgccagcagggtaacgattaaacaggagcctcctggagaggatagcccagccccgaaacgaatgaagctggacagtagaggcggagggagcggagggggccccggtgggggtgccgccgccgccgccgctgcgctgctcgggcctgatcctgctgccgcagctgcattgctgaggcctgacgctgcgctgctgagttcgctggtagctttcggtgggggaggaggagcgcctttccctcaaccagccgccgccgcagcacctttttgccttcccttttgttttctgagcccttcagccgccgcagcctacgtccagcctttcctggacaaaagtggcctggagaaatatttgtatccagccgctgccgctgcgccgtttccgctactgtaccctggaatccctgctccagctgccgcggctgccgctgcggccgcggctgcggctgccgccgcagcctttccctgtcttagctctgtccttagccctccacctgaaaaagctggagctgccgcagccaccttgctccctcacgaggttgctccactcggcgccccgcacccacagcaccctcatgggaggactcaccttcctttcgccggcccacgggagcccggcaatccagaaagttctgcccaggaagacccgtcacaacctggcaaggaggccccc

SEQ ID NO: 219893 - DNA, 1446 bp, Artificial Sequence
  derived and/or modified sequence
atggatgagggtatcccccacctccaggagaggcagctcctggaacatcgtgatttcattggactggattatagttctctgtatatgtgcaaaccaaagagatccatgaaacgcgacgacaccaaagatacatacaagcttcctcatcgcctgattgaaaagaagagacgcgacagaatcaacgaatgtatcgcccagctcaaagatctgctccccgagcacctcaaactgaccactttgggccatcttgagaaagctgtcgttctcgagctgacccttaaacatctgaaggcccttacagccctcaccgaacagcagcaccagaagatcatcgcccttcagaatggtgaaagatccctgaaaagcccaatccaaagtgacctggacgctttccactccggcttccaaacctgtgcaaaggaggtcctccagtacctctccaggtttgagagttggacaccacgcgagccacgttgtgttcagctcataaaccacttgcatgccgtagctacccagttcttgcctacccctcagctcctgacccagcaggttccactgtctaagggaacaggtgcaccaagcgctgcaggttctgccgccgccccctgcttggaacgtgcaggccagaagctcgagcccttggcttattgtgtgcctgttattcaacgtacccagcctagcgcagagctcgcagccgaaaacgacacagacactgattctggttacggtggcgaggccgaagcccgcccagacagagagaagggaaagggtgcaggcgctagtagggttactatcaaacaagagccacctggagaggactcccccgctcctaagaggatgaagctggatagcaggggaggcggttctggaggtggccctggtggcggcgcagccgctgcagccgccgctctgcttggccccgaccccgccgcagcagccgctcttttgcgtccagatgctgccctgctttcctccttggtcgctttcggtggaggaggtggagcaccattcccccagccagctgccgccgctgcccccttttgcctgccattctgctttctgtctccatctgcagcagctgcatatgtgcaaccattccttgacaaaagtggtctggagaagtatttgtaccccgccgccgcagccgctcctttccccctcctctatcccggaatacccgcaccagctgcagccgctgccgctgctgctgctgccgccgccgcagctgccgcctttccttgtctctcctccgtcctgtcacccccacccgagaaggccggtgctgctgccgctaccctgcttcctcacgaggtcgcacccttgggtgctcctcacccacagcacccacacggcagaacccatcttccttttgctggaccaagggagcccggcaaccctgagtcaagcgcacaagaggatccttctcagccaggaaaagaggcaccc

SEQ ID NO: 219894 - DNA, 1446 bp, Artificial Sequence
  derived and/or modified sequence
atggatgagggaatcccccacctgcaagagagacagctccttgaacatcgcgattttatagggctggattattcttctctatatatgtgcaaaccaaaacggtctatgaaaagggatgatactaaagatacttacaaactccctcataggttgatagaaaaaaaacgacgcgatcgcataaatgaatgcatcgctcagctcaaagatttactacctgaacacctcaaactcactactcttgggcaccttgaaaaagccgtggtcctggaactgactctaaaacacctcaaagctcttacagccttaactgaacagcagcatcagaaaatcatcgccctccagaatggagagagaagtcttaaatctcccattcagagtgacctggatgcgtttcattccgggtttcagacttgcgcaaaagaagtcctccaatacctttctcggttcgagagttggacaccacgagaacctaggtgtgtccagcttataaatcatctccacgctgttgccacacagttcctacccactccccagctcctaacacaacaggtcccattatctaaaggaacaggagccccctcagctgccggaagtgcagccgcaccatgtctcgaaagagccggacagaaactcgaaccactggcctattgtgtccccgtcattcagagaacacagccaagtgctgaactggctgcagaaaacgatactgatactgattctggatatgggggggaagccgaagcccgacccgatcgggaaaaagggaaaggagcaggagccagtagggtcactataaaacaagagccaccaggggaagacagtccagcccctaaaaggatgaaactcgattcaagaggaggagggtcaggagggggacctggaggaggagctgctgccgccgcagcagctctcctaggacccgatcccgcggctgccgcagcccttctacgacccgatgccgctctactgtccagtctcgtggcattcggaggaggagggggggcaccctttccacaacccgcagccgcggccgcccctttttgtctccccttttgcttcctctccccatcagcagccgccgcctatgtacagccattcctagataaatctggactagaaaagtatctataccctgctgcagccgctgctccctttcctctcctttatccaggaatacccgcccccgcagcggcagctgctgccgcagccgcagccgccgccgccgctgccgctttcccatgtttatcttctgtgttgtccccccccccagaaaaagcaggggctgcagccgctacattactaccccatgaagtcgcgccacttggggctccacaccctcagcatccacacggaaggacacacctaccatttgcggggccccgggaacctggaaacccagagtcctcagctcaggaagatccgtcccaacctgggaaagaagcccct

SEQ ID NO: 219895 - DNA, 1446 bp, Artificial Sequence
  derived and/or modified sequence
atggatgaaggcattccccatttgcaggagaggcagctgcttgagcatcgcgacttcataggactggactacagttcactgtacatgtgtaaaccaaagcgctctatgaaaagagatgatacaaaggatacgtataaacttccacacagactgatcgagaagaagaggcgcgaccgcataaatgaatgtattgcccaacttaaggatctgttgcctgaacatctgaagttgacgaccctgggacatcttgagaaagctgtggtccttgagttgactctgaagcatctgaaagcgctcaccgcactgacagaacagcaacatcagaaaatcatcgccctgcagaatggggagaggagtttgaagagtcccatccagtccgatcttgacgcgtttcactctggtttccagacgtgcgcaaaggaagtgctccagtatcttagcagatttgagtcttggactccaagagaacccaggtgcgtacagctcatcaatcacctgcatgctgtggccacacagtttctccctacacctcaactgttgacgcagcaggtgcccctgtccaaaggaacgggggctccctccgcggccggaagcgcggccgctccttgtctggaaagggcgggacagaagttggaacctctcgcttactgtgtgccagtaatccagagaacccagccctccgcagagcttgctgcagaaaacgataccgacactgatagcgggtatggcggagaagccgaggcaaggcctgaccgggagaaaggtaaaggtgcaggtgccagcagggtgactataaagcaggaacctcctggagaggacagccctgcaccaaagagaatgaaactcgacagtcgggggggcggcagtgggggtggacccggagggggtgccgcagctgccgctgctgctctgcttggccctgatccggccgccgccgcagctctgttgcggcctgatgccgctttgcttagttccctcgtcgcctttggaggcggagggggagctcccttcccacagcctgctgccgccgctgctccattctgcctcccattctgttttttgtctcccagcgcggccgccgcctacgtgcagccattcctggataagtcaggactcgagaagtacctgtatccggcggctgctgcggctcccttcccgcttttgtaccctggtatacccgcaccagcagccgccgctgctgctgcggccgctgccgccgctgccgcggcagcctttccttgcttgtcaagtgtgctttcaccgccaccagaaaaggccggtgccgcagccgcgacactgctgcctcacgaagtggcgccactgggagctccccaccctcagcacccacacggacggacacatctgccctttgctgggccgcgagaacctgggaaccccgaatcttctgctcaagaggacccttcacagccaggcaaggaagcccca

SEQ ID NO: 219896 - DNA, 1446 bp, Artificial Sequence
  derived and/or modified sequence
atggatgaggggattccgcatcttcaagaaaggcagctccttgagcacagagatttcatcggcttggactactcatcgctgtacatgtgcaagccgaaacgcagcatgaagcgggacgataccaaggatacttacaagctcccgcacaggctgattgagaagaagcgaagggatcgcatcaacgaatgtatcgctcagcttaaggacctgctcccagaacacctgaagctcacgactctcggccacctcgaaaaggctgtcgtgctcgagcttaccctcaaacatctgaaggccctcaccgcccttactgagcagcagcaccagaaaatcatcgccctccagaatggtgaacgctctctgaagagccctattcagtcagacctcgatgcctttcactctggattccagacctgtgctaaggaggtgctccaatatctctcccgcttcgaatcctggaccccgcgcgaaccgcggtgtgtccaactcatcaatcacctgcacgcagtggcgacgcagttcctgccaaccccgcagctgctgactcaacaggtcccgctgtccaagggaaccggagcgccgtcggcagcaggatcagccgccgcgccgtgcctcgaaagggccggtcagaagctcgagcctctggcgtactgcgtgcctgtgatccagcgcacccagccctcagcagaactcgcggctgaaaacgatactgataccgactccggatacggaggggaagcagaggccagacctgaccgcgaaaagggaaagggcgctggcgcatcccgggtgactatcaagcaggagccgcctggcgaagattcaccagctcctaaacgtatgaaactggactcgcgcggaggcggctcgggaggaggaccgggaggcggagctgcagctgctgccgccgctctgctgggaccagacccggcagcagccgctgctctgctccggccggacgcagcactcctgtcgtcgttggtggcattcggaggaggcgggggagcgccattcccacagcccgcggctgcagcggcgcccttttgtttgcctttctgctttttgtcgccgagcgcggcagccgcttacgtgcaaccctttctggacaaatcgggcttggagaagtacctgtacccagccgcagctgcagccccatttccgctcctctacccaggaatcccagctccggccgctgcggctgccgcagccgccgcggccgccgccgctgccgccgccttcccgtgtctcagctcggtcctgtcgcctccaccagagaaagccggagccgcagcagcgaccctcctgcctcacgaggtggcgccactgggggcccctcatccgcaacatccacatggccggacccatctgccgttcgctgggcccagagagccagggaacccggaaagctccgcccaggaggacccttcgcagcccggaaaggaagcgccc

SEQ ID NO: 219897 - DNA, 1446 bp, Artificial Sequence
  derived and/or modified sequence
atggatgagggtatccctcatcttcaggaacggcagctccttgaacaccgtgatttcatcggtctggattactcctcgctgtacatgtgcaagcctaagaggtccatgaagcgggacgacacgaaggatacgtacaagctcccccatcgccttattgagaaaaaacgtcgtgataggatcaacgaatgtatcgcacaactcaaggaccttctgccagagcacctcaagctgactactcttgggcatctcgagaaagccgttgtcctcgagctgactttgaaacatcttaaagcactgactgccctcaccgaacagcagcatcaaaagatcattgctctgcaaaacggagaacgctcgctgaagtcaccaatccaatctgatctcgatgcatttcatagcggatttcagacctgtgctaaagaggtgctccagtatctctcaagattcgagtcgtggaccccccgcgaaccgcgttgtgtgcagctgatcaaccatcttcatgccgtcgcaacccaattcctgccaaccccacagctcctgacccaacaggttcctctttcaaaggggactggtgcaccctctgctgccgggtcagcagctgcaccttgtctggaacgcgcaggacaaaagctggaacctctggcttattgtgtgcccgtgattcaaaggacccagccctccgccgagctggcggcagaaaatgatactgataccgacagcggatacggaggtgaggcggaagcacggccagaccgggaaaaaggtaagggcgcaggagcgagcagggtcactatcaagcaagaacctcctggagaagatagccccgcccctaagagaatgaagctggactccagaggcggaggttccggaggcgggcccggtggaggtgccgcagcagccgcggcagccctgctgggcccagaccctgcggcagcggcagcgctgcttagacctgatgcagcacttctgagctccttggtcgcatttggcggtggtggcggtgcccccttccctcagccagcagccgcagcggcaccattctgtctgcccttctgcttcctgtccccatctgccgcggcggcttacgtgcaaccttttcttgataagtctggactcgagaaatacctctacccagcggcagcggctgccccatttccactcctctacccgggaatcccagctcctgcggcagctgcggcagcagcggctgcagcggcagccgcagccgccgcatttccgtgcctttcatcggtgctgtcgccccctcctgaaaaggctggagcagcagcagcgactttgctccctcacgaggtggcacctctgggtgcccctcatccccaacatcctcatggcagaactcacttgccattcgctggaccaagagaaccgggaaatccagagtcgtcggcgcaggaagatccaagccagccaggaaaggaagcgcct

SEQ ID NO: 219898 - DNA, 1446 bp, Artificial Sequence
  derived and/or modified sequence
atggatgaagggattccccacctgcaggaacgccagctgcttgaacatagagatttcatcggattggattacagtagtctgtacatgtgcaagccgaagcgctccatgaaaagggatgatacaaaggacacctataagctcccccatcgtctgattgaaaagaagcgccgggatagaatcaatgagtgcattgcccagctgaaggatctgctccccgaacatctcaagttgaccacactcggacatctcgagaaggcggtcgttcttgaactgacactgaagcaccttaaagcgctgacggcactgacagagcaacagcaccagaaaattatcgccctgcagaacggtgagagatcccttaaaagtcccattcagtctgatctagatgcctttcacagtggcttccagacatgcgctaaagaggtgctccaatacttgtcgagattcgaaagttggaccccccgggaaccccgctgcgtccaattgatcaatcatcttcacgccgtggctactcagtttctgcctaccccacagcttctgacacagcaggttccactgtccaagggcacaggcgccccatccgcagccggaagcgccgctgccccctgtttggagagagccggacagaaactcgagcccctggcttactgtgtgcccgtaatacagagaacacagccttctgccgaactggccgctgagaatgatactgacacagatagcggctacggcggtgaggccgaagcgcgccccgacagagagaagggaaagggcgctggcgcctctagggtgaccatcaaacaagagccgcccggagaggactctcctgctccgaagagaatgaaactcgattcacgcggcggcggcagcggtggcggccccggcggtggagcggctgcagccgccgccgccttgctcggtccagatcctgctgcagcagccgccctgctgcgaccagatgctgctctgttgtcgtctctcgttgcttttgggggcggcgggggagccccctttcctcagcctgctgctgctgcggccccgttttgtctgcctttttgcttcctcagcccaagcgccgctgctgcatacgtgcagccgttcttggataaaagcggactagagaaatatctgtatcccgcagctgccgctgcacccttccccctcctctaccctggtatcccggcacctgccgcagccgccgccgctgctgctgccgcagctgctgcagccgccgcatttccgtgtttgtcaagcgttttaagcccccctcctgagaaagccggcgctgctgcagctacgcttctgcctcatgaggtcgcaccgcttggtgcaccccatccacaacacccccacggtaggacccatctgcctttcgccggccccagggagccaggaaaccctgaaagtagcgcacaggaagacccaagccagcctggcaaagaggcaccc

SEQ ID NO: 219899 - DNA, 1446 bp, Artificial Sequence
  derived and/or modified sequence
atggacgagggtattccccacctgcaggaacggcagttgttagaacaccgggattttatcggcttggattatagttcactttatatgtgcaaaccaaaacgaagcatgaaaagggacgacactaaggacacttacaaactaccgcatcggctcattgaaaagaaacgccgagaccggatcaacgagtgtatagctcagttgaaggacttactgccagaacatctcaagctgacaaccttaggccacctagaaaaagcagtcgttcttgaactgactttgaagcatctcaaggcccttaccgccttaacggagcaacaacatcagaagatcattgctctccagaatggagaaagaagcctgaaaagtccaatccagagcgatctggatgctttccactcgggcttccagacctgcgcaaaggaggtactccagtatttgtcgaggtttgaaagctggactccgcgagagcccaggtgtgtgcagctaattaaccatctgcatgccgtagcaacccagttcttgccgacaccacagcttttaacgcagcaggtccccctgtccaagggaacgggagcgccctcggcagctggcagcgccgccgctccctgtctcgagagggccggccagaaactggagcctctcgcctattgcgtgccggtgatacaacgcacacagccatcagcagagctggccgccgaaaatgataccgatacagatagcggctatgggggagaggcagaggctcggcctgacagagagaagggcaaaggggcaggcgcatcaagggtgacgatcaagcaggagcctcctggggaagactcccccgcaccaaaaaggatgaaactcgactcacggggcggaggctcagggggcggaccgggtggcggcgccgccgctgcggccgccgccctgcttgggcctgaccccgcagctgctgctgcccttctgagaccagacgcagccctcctatccagtctcgtggccttcgggggcggtgggggggcacctttcccccagcctgccgctgctgctgccccattctgcctgccgttttgttttttgtcaccctcagcggcagctgcctacgtgcaaccttttctggacaaatccgggctggagaaatacctgtatccagctgctgccgccgcacctttccctcttctctatccaggtatccctgcccccgcagctgccgccgcggccgcagctgctgcagcagctgccgctgctgccttcccctgtctttcttcagtgctgtctccacccccggagaaagcaggagccgcagccgccactctgttgcctcatgaggttgcccctcttggcgcgccacacccccagcacccacacggacgtactcacctgcctttcgccggcccaagagaaccaggtaaccctgagtcttcggcacaagaagacccttctcaacccggaaaggaggctcca

SEQ ID NO: 219900 - DNA, 1446 bp, Artificial Sequence
  derived and/or modified sequence
atggacgagggtatccctcatctgcaggagaggcagctccttgagcacagagactttattggtctagactacagctctctgtatatgtgtaaacccaagagatcaatgaagagagatgatactaaggatacatacaaactgccgcataggcttatcgagaaaaaaaggcgagacagaatcaacgaatgcattgctcagcttaaagacttactgcccgaacacttaaagctgacgacccttggacatcttgaaaaagcagtggttctcgagttgaccctgaagcatcttaaggctctgaccgcgctgacagaacaacagcatcaaaaaatcatcgcactgcagaatggtgaacgttccctgaaatcacccatccagtccgatttggacgcatttcatagcggctttcagacctgcgctaaagaggtcttacagtatctgtctcggtttgaaagttggacaccgagagagcctaggtgtgtacagttaattaatcatctgcatgcggttgccacgcagttcctccctaccccacagctcctcacccagcaagtcccgctcagtaaaggcaccggggccccgtccgccgcaggttctgcagctgcgccctgccttgagagagccggccagaagcttgaacctttggcctactgtgtgccagtaattcagagaacccagccctcagccgagctggctgccgagaacgacaccgacactgattcgggatacggcggcgaggccgaagctcgcccagatagggagaagggaaagggcgctggtgcatctagggtcaccatcaagcaggaaccccctggtgaagactcacctgctccgaagagaatgaaactggactcccgcggtgggggctctgggggcggcccagggggaggagccgccgctgccgctgcagccctcctaggcccagatccagccgccgcagccgcactgctcaggccagatgctgcactcctgtctagcctagttgcattcgggggcgggggcggagctccattcccacagcccgccgctgcggccgcacctttctgcttacctttctgtttcctatctccttcagcagccgcagcctacgtccagcctttcctggataagagcggcctagagaagtacctgtatcccgccgccgcagctgcccccttccctctgttgtaccctggtatcccagcccccgcagcggcagccgcagcggcagctgctgccgctgcagccgcggcagcttttccctgtctttcgtcagtactcagccccccgcccgagaaggctggcgctgccgctgcaacgcttctgccacatgaagtcgcgccactaggcgcaccgcaccctcagcacccccatgggcgaacacacctgccatttgcaggccctcgagagcctggcaacccggagtcgagtgcccaggaagatccctcccagccgggaaaggaggcaccc

SEQ ID NO: 219901 - DNA, 1446 bp, Artificial Sequence
  derived and/or modified sequence
atggacgaaggaattccacatctgcaggagcgacagctgcttgaacatagagactttatcgggctggactacagctccctgtacatgtgtaaaccgaaacgctcgatgaagagagatgatactaaggacacttacaaactgcctcacaggctgattgagaagaaacggcgcgatcgcattaatgagtgtatagcacaactgaaggatcttctgccagagcatctcaagctgaccacccttggacatctcgagaaggcagtggtgttggagctcacgctgaagcacctgaaggcactgacggcactgactgaacagcagcaccagaagattatcgcattgcaaaatggagaacggagtctcaaaagccctattcaatcagatctcgacgcattccattctggttttcaaacctgcgccaaagaagtcctgcagtacctttcaagatttgaatcatggacccccagagagcctcgctgtgtgcaacttatcaaccacttgcatgccgtggccactcagttccttcctaccccgcagttgcttactcagcaagtgcctctgagcaaaggaaccggtgccccctccgcagcaggaagcgcagcggcaccctgcctggagcgtgcaggacaaaaacttgaaccactggcatactgtgtgccggtcatacaaaggacccaaccttccgccgagcttgcagcagaaaacgatactgacactgattcgggttacggaggcgaagccgaagcaagacccgatcgagaaaagggcaagggagcaggagcgagtcgagtcaccattaagcaggaacctcctggagaggattcgcctgcaccaaagaggatgaagctggactcgcggggtggagggtccgggggaggccccggcggaggggcagccgctgctgcagcggcacttctgggccctgatccagcagcagccgctgcacttcttcggccagatgccgcactccttagtagtcttgttgcatttggtggtggcgggggagccccttttccacaacctgcggcagcggcagctccgttctgtctccctttttgcttcctttccccttccgcggctgccgcctatgtgcaacctttccttgacaaatcaggtctggaaaagtacctctacccagcggcggcagctgcaccatttccacttctttaccccgggatcccagcgccagctgcggcggctgcagcggccgcagctgccgcggctgctgcagctgcgttcccatgtctctcatcggtcttgtcgcccccaccagagaaggcaggcgcggcggcggcaacgctgctgcctcacgaagtggccccacttggcgcgccacacccccagcatcctcatggtcgcactcatctgccgtttgcaggacccagggagccaggtaacccggaatcctcggcacaggaagatccctcacaacctggaaaagaagcaccg

SEQ ID NO: 219902 - DNA, 1446 bp, Artificial Sequence
  derived and/or modified sequence
atggacgagggtattccccatctgcaagagcggcagctgctggaacaccgggactttatcggcctcgactactcaagcctgtacatgtgcaagcctaagcgctccatgaagagagacgacactaaggacacctacaaactcccgcataggcttatcgaaaagaagcggagagatagaatcaatgagtgcatagcccagctgaaggatcttttgcctgagcacctcaagctcaccactcttggacatctggaaaaggctgtggtgctggaactgaccctcaagcatctgaaggccttgactgcactcactgaacagcaacatcagaaaatcatcgctctccagaacggagaaagatcactcaaatcgcctatccagagcgatctggatgcgttccactccggattccagacttgtgcaaaggaggtcctgcaatacctttctcggtttgagtcttggacccctcgggagccacgatgcgtgcagctgatcaaccaccttcacgccgtggctactcaattcttgcctaccccacagctgctgactcaacaggtcccgctgtcgaagggaaccggcgcgccctccgcggcaggctcggccgccgccccctgcttggagcgcgcgggtcagaaacttgaaccgctcgcatactgtgtccctgtgatccaaaggacccagccgtctgccgaactggccgctgaaaacgacactgataccgacagcggatacgggggtgaggcggaagccagaccagatagagaaaagggtaagggagccggcgcgtcccgcgtcacgatcaaacaggagccgcccggagaagatagcccggcgcccaagcggatgaaactggattcccgcggcgggggctcgggaggaggaccgggcggcggcgccgctgccgcggcggccgcactgctgggaccagaccctgcagcggcggccgcgctcttgcggccggacgccgcgctgctttcctctttggttgctttcggaggaggagggggtgccccgttcccgcaaccggcggcggcagccgccccattctgtctccccttttgtttcctttccccgtccgccgcggccgcatacgtgcaacctttcctggacaagtcaggtctggaaaagtatctgtacccagctgccgctgcagcccctttcccgcttctctaccccggcatcccggcacccgcagccgcagcagccgctgcagcagccgcggcggcagctgcagccgcgttcccgtgcctgtcgtccgtgctgagcccgccaccagagaaagccggtgctgccgctgctactctgctgccgcacgaagtggcccctctgggtgccccccacccccagcacccacatgggcgcacgcacttgcctttcgcgggaccgagggaaccgggaaatccggagtcgagcgcccaggaggacccttcgcaaccaggaaaagaagccccc

SEQ ID NO: 219903 - DNA, 1446 bp, Artificial Sequence
  derived and/or modified sequence
atggacgagggcatccctcatttacaggagaggcagctcctcgaacacagggacttcatcggcctagactatagttccctctacatgtgtaagcccaaacgcagcatgaaacgtgacgacaccaaggacacatacaaactaccccaccgccttatcgagaaaaagcggagagacaggatcaacgaatgtatcgcccagctgaaggacctccttccagaacacttgaaactgaccacccttgggcatctggagaaagccgtggtgctcgaactgacccttaaacacctgaaagcgctcaccgcactgactgagcagcagcaccagaaaataatcgcccttcagaatggagagaggtctctgaaaagtcccatccaaagtgacctggatgcattccactccgggttccaaacctgcgcgaaagaagtcctgcagtacctgagcaggttcgaaagttggactccaagggaacctcggtgcgtgcagcttatcaaccacttgcacgccgtggccacccaatttctgccaacccctcaactactcacgcagcaagtccccctttccaagggcactggggctccatctgcggctgggagtgccgccgctccatgtctggaacgcgctggacagaaactggagcccctagcttattgtgtgccggtcatccagcggacccagccgagcgcggagctggctgctgagaacgatacagacacagacagcggttacgggggtgaggccgaggcacggccagaccgggagaagggcaagggcgctggggcttccagggtcacaataaaacaggaaccacccggagaagactccccagccccgaaaagaatgaagctggacagtagaggcggaggatccggcggcgggcctgggggcggcgcggctgctgccgcagcagcactccttgggcctgatcccgctgctgcagcagccctcctacggcctgacgcagctctgctgagcagtctcgttgcctttggaggcgggggaggggccccctttcctcagcctgccgccgccgccgcgcccttctgcctgccattctgctttttaagcccatcggcagccgctgcctacgtgcagccattcctggataagtctggcctggaaaaatacttgtaccccgccgcagctgccgctccatttcccctgctgtatcccggaatccctgcacccgccgccgctgccgccgccgccgcagccgcagcggccgctgccgcagcctttccttgcctttcgtcagtgttatcacctcctcctgaaaaggctggtgccgcagctgcgacactgctgcctcatgaagtcgcccctcttggtgctccacaccctcaacacccgcatgggaggactcacctgccgttcgcgggaccacgtgagccaggcaatccggagagctcagctcaggaggatccctcccaaccgggcaaggaggcccct

SEQ ID NO: 219904 - DNA, 1446 bp, Artificial Sequence
  derived and/or modified sequence
atggacgaaggaatcccgcacctgcaagaacgtcagctcctggagcacagggactttatcggactggactacagcagcctttacatgtgcaagccaaaacgctccatgaaacgggatgataccaaagacacctacaagctcccgcatcggctcattgagaaaaaacggcgcgaccgaatcaatgagtgtatcgcgcagctgaaagacctcctgccggaacatctgaagctgacgaccctgggacacctggagaaagcagtcgtgctggaactgactctgaagcaccttaaggcactgaccgctctcaccgaacaacagcatcagaaaatcattgcgctgcagaacggagaacgctcgctgaagagccccatccagtcggacctggacgcctttcactcgggattccagacctgcgccaaggaggtgctgcaatacctgtccagatttgaatcatggaccccgcgagaacccaggtgtgtgcagctgatcaaccaccttcacgctgtggccactcaattcctcccgacgcctcagctgctcactcaacaggtcccgttgagcaaggggaccggagccccgagcgcagccggctcagccgctgcgccgtgcctggagcgcgcaggccaaaaactggaacccctggcttactgcgtaccggtcatccagaggactcaaccgtccgccgaactggccgcagagaacgacaccgataccgactcgggatatggaggcgaagcggaagcccgacccgatcgcgagaagggaaaaggagccggagcctcccgcgtgactatcaagcaagagccgccgggggaagattcaccggctcccaagagaatgaagctggactccagaggtggaggatcgggcggaggacctggcggcggtgctgccgccgcggcagctgctctgctggggccggaccccgcagcagcggcggcgctgctgcggccggacgccgccctgctgtcaagtttggtggcgttcgggggtggaggaggagcaccattcccgcaaccagctgctgccgcggcaccattctgtctgccgttctgctttttgtccccgagcgcggcggccgcatacgttcagccgtttctcgacaagtccggcctggaaaagtacctgtacccagctgccgcagcggcgccttttcctctgctgtacccgggaatcccggcgcccgcagcagcagctgcggcagcagcagcggccgccgcagccgccgcagctttcccttgtctctcatcagtgctcagccctccaccggagaaagccggagcggcggccgccactctgctgccccatgaagtggccccgttgggcgccccacatccacagcaccctcacggccggacgcacttgccgttcgccggaccacgtgagccgggaaatccagaatcgtccgcccaggaggacccttcgcagcctggaaaggaagcccca

SEQ ID NO: 219905 - DNA, 1446 bp, Artificial Sequence
  derived and/or modified sequence
atggatgagggcataccgcacctgcaagaaagacagctcttggagcatcgagatttcatcggtcttgactatagcagcttgtacatgtgtaaacctaagcgcagcatgaaacgggacgacacaaaggatacatacaaactgccccacaggttgatcgagaagaagcggcgcgatagaattaacgagtgcatcgctcagctgaaagacctcctgcctgaacaccttaaactcacaaccctcggtcatctcgaaaaggctgtagttctggagcttacactgaagcacctgaaagccttgaccgcactcaccgagcagcagcaccagaagattatcgccctgcagaacggggaaagatctctgaagtcccccatccagagcgacctggacgcatttcactccggttttcagacttgtgccaaggaggtgctgcaatatctctcaagattcgagagttggacacctagagaaccaaggtgcgtccagctcattaaccaccttcatgccgttgctactcagttcctcccaactccacaattgctgacacagcaagtaccacttagcaaagggacaggagccccatctgctgcagggagcgcggcagctccatgcctggaaagagccggacaaaaactggaacctctcgcttactgtgtccccgtcatacaacgcacccagccatcagccgagcttgctgccgaaaacgacaccgataccgatagcggttacggaggcgaagccgaggcacgcccagatagggagaaaggcaagggagctggcgccagtcgcgtcactatcaagcaggagccgccaggggaggattcacccgccccaaagcggatgaaactcgacagtcgggggggaggatctggaggaggacctggcggaggggcagccgcagccgctgctgcgttactcggaccagatcccgctgccgctgctgcactcctccggcctgacgctgcccttctgagttccctggtcgcttttggcggcggaggaggcgccccatttccgcaacctgctgccgcggcagcccccttttgccttcccttttgctttttaagtccctccgctgctgccgcgtacgtacaaccatttttggacaaatcgggactggaaaaatacctgtacccggctgccgcagctgctcctttccctctcctttacccgggaatacctgcccccgcagctgccgctgctgccgctgcggctgctgccgctgccgccgctgctttcccctgtttgtctagcgtcttatcccctccccccgaaaaagctggcgccgcagcggcaaccctgctgcctcatgaggtggctccccttggagccccacacccacagcacccccatggcaggacccaccttccttttgccgggccgagagagccaggtaaccctgagtcctcagctcaggaggatcctagtcagccaggaaaggaggctccg

SEQ ID NO: 219906 - DNA, 1446 bp, Artificial Sequence
  derived and/or modified sequence
atggacgagggcatcccacatttacaagagcgtcagcttctggagcatcgcgacttcattgggctggattattcctctctctatatgtgtaagcccaagagatcaatgaaacgtgacgacacaaaggatacatacaaattacctcatcgcctgatcgagaaaaagcgtagggaccggatcaacgaatgcatcgcacagttgaaggatcttctgccggagcacctaaagcttactacccttggtcacctcgagaaggcggtggtgttggagttgacactgaagcatctcaaagcgctaactgctttaacagagcaacagcatcaaaaaatcatagcgctgcaaaatggagagcgatccctgaagagccctattcagtcagatctagatgcttttcattccggtttccaaacctgcgcaaaagaggtgttgcaatatttgtctcgtttcgagtcttggactccgagggagccacggtgcgtacaattgattaaccaccttcacgccgtcgctacgcagttcttgccgaccccgcagctattgactcagcaagtgccactgtccaaaggaaccggtgctccttccgcggcgggtagtgccgccgctccctgccttgaacgcgccggacagaaattggagcctctcgcctattgcgtgccggtcatacagcgtacccagccgtctgcagagctggcagcagaaaacgacaccgatactgattctggttacggcggcgaagcagaggcccgtcctgatcgagaaaagggtaaaggtgctggggcgagccgggtgaccatcaaacaggaacctcctggggaggattctccggccccgaagcgcatgaaactggactcgaggggtggtggtagcggtggcggccctggcgggggggcagcagcagcagccgccgcgttactcgggccagatcctgctgccgctgccgcgctgctacgacccgatgccgccctcctctcaagtctagtagccttcggaggaggagggggggcgccgttcccacagcctgctgctgctgcagctccgttttgccttccattttgctttctttccccttcagctgctgcagcatacgttcaaccgttcctagacaagagcggacttgagaagtatctctatccggctgcagccgcagctcccttccctcttctttaccctggaattccagcccccgcagctgctgccgccgcggccgcagctgcagcagctgccgccgccgcttttccttgcctgagctcggttcttagccccccgccggaaaaggccggtgctgcagccgcaacgctgctgccccatgaggttgcaccgctaggggcgcctcatccacaacatcctcacggacgtacacatttgcccttcgcaggtccccgagagcccggcaatcctgaatcgtctgcccaagaggatccttctcaaccggggaaagaggccccc

SEQ ID NO: 219907 - DNA, 1446 bp, Artificial Sequence
  derived and/or modified sequence
atggatgagggcatacctcacctgcaggaaaggcaacttctcgagcatagggacttcattggactggactactccagcttatacatgtgtaagcctaagaggtccatgaagcgggatgatacaaaggatacttacaagctaccacaccgcctaatagagaagaaacggcgggataggatcaatgagtgcatcgcccaattgaaggacctcctgcctgaacaccttaagctcactaccttggggcacctggaaaaggcagtggtgctcgagctcaccctcaagcacctgaaagcactgactgcgctcacagagcagcaacatcaaaagataatagccctgcagaacggtgagcgttctctcaagtcacctatccagtctgatctggatgcgtttcacagcgggttccagacatgtgccaaagaggtgctgcagtatctgtcccgttttgagtcctggacccctcgggagccccggtgcgttcagctgatcaatcaccttcacgccgtagccacccagttcctgcccaccccccagctgctaacgcagcaagtgcccctatccaaagggacaggtgctccctctgctgcaggttctgctgcggccccctgtcttgaacgggctggtcagaaactcgagccgctggcctactgcgtgcccgtcatccagcggacccaaccatctgcggaactcgccgctgaaaatgacacagataccgattccgggtacggtggcgaagctgaagcgagaccagatcgggaaaaaggcaaaggtgccggagcctccagagtgacaattaaacaggagcctccgggtgaggacagcccggccccaaagagaatgaagctagatagcagaggaggcgggtctggaggcggacctggaggaggcgccgccgctgcagctgctgcgctcctggggcctgaccctgctgccgccgctgcactgctgcgaccggacgccgccctactaagttcccttgtggccttcgggggaggcggaggagcgccgttccctcagccagcggccgccgctgcccctttttgccttccgttttgcttccttagcccgtctgcggccgcagcttacgtacaaccatttctcgataagtctgggctggaaaagtatctgtatcctgctgcagccgccgcccctttccccctgctctaccctggcatccccgccccggccgccgcagctgccgctgccgccgctgctgctgcagcagccgctgcattcccctgcctgagtagcgtgttgtccccacctcccgagaaagctggagccgcagcggcgaccctcctgccccatgaggttgctccactcggagctccccacccacagcacccccacggcaggactcacctgcctttcgcaggacccagagaacccgggaaccccgagagctctgcccaggaggatccctcgcagcccggcaaggaggcacct

SEQ ID NO: 219908 - DNA, 1446 bp, Artificial Sequence
  derived and/or modified sequence
atggacgaaggaattccacatcttcaggagcggcagttgctggagcacagggacttcatcggattggattactcttccctctacatgtgcaaaccgaagagatccatgaagcgggatgacaccaaggatacttacaaactccctcacagactgatcgaaaagaagaggcgagacaggatcaacgaatgcatcgctcaactgaaggacctgctgcctgaacacctgaagctgactactctcgggcatttggagaaagctgtcgtgctggagctgaccctgaagcatctgaaggctctgaccgcactgactgagcagcaacatcagaagatcatcgctttgcagaacggagaacgatctctgaaatcgccaatccaatcggatctcgacgcgttccactcgggattccaaacttgcgccaaagaggtgctgcagtacctgtcccggttcgagtcgtggaccccgcgggaacctagatgcgtgcagcttatcaatcaccttcacgctgtggccacgcaattcttgccgactccgcagttgctcactcagcaggtgccgctgtccaaggggaccggtgctccgtccgcagccggtagcgccgcggccccatgtctggagcgcgcaggacagaaactcgagcctctcgcgtactgcgtgccggttatccagcggacccagccatccgccgaactcgccgcagaaaacgataccgataccgatagcggctacggtggggaagcggaggctagaccggatcgggaaaagggcaagggagcgggcgccagccgcgtgaccatcaagcaagaaccaccgggagaggattcccctgctccgaaacggatgaaactcgattcaagaggcgggggatcaggaggaggaccaggaggaggcgcggccgcagctgctgcagcattgttgggaccggatccggcagcggcggcggcactgcttcggcctgacgccgcgctgctgtcgtcgctcgtggcgttcggcggtggagggggtgccccgtttccgcagccggcagctgcggctgcaccgttttgcctgcctttctgctttctgtcgccatccgcagccgcagcctacgtgcaacccttcctggacaagtcgggactggaaaagtacttgtacccggccgccgcggcagcgccgttccccctgctgtacccgggaatcccagcgcccgccgccgcagcggccgcggcggcagcggccgcagcagctgccgcagctttcccatgcctgtccagcgtgctgtccccaccgccggagaaggcgggagctgcagccgcgaccctgctcccgcatgaagttgcacctctcggtgcacctcatccccagcatccacacggacggactcatctgccatttgctggacctcgggaaccaggcaatccggaatcaagcgcgcaggaggacccgtcccagcccggaaaagaagcacca

SEQ ID NO: 219909 - DNA, 1446 bp, Artificial Sequence
  derived and/or modified sequence
atggatgaagggattccgcatctccaagagcggcagctgctggagcatagggattttataggactcgactactccagtctatatatgtgcaagccaaaacgtagcatgaagcgtgatgacaccaaagatacctataagcttcctcaccgcctgatcgaaaagaagcgtcgagaccggatcaatgagtgcatcgcacagttgaaagatttgctgcccgagcacctgaaactgactaccctagggcatttggaaaaggcagtggtcctggagctgactttgaagcacctaaaagcattgacggcactgaccgagcagcaacaccagaagattattgctctgcagaatggtgagcggagcctcaagtctcccattcagagcgacctcgacgctttccattcagggtttcagacctgcgcgaaggaggtgctgcagtatctgtctaggtttgaatcttggacaccacgcgaacctcgctgcgttcaattgattaatcatttgcatgcggttgccacccagttccttcctacaccgcaactactgacacagcaggttccactctcgaaaggtactggtgctccgagcgcagccggctcggccgctgccccctgcttggaaagagctggccagaaacttgaacccctggcctactgtgtgcctgtcatccaacggacccagccctctgcagagctggccgccgaaaatgataccgacaccgattctggttacggtggtgaagccgaagcccgcccggatcgggagaaggggaagggcgctggcgcaagccgcgtgactatcaaacaagagccccctggggaagattctccagctcccaagagaatgaaactggactctaggggcggcggatctgggggcggacccggagggggagccgccgccgctgcagccgcactgctgggcccagaccctgcagcagcggcggcactgctgaggccggacgcagccctgctctcttcattggttgcttttggaggtggcgggggagcaccattcccacagcccgcggctgctgcagcccctttctgtttgccattctgtttcctctcacctagcgccgccgccgcatacgtgcaaccttttttggataagagcggcttggaaaagtatctatacccggccgcagccgcggccccattccctctcctctaccctggaattcccgccccagccgcggctgccgctgccgcggcagctgctgccgcagctgccgctgcattcccttgcctgtcgtctgttttgtcgccgccacccgagaaagccggagccgccgctgcaactttgctcccccacgaggtggccccacttggagcaccgcatccgcaacaccctcacggcagaacgcatctgcccttcgccggtccgagagaaccgggtaatccagagagctcagcacaggaagacccgtctcaaccagggaaggaggcccct

SEQ ID NO: 219910 - DNA, 1446 bp, Artificial Sequence
  derived and/or modified sequence
atggacgaagggataccacatctgcaggaaagacagctccttgagcacagagactttattggtctggattatagctcgctctacatgtgtaagcctaagcggtccatgaagagagatgatactaaggacacctacaagctccctcacaggctcatcgagaaaaaacgccgtgaccggattaacgaatgtatcgcacaactgaaagatctcctccccgaacacctgaagctgaccaccttggggcacctggaaaaggcagtggtgctggagcttactcttaaacatcttaaggcactgaccgcacttaccgagcaacaacatcaaaagataattgcccttcagaatggggaaagaagccttaagagccctattcaatcggacctggatgcattccattcgggattccagacctgtgcgaaggaagtcctgcaatacctttcgagattcgagtcgtggaccccacgagaacctcgctgtgtccaactgatcaaccatctgcacgcggtcgcaactcagtttcttcctacccctcagctgctgacccaacaggtgcctctctccaaagggaccggagcaccctccgctgcggggtcggcagcagcaccgtgtcttgaacgggcaggacagaaacttgaacctctcgcatactgcgtgcctgtgatccaacgaacgcaaccttctgctgaactggccgcagaaaacgataccgacaccgattcgggatacggcggcgaagccgaggcaagaccagatagggaaaagggcaagggtgccggtgcctccagggtgaccattaaacaggaaccaccaggagaggattcgcctgcccctaagcggatgaaacttgattccaggggagggggatcgggaggtggaccaggaggcggggccgcggcggcggccgcagccttgctcggtccagatccagcggctgctgcggccctcctgcgccccgacgcagccctgctgagctcactggtggcatttgggggagggggtggtgcaccattcccacagcccgccgctgcagcagcgcccttctgtctcccattctgttttctctcaccttcggcagccgcagcatacgtgcaaccttttctggataagtcgggacttgaaaagtacctttaccccgcagccgccgcggcgccattccctctgctgtaccctggtattcctgcgccagccgcagcggcagcagcggctgcagcggccgccgcagccgcagctgcatttccttgtctgtcctcagtgctgtcaccaccacccgagaaggctggggccgcagccgcgacgcttctgcctcatgaagtggccccactgggggcaccacatccgcaacatccccatggaaggacccatctcccgtttgcagggcccagggagcctggaaaccctgaatcgtcggcacaagaagatccaagccagcccggtaaagaagcacct

SEQ ID NO: 219911 - DNA, 1446 bp, Artificial Sequence
  derived and/or modified sequence
atggatgagggtataccacatcttcaagaaagacaactcctcgaacacagagacttcatcgggctggactactcatccctgtacatgtgtaagcccaagcgctcgatgaagagagatgatactaaggatacctacaagctgccccatcgacttattgagaaaaagcggagagacagaattaacgagtgtattgcacaacttaaggatctcctgccagaacatcttaaactcaccaccctggggcacctcgaaaaagcagtggtgctggagcttactctcaaacacctcaaggcactgactgcacttaccgagcagcagcatcaaaagattatagcgcttcaaaatggagagagatcgctcaagtcgcctattcagtccgatcttgatgcctttcacagtggctttcagacttgtgcgaaggaagttctgcaatacctgtccaggtttgaatcatggaccccgcgggaaccaagatgtgtgcagctcatcaaccatctccacgccgtggcaacccaattccttcctactcctcaacttctgactcagcaagtcccactctcgaagggaactggagcaccatcggcagctggatccgcagccgcaccctgtcttgagcgggcgggtcaaaaactcgagcccctcgcatactgtgtcccggtgatccaacgcacccaaccatcagctgaactggctgccgaaaacgacactgatactgacagcggttacggaggtgaggcagaagctcggccagacagagaaaagggaaagggggcgggggcatcccgagtcaccattaagcaggaaccacccggcgaagattcaccggcccctaagagaatgaaacttgattcgcgcggaggaggatccggcggaggaccaggtggcggagccgctgctgcggcagcggccctgcttggcccagaccctgcagccgccgcagcgcttcttcgtcctgacgccgcactcctctcctcgctcgtggcctttggtggtggcggtggcgcaccttttccacagcctgccgcagcggcagcaccgttctgtctccctttttgctttctgagcccgtcagcggccgcagcatacgtgcagccatttctcgataagtcgggactggaaaagtacctttaccctgccgctgcagccgcccctttccctctgctgtatccggggataccagcgccagcggcagcagcagccgccgccgctgccgccgcagcagccgcagctgctttcccttgtctttcgtccgtgctgtcaccaccaccggagaaggcaggagcggcggccgctactcttctgccccatgaggtcgcaccactgggagcaccgcatccacagcatccccatggtcggacccacctgccatttgcagggccacgtgaaccaggtaatccagaatcgtcggctcaggaagatccttcacaaccaggtaaggaagcacct

SEQ ID NO: 219912 - DNA, 1446 bp, Artificial Sequence
  derived and/or modified sequence
atggacgaaggtattccacatttgcaggaacgccagttgctcgaacatagagatttcattggattggattattctagtctgtacatgtgcaaaccaaagaggtcgatgaagcgagatgatactaaggacacttacaagttgcctcataggttgatcgaaaaaaagagacgggatcgaattaacgaatgtatcgcacaattgaaggatttgttaccagaacatctcaagctaacgactctgggacacttagagaaggcagttgtgttggagcttacactaaaacacctgaaagccttgactgcactcactgagcaacaacaccagaaaattattgctcttcagaatggagaacgatcgcttaaatccccaatccaatcagatcttgatgcttttcactcgggattccaaacatgtgcaaaagaggttctccaatatctttcgagattcgagtcatggactccgagagaaccgagatgtgtgcaacttattaatcacctgcatgcagtagctacacaatttctgccgactccgcaacttcttacacaacaagtccccctctccaagggaacaggagcaccatcggcggctgggagtgcggcagcaccctgtctagagcgagccggacagaagctggagccacttgcctattgtgtgccagttattcaacgaactcaaccatctgctgaattggcagcggagaatgataccgacactgatagtggatacggaggcgaagcggaagcacgtcctgaccgagaaaagggaaagggagcgggagcctcacgagtcaccatcaagcaggaaccgcctggtgaggatagtccagctccaaaacgtatgaagttggactcaagaggaggaggatcgggagggggacctggaggaggagcagcagcagcagctgcagccttattggggccagacccggctgctgcggctgcactgctgcgtccagacgcggccttattgagtagcttggttgcattcggtggaggtggaggagccccatttccgcaaccagccgctgctgccgccccattctgcttacccttttgctttctgagtccatccgcggcagctgcttacgttcaacctttcttggacaaaagtggtctagaaaaatatctgtacccggccgcagcggcagctcctttcccgttactctacccaggcattccagcaccagctgctgccgcggctgcagcagctgcagccgctgctgctgctgcagcctttccctgtctctccagtgttttatcacccccgccagaaaaagcaggtgcagcagcagcaactttgcttcctcatgaagtagccccactcggtgctccacacccacaacatccacatgggagaacgcatcttccttttgctggtccacgggaaccaggaaacccagaatcctcagcccaagaggatccgtcgcaaccaggaaaagaagctcca

SEQ ID NO: 219913 - DNA, 1446 bp, Artificial Sequence
  derived and/or modified sequence
atggacgagggaattccacatctgcaggagcgacagctgctcgagcaccgggacttcatcggacttgattactcgtcactttacatgtgtaagcctaagaggagtatgaaaagggatgacactaaggacacctacaagctcccgcaccgtcttatagaaaagaagagaagagacagaattaacgagtgtatcgcacaactgaaggatctccttcccgaacaccttaagctgactaccctggggcatctcgaaaaggctgtggtccttgaactcactcttaagcatctcaaggccctgactgctctgacggagcagcaacatcagaagattattgcgcttcaaaatggagaacggtcattgaagtcacctattcaatcggatcttgatgctttccattccgggtttcagacctgcgctaaagaagtccttcagtatctgtcgcgatttgaatcgtggactccaagagaacccagatgtgtgcagctcattaatcatctccatgccgtggcaacccagtttctgcccactccacagttgctcactcagcaggtgcctttgtcgaagggaactggtgcgccatctgcggcgggatccgctgcggctccgtgcctggaacgcgcaggacaaaagctggaacctctcgcgtactgtgtgcctgtgatacagagaacccaaccatccgccgaacttgcagcagaaaacgacacggatactgacagcggttacggtggggaagctgaggctcgcccggacagggagaagggtaagggtgcgggcgcaagccgggtcacgatcaaacaagaacctccaggggaggattcacctgcacctaaacggatgaaactggattcgaggggtgggggatcaggcggaggtccgggtggaggcgctgcagcagcggcggcagcgctgcttggaccggatccagcggctgcggcagcactcttgaggcctgatgccgcacttctgtcctcactggtggctttcggtggtggtggaggagccccgtttccacagccggcggcagccgcggcacctttttgtctcccattctgctttctgtcgccttccgccgccgccgcctacgtgcaaccgtttttggataaaagcggacttgagaagtacctctaccctgcagcagctgccgccccatttcctcttctgtaccctggaatcccagcaccagcggcggctgcagctgcggctgctgcggcagcggccgccgcggcagcctttccttgtttgagctcggtcctttcaccccctccggagaaagcaggagcagcagcagcgacccttttgccccatgaggtggcacctctgggagcaccacacccccaacatcctcacggacgtacgcaccttccatttgccggcccccgcgagccaggcaaccctgaatcctcggcacaagaagatccttcccagcccggtaaagaagcccct

SEQ ID NO: 219914 - DNA, 1446 bp, Artificial Sequence
  derived and/or modified sequence
atggacgagggcattcctcacctgcaggagaggcagctcttggagcaccgcgactttatcggtttggactactcctctctgtacatgtgtaaaccgaaaaggagtatgaagcgcgacgacacgaaggatacctacaagttgcctcataggcttatcgaaaagaagaggagagacaggatcaatgagtgcatagcccaactgaaggatctgctccccgagcacctgaagcttactaccctcggtcaccttgaaaaggccgtcgtcctggaattgaccctgaaacatctgaaggcattgacagctcttacagagcagcagcaccagaaaatcattgcgctccaaaacggtgagaggtccctgaaatctcctattcagtccgatctcgatgccttccactctggttttcaaacctgcgccaaggaggttttgcaatatttgagccgctttgagtcctggactccccgcgagccccgctgcgtacagttgatcaatcatctgcacgccgtcgccactcagtttctgcctacgccccagctccttacgcagcaagtccccctctccaagggcactggagctcccagtgccgctggaagtgccgcagccccttgcctggagagagccggacaaaagttggagccacttgcatactgcgtgccagtgattcagaggacgcagccctccgccgagctggcggctgagaatgacaccgacactgactccggatacggtggtgaagccgaagcccgccctgacagagagaaaggcaagggagccggagctagccgcgttactattaagcaagaacctcccggtgaggacagtccagctcctaagaggatgaaattggattcacgcggcggtggatccggtggcggaccaggcggcggcgctgcagccgccgccgccgcgctgctgggtccagatccggccgccgcggccgcactgctgaggcccgacgctgccttgctgtcttctttggttgcctttggaggaggtggtggcgcaccgttcccgcagccagcggcggccgccgcaccattctgtctgccattctgttttctctctccaagtgccgccgctgcctacgtacaaccctttctggataaatccggcctggaaaagtacctctaccctgctgcagcagcagcaccattcccactcctctatcccggaattcctgctccagccgcagctgccgccgcggctgcagcggcggctgcagccgcggctgcctttccctgcctgtcatccgtgctgtctccgcctccggaaaaggctggtgctgccgccgctaccctcctcccacacgaggttgccccgcttggagcgccacaccctcaacatccccatggaagaactcatctccctttcgcgggaccaagggagcccggcaacccagagagttccgcgcaggaggaccccagccaaccaggaaaggaggccccc

SEQ ID NO: 219915 - DNA, 1446 bp, Artificial Sequence
  derived and/or modified sequence
atggatgaaggaatacctcatctgcaggaaagacagttgttggaacaccgggattttatcggtctcgattactcctccctgtacatgtgtaagcccaaaaggtctatgaagcgcgatgataccaaggacacatataagctacctcacagactgatcgagaaaaagcgccgtgacaggatcaacgaatgcatcgcccagcttaaggacctgttgcccgaacacttgaaattaaccactcttggccatctggagaaggcagtggtgctagagctgacactcaagcatctgaaggcactaactgctttgaccgagcagcaacatcagaaaattatcgctctgcagaatggcgagcggagcctgaagagtcccatccagtctgacttggacgccttccatagcggtttccagacctgcgctaaagaagtgctgcagtacttatctcggttcgaatcgtggacgcccagagagccgcgctgtgtccagcttattaaccacttgcacgcagttgcgactcagtttttgcccacccctcagctgctgactcagcaggttcctctgagtaaaggaactggtgctcctagtgcagctggctccgctgccgccccatgcttggaacgggcagggcaaaagcttgagcccctggcctactgtgtgccagttatccaacgaacacagccgtctgctgagttggccgcggaaaatgacacggataccgactccggctatggtggggaagccgaggcaaggccagatcgggagaaagggaagggggcaggcgcatctagagtaacgatcaagcaagagcctccaggggaggatagcccagcacccaaacggatgaaattagactcacggggaggcggatccggaggaggcccaggtggtggtgccgcggcagctgctgctgccctactgggcccagacccggcggccgctgccgccctgttgaggcccgatgctgccttgctctcaagtctggtggcatttggagggggaggcggcgctcctttccctcaacccgcagcagctgctgcacctttctgcctgccattttgcttcttatctccctcagcagctgcggcctacgttcagcccttcctggacaagagtggccttgagaagtatctgtaccctgcagccgccgccgctccctttcctctgctttatcccggcattccagcccctgctgcagccgccgccgctgccgctgctgctgccgcagctgcggcagccttcccttgcctgtccagtgtccttagtcctccacctgagaaggcgggcgcggctgcggctactctactgcctcatgaggtggcgcccctcggcgcacctcacccccagcatcctcacggacgcactcacctgccatttgccggcccccgtgagccaggtaacccagaatcctctgcacaggaggacccaagccagccaggtaaggaagcccca

SEQ ID NO: 219916 - DNA, 1446 bp, Artificial Sequence
  derived and/or modified sequence
atggacgaaggcattcctcatctgcaagagaggcagctgctggaacatcgagattttattggactcgattactcttctctctacatgtgtaaacctaaacggtctatgaaaagagatgacacaaaggacacctacaaactgccacatcgtctaattgaaaagaaacggagagatagaatcaacgagtgtatcgcccagcttaaagatcttctccccgagcacttgaaactcacaaccttaggccacctggagaaggcagtggtgctggaactcacactgaaacatctgaaagcactgacagcactgactgagcaacaacatcagaagatcatcgcgttacagaacggtgagcggtcacttaaatctcccatccagtccgatcttgacgccttccactcagggttccagacttgcgccaaagaagtgcttcagtatctgagccgctttgaaagttggaccccccgggagccaaggtgtgtccagctcattaaccacctccatgctgtggccactcagtttctaccaaccccccagttgctgacacagcaggtccctctatcaaagggcacgggtgccccgagcgctgccgggtctgcggccgccccctgtcttgagcgggcaggtcaaaaactggagccgctagcctactgcgtcccagttatccagcgaacccaaccttccgccgagctggccgcagaaaatgacaccgacacagatagtggctatggtggcgaggccgaagcccggccagacagagagaagggaaagggtgctggcgcatctcgagtgacgatcaagcaggaaccaccgggagaggactcgcccgctcctaaaaggatgaagcttgattctagagggggcggctctggaggaggcccgggcgggggtgccgccgcggctgccgcagccttgctcgggccagacccggccgccgctgccgctctcctgaggcctgacgccgccctcttatcttccctggtggcgttcggtggcggtggtggtgccccctttccacagcctgccgcagccgctgctcccttctgtctcccattctgcttcctctcaccttcggctgctgccgcgtacgtacagccatttctggacaagtcggggctggaaaaatatctgtaccccgcggcagctgctgcccctttccctctcttataccctggaatacccgctccggctgcggctgcagctgcagcagctgctgcggccgctgctgctgctgcctttccttgccttagttcggtgctgagcccccctccagagaaagctggagccgccgccgctacactcctgccgcatgaggtggcacccctgggagcaccgcacccgcagcatccacacgggagaacacatctgccattcgcgggcccaagggaacctgggaatccagagagctcggcccaggaagatccctctcagcccgggaaggaagccccc

SEQ ID NO: 219917 - DNA, 1446 bp, Artificial Sequence
  derived and/or modified sequence
atggacgaagggattccgcatcttcaggaaagacagctgctggagcaccgcgactttatcggcttggattactccagtctgtatatgtgcaagcccaaacggtcgatgaagagagatgacactaaagatacttacaagttgcctcataggcttattgaaaagaagcgacgcgatcgtattaacgagtgcatcgcacaactgaaggatctgctgcctgaacatctgaaactcaccactcttggacacctcgaaaaggctgtggttctggagttgactcttaagcatctgaaggcccttaccgcactcactgaacagcaacatcaaaagataatagctcttcagaatggggaacgctccctgaaatcacctatccagtccgaccttgatgctttccattccggttttcagacttgtgcgaaggaagttcttcaataccttagcaggttcgagagctggacgcccagagaacctaggtgtgtgcaactgataaatcacctgcacgcagtcgcaacccaattcctgccaactccccagctccttactcagcaggtgcctttgtccaagggaacgggggctccttcggcagccggatccgctgccgcaccttgtctggagcgcgctggacaaaaacttgagccactggcatactgtgtgcctgtgatacaacgaacccaaccatctgcggaacttgcagcggagaacgataccgacactgactccggctacggcggtgaagccgaggcccggccggatagagaaaagggaaaaggagcaggcgcaagccgggtgaccattaagcaagaacctcccggagaggattcgccagcccctaaaaggatgaaattggattcccgtgggggaggatctgggggtggaccaggaggaggagcggcggcagccgccgcggctctcctgggaccagatcctgccgctgcagctgcgctgcttcggcccgacgcagctcttcttagctcgctggtggccttcggaggcggaggaggtgcaccgtttcctcagccagcggcggccgcagcacctttttgtctgcctttttgttttctctcgccgtcggcagcagcggcatacgtgcaaccattccttgacaagtcgggactcgaaaagtacttgtaccccgcggccgctgcggccccatttcctctcctctaccccggcatccccgcaccagcagctgccgcggccgccgcggcagcagcagccgcagctgctgctgctttcccatgtctttcttcagtccttagcccgccacctgagaaggcaggtgcagccgcagccaccctgcttcctcacgaggtcgcaccgctcggggccccacacccacaacatccccatggacgcacccatctgccttttgcagggccccgcgagcctggaaatccagaatcatcagctcaagaagatccgagtcaacctggcaaagaagcaccc

SEQ ID NO: 219918 - DNA, 1446 bp, Artificial Sequence
  derived and/or modified sequence
atggacgaaggcatcccgcatctgcaggagcggcagcttctcgaacaccgggatttcatcggcctggattattcgagcctgtatatgtgcaagcctaagcgctcgatgaaaagggacgatactaaagacacttacaagctcccccaccggctcattgaaaagaagcggcgtgatcgcatcaatgaatgtatcgctcagctgaaggatttgctgccagaacaccttaagctgactactctgggacacttggagaaagccgtggtcctggaactcactctgaaacacctcaaagcactgacggcgctgacggagcagcagcatcagaaaatcattgcactgcagaacggagagagatcgctcaagtcaccgatccagtcggacttggacgcatttcattcgggcttccaaacctgcgccaaggaagtgttgcaatacttgtcaaggttcgaatcctggactcctcgggagccgagatgcgtgcagctgattaaccatttgcatgcagtggcaactcagtttctgcctacccctcaactcttgacgcaacaagtgccgctgtccaaaggtaccggggccccgagcgcggcgggtagcgcggcagccccgtgccttgagcgcgccggccaaaaactggagccattggcgtactgtgtcccggtgatccagcggacccagccgtcggcggaactggcagctgaaaacgacaccgacaccgattcgggatacgggggagaagccgaagccaggccggaccgcgaaaaggggaagggtgctggggcctcccgcgtgactataaagcaagaacctccgggcgaggactcaccagcacctaagcgcatgaagctggattcgcgaggcggggggagcggagggggacctgggggcggggctgcagccgctgcggcagccctgctcggtccagacccagccgcggccgcagccctgctgcggccagatgctgctctcctgtcatcactcgtcgctttcgggggaggaggaggggccccattcccgcagccagcagcggcagccgctccattctgcctgcctttctgcttcctgagcccttcggctgcggctgcatacgtacagcccttccttgataagtcaggactggagaagtacctgtatcctgcagcagcagcagcgccatttccgctgttgtaccccggaatcccagcaccggccgccgctgccgccgctgctgccgcggccgctgcagcagcggccgcatttccatgtctcagctccgtgctctccccgccgccggaaaaggcaggagccgctgccgcaaccctgttgccccacgaagtcgcgccgctcggagcaccgcacccccaacacccgcatggacggacccaccttccgttcgcggggccccgggagccaggaaacccagagtcatctgcgcaggaggacccttcccaaccaggaaaggaagcccca

SEQ ID NO: 219919 - DNA, 1446 bp, Artificial Sequence
  derived and/or modified sequence
atggacgaggggatcccacatctccaggagagacagctgttggagcacagggactttatcggtttggattactcgtcactctacatgtgtaagcctaaaagatcgatgaagagggatgataccaaagatacctacaagctgccgcacagactcatcgaaaagaaacgtcgagatagaatcaatgaatgcattgcgcaactgaaggatctcttgcctgaacatcttaagctcacgacccttggccacctggagaaggcagtcgtgcttgaacttactcttaaacaccttaaggcactcaccgcactgactgaacaacagcaccaaaagataattgcgctgcagaacggtgaacgatcacttaagagcccaatacagtcggatctggacgcattccactcgggatttcaaacctgtgctaaagaggtgttgcagtatctttcccggtttgagtcatggactcctcgtgaaccaagatgcgtgcagcttatcaatcacctgcatgcggtcgcaactcagtttttgccgactcctcagctcctgactcaacaagttcccctttccaagggaactggcgcaccttcggcagcaggttcagcagcagcaccttgtcttgaacgagcagggcaaaagctcgagcctctcgcttattgtgtgccagtgattcagcgaacccagccttcagctgagttggcagcagaaaacgataccgacaccgattcgggatatggtggtgaagccgaagcacgcccagatagggagaaggggaagggggcaggagcgtcccgagtcaccattaagcaagaaccacctggtgaagattcgccagcaccaaagcgcatgaagctcgactcccggggtggaggttcgggtggcggacctggcggtggtgcagccgccgccgcggcagccctccttggaccagacccggccgctgcggctgcgcttctgaggcctgacgcagcactcctgtcctcactggtggcatttggcggagggggaggagcaccctttcctcagccagccgctgccgccgcccctttttgtctgcctttctgcttccttagtccctcagcggcggcagcctacgtgcaaccctttcttgataaatcgggtcttgaaaagtacctttaccctgccgccgcagcggcaccatttcccctgctgtacccaggtattccagcaccggcagccgctgcggccgcggcagcggccgcagcagctgccgctgcagcgtttccatgcctttcctccgtgctttccccacctccggagaaggctggagcagccgcggcaaccctcctgccacatgaagtggcccccctcggtgcaccacatccgcagcatcctcatggtcggactcatctccctttcgcaggtccacgggaaccgggtaacccggaatcgtctgctcaggaggacccttcacaacccggcaaagaagcaccg

SEQ ID NO: 219920 - DNA, 1446 bp, Artificial Sequence
  derived and/or modified sequence
atggatgagggaattcctcatttacaagagcggcagctgttagagcaccgcgacttcatcggactcgattacagttcattgtatatgtgcaagccaaaacgatccatgaagcgcgatgatactaaggacacgtacaagctcccccaccggctaatcgaaaaaaagaggagagatcgtataaatgagtgcattgcccaattgaaggacttgttgcctgagcaccttaaattaactacactgggacaccttgagaaggccgtggtactggagctgacgctaaagcacctgaaggcactgaccgccctgactgagcagcaacatcagaagataatcgcgctccagaatggcgagcggagcctcaagtcccccatccagagtgacctggatgccttccatagtggttttcagacctgcgcaaaggaggtgctgcaatatctgagccgcttcgaatcctggacgcccagagagccacgttgcgttcagcttatcaaccacctgcacgcagtggccacgcaattccttccgaccccgcagcttctgactcaacaggtccccctgtccaagggcacaggtgccccatccgctgctggctccgctgcagctccctgcctggagcgcgccggccagaagctggaaccgctggcgtattgcgtgcccgtgatccagcggacccagccgagcgctgagctggctgccgagaatgataccgatacagattcgggctatggtggtgaagcggaggctagacccgatagagagaagggcaagggagcaggagcttcgcgggttaccataaagcaggagcctcccggcgaggactctccagcgccgaagaggatgaaacttgattcccgcggcggcggcagcgggggcgggccaggaggaggcgccgctgccgctgcggctgccttactgggccccgatccagccgctgctgccgcactcctacgtccggacgccgctctgctgagctccttggttgcctttggtggaggaggcggcgcccctttccctcagcctgccgcagctgccgcccccttctgcctgccgttttgttttctgagcccctctgctgctgccgcgtacgtacagccctttttagataagagcggactggagaaatacctgtaccctgctgctgcggcggctccgttccccctcctgtacccggggataccagcccctgccgcagcggcggcagcggcggccgccgcagccgctgccgcggcggccttcccctgcctctcctccgtgctgagcccgcctccggaaaaggccggagccgcagctgcaacacttttgccccatgaggttgccccccttggtgctccgcatccccagcaccctcatggccgcacccatctccccttcgccggcccccgtgaaccgggcaaccccgagtcgtcggcgcaagaggacccaagccaaccaggaaaggaagcaccc

SEQ ID NO: 219921 - DNA, 1446 bp, Artificial Sequence
  derived and/or modified sequence
atggatgaaggtatcccgcatctgcaggagcgtcagctcctggaacaccgcgatttcatcggccttgactactcgtccctctacatgtgcaagcccaagcgttctatgaagagagatgatactaaggacacttataagcttccgcaccgcctcatcgagaaaaagcgccgtgaccgtatcaacgagtgcatcgcccaattgaaagatctactacccgagcacctgaagctcaccactctgggccatttggagaaggctgttgtgctcgagttgaccctaaagcaccttaaggccctcaccgcccttacggaacaacagcatcagaagatcatcgctctacagaacggtgagcgctccctaaagtcccccattcagtcggatcttgacgctttccattccggcttccaaacgtgtgctaaagaggttttgcagtatctgtcccgatttgagtcttggactccacgcgagccgcgttgcgtccagttgataaaccacctacatgcggttgccactcagtttcttcccactccacaactgctcacccaacaggttccgctcagcaagggtaccggcgccccgagtgctgcgggctccgccgccgctccctgtttagaacgcgcgggtcagaaactcgagccactcgcgtactgcgttccggtgatccagcgcactcagccgtccgctgagctggcggctgagaacgacaccgataccgacagtggatatggaggtgaggcagaggcccgtcccgaccgggagaagggaaagggagcgggtgccagcagagttacgattaagcaggagcctcccggtgaggattccccggctcccaagcgtatgaagctcgacagccgtggcggcggttcgggcggaggtcccggaggcggagcagcagccgcagccgcagccctgctggggccggatccggcggctgcagccgccttgctccgtcccgatgccgcgctgctgtcgtctctcgtggcttttggcggtgggggcggggctcccttcccccagcccgctgccgctgccgctccgttctgtctacctttctgcttcttgtctcccagtgccgcggcagcctacgtacaacctttcctggacaaatccgggctggaaaagtatttgtaccccgctgccgctgcggccccgttccccctgctgtaccctggaattccggcacccgccgcggcagcagctgccgcagcggccgctgccgcggctgctgccgccttcccctgtctgagctcagtgttgagcccgcccccggagaaggctggtgctgccgccgccaccctgctgccgcacgaggtcgcccccctgggagccccccatccccagcacccccacggtcgaacccacctacccttcgcaggtcctcgcgagcctgggaaccctgagtcaagcgcgcaggaggatccctcccagcccggcaaggaggcacct

SEQ ID NO: 219922 - DNA, 1446 bp, Artificial Sequence
  derived and/or modified sequence
atggacgaaggaatcccacacctacaggaacggcagttgctcgagcaccgagactttattggattagactactccagcctgtatatgtgtaagccaaagcggtccatgaaacgggatgacacaaaggacacatataagttacctcacaggctgatcgagaaaaagcgcagggatcgtatcaacgagtgcatcgcacagctcaaagacctgttacccgaacatctcaagctaacaaccctgggacatctggaaaaggctgtagtcctcgagttgacgctgaagcacctcaaggcactgacagccctcacggaacagcagcatcagaaaatcatcgctctccaaaacggagagcggagtttaaagagtccgatccagagcgacctggatgcctttcatagtggttttcagacatgcgcgaaggaggtcctgcagtacctgtccaggtttgaatcatggaccccccgggaaccacggtgtgtgcagctcattaaccatctgcatgccgtggctacacagttcctccccaccccacaactgctgacccagcaggttccccttagtaagggcactggcgctccaagtgcggcaggcagcgccgccgctccttgcttagagcgcgctggccagaagttagagcccctggcatactgcgtcccggtgattcagcgcacacagccatctgctgagttggcggctgagaacgacacggataccgattcgggatatggtggtgaagccgaagcaagacccgacagggaaaaaggaaagggagctggcgcgtcccgcgttaccattaaacaagaacccccgggagaggactctcccgcacccaagcggatgaaattagactcacgaggcggagggtccggaggcggtccaggaggaggagccgccgcagccgcggctgccctgctgggtccagatcctgctgcagccgcggctctgctgcgacccgacgcagctttgttgagtagcctcgtggctttcggggggggtggcggagccccatttccacagccagcggccgccgccgccccattctgtctcccgttttgctttctctcgccctcagccgctgcagcttatgtccaaccattcctggataagagtggcctcgagaaatacctttacccagccgcagcagccgcgcctttcccgctgctgtaccccggcatcccagcccctgctgctgcagccgccgctgcagccgcggccgccgccgctgccgcagcatttccatgcctcagttcggtcctctccccacctccagagaaggccggagccgctgcggctactctgctgccgcatgaggtggcaccgctgggagccccacatccccagcacccacacggtagaacacatctgccgttcgctggcccccgggagcctgggaaccccgagtcctcagcccaagaggacccatcccagcctggaaaggaggctcct

SEQ ID NO: 219923 - DNA, 1446 bp, Artificial Sequence
  derived and/or modified sequence
atggatgaagggatcccccatctccaggaacgccagctcttagaacatcgggatttcattggactggattactcttccctgtacatgtgcaaaccaaaacggtcaatgaaaagagatgatacaaaagatacatataaactcccccatcggctgatcgaaaaaaaaaggagagacagaatcaatgaatgcatcgctcagcttaaagatctactcccagaacaccttaaactcactacactgggacacttggaaaaagcggtagtgttggagttaactctcaaacatttgaaagctctgactgccctcactgaacagcagcaccagaagattatcgctttacagaacggagagcgctctcttaaatcaccaattcagagtgacctggatgccttccattctggattccagacgtgcgctaaagaagttcttcagtatttgtccagattcgaatcatggacacctagggaaccaaggtgtgttcaactgataaatcacctccacgctgtagccactcagttccttcccactcctcagctcctgacacagcaggtcccccttagtaaaggaactggggccccctctgcggcaggaagtgctgctgcaccttgcttagaacgggccgggcagaaactggaaccactcgcctactgtgtacctgtcatacagaggacacagccttcggctgaattagccgcggaaaatgatactgatactgattccggatacgggggggaggccgaagccaggcctgacagggaaaaaggaaaaggggcaggggcctcccgcgtcactattaagcaagaaccacccggagaagattctcccgcacctaagcggatgaagctagatagtcgcggagggggaagtggaggagggcctgggggaggagccgctgccgcggccgccgccctcctcgggccagatccagctgctgcagcggccctactgcggcccgacgctgcactgctttcgtccctggtcgccttcggaggaggggggggagctccctttccccagcccgccgcagccgcagcccctttctgccttccattctgttttctatcaccatctgctgcagcagcttacgtgcagcctttcttagataaatctggactcgagaaatacctctaccccgcagccgccgctgcccccttccctctgctctatcccggaatacctgcccctgctgcagcagctgcagctgccgctgctgcagccgcagctgctgcagctttcccctgtctcagttcagtcctgtccccaccccccgaaaaagcaggagcagccgcagccactctgctgccccatgaggtagctccccttggagccccccaccctcagcacccccacgggcgaactcatctgccttttgccgggcccagggagccaggaaaccctgagtcatctgcacaggaggatccatctcagcctggaaaagaagctcct

SEQ ID NO: 219924 - DNA, 1446 bp, Artificial Sequence
  derived and/or modified sequence
atggatgagggaataccacacctacaggagcgccagctcctcgagcaccgagattttattggcctggattactcctccctatatatgtgtaaaccgaagcggtctatgaaacgcgacgatactaaagatacatacaaattgccccataggcttatcgaaaaaaaacggcgcgaccgaattaatgaatgtatagcccaattgaaggacctgctgcccgaacacctgaaattaactacactgggacatctcgaaaaggctgtggttcttgagttgactctgaagcacctgaaggctcttactgcactgactgagcagcagcatcagaagataatagctttgcaaaacggagagcgcagtttgaagtcccccatccagagcgacctcgatgcgttccacagtggttttcagacgtgcgctaaagaggtcctgcagtacttgtccagatttgagagctggacaccacgtgaaccgcgctgcgttcagctgattaatcatttgcatgcagtagctactcagtttctgccgacacctcagctcctgactcagcaggtgccattgagcaaaggcaccggcgcgcctagtgccgccggtagtgcagccgcaccttgtttggagagagcaggccaaaagctggaacccctcgcctattgcgtaccagtgatccaacgcacgcagccctcagctgaactggccgcagaaaacgataccgacaccgatagcggctatggcggggaggcagaggcgaggcctgaccgcgaaaagggtaagggcgccggtgcctccagagtgaccatcaagcaggagcctcccggcgaagacagcccagcccctaagcgaatgaaactggatagccgaggaggcgggtctggcggcggccccggcggtggagccgcagcagccgccgcagcgctcctaggaccggatcccgctgcggctgccgccctcctgcgtccagacgctgctttactgagctcactggtcgctttcgggggaggtgggggcgcacctttccctcaaccagctgctgccgcagcgcccttttgtctccccttttgctttctgtcaccctctgccgctgcagcatacgtgcagccgttcctcgataagtcaggccttgaaaagtatctctatcccgccgctgcggccgcaccatttcctcttctgtaccctggaatccccgctcctgccgccgcggcagcggccgctgccgcagccgccgccgccgcagcagccttcccatgtctctcctcagtactttcacctccgcctgagaaagccggggccgctgccgcaacattactcccccacgaagttgcacctctgggagcccctcatcctcagcacccccacgggaggacgcaccttccctttgccgggcctcgcgaacctggtaacccagagtccagtgcacaggaggaccctagccagcccggcaaggaagcgccc

SEQ ID NO: 219925 - DNA, 1446 bp, Artificial Sequence
  derived and/or modified sequence
atggacgagggaatacctcatttgcaggaaaggcagctgttggagcatcgggatttcatagggctggactacagctctctgtatatgtgcaagcctaaacgtagtatgaagcgagatgataccaaggatacctacaaactaccgcaccggctgatcgagaagaagcggagggaccgcattaacgagtgcatagctcagctgaaggatctgctgcctgagcatctgaagctgactacgctcggtcacttggagaaggcagtggtgctggagctcacactgaagcacctcaaagctttgactgctctgaccgagcagcagcatcagaagatcatcgccctgcagaatggcgagcgcagcctgaagagcccaattcagagcgacctcgacgctttccacagcggtttccaaacttgcgccaaagaggtcctgcaatatctatctcgctttgaaagctggacgccccgcgagcctcgctgcgtacagctaatcaaccatctgcacgcagttgccactcagtttctaccgaccccccagctcttgacccagcaggtaccactgagcaagggcactggcgctccgtctgcggcaggaagcgccgctgccccatgcttggaacgggccggtcagaaactggaaccgttggcctactgcgtgcccgtaatacagagaacccagccatctgccgaactggccgccgaaaacgacaccgatactgactccggatacggaggcgaggccgaagctaggccagaccgtgaaaaaggcaaaggagcgggggcttctagggtgacgatcaaacaagagcccccaggggaggattcccccgcgccgaagaggatgaagttggactcaaggggaggaggatccgggggaggacctggtggcggagccgccgctgcagctgccgccctgctgggacccgacccagctgccgccgccgctctgctgagacccgacgccgctctgttaagttcattagtcgcatttggaggcgggggcggggcaccatttccccagccagctgccgccgccgctcctttctgtttgccattttgttttcttagccctagcgctgctgcggcttacgtgcagccattcctggacaagagcggtttggagaagtacctgtaccctgctgccgcagcggccccctttccactgctgtacccaggtatacccgctcccgctgccgccgctgccgccgctgcagccgccgctgcagctgcagccgcatttccctgcctctccagcgtcctgtcccccccacccgagaaagctggagccgcagcggccacactgctccctcatgaagtggcaccactaggcgccccccatccccagcacccccacggcaggacgcacttgccattcgccgggccacgtgaaccaggcaacccagagagtagtgcccaagaagatcctagccagcccggaaaggaagcacct

SEQ ID NO: 219926 - DNA, 1446 bp, Artificial Sequence
  derived and/or modified sequence
atggacgaaggcattcctcacctgcaagagcggcaacttcttgaacaccgcgattttatcgggctcgattactcttcactttatatgtgcaaacccaaaagatctatgaaaagggatgatacaaaagatacctataagctgccacatagattaatcgagaagaaaagaagagacagaattaatgaatgcattgctcagctgaaggatttattgccagaacaccttaaactaacaacactcgggcatcttgagaaggcagtggttttagagcttactcttaagcacttaaaggctcttaccgccctgacagaacaacagcaccagaagattattgcacttcaaaatggcgaacgtagtcttaagtccccaattcaatcagatttagatgctttccactcaggctttcagacatgcgccaaagaggtgctccaatatctcagccgcttcgaatcatggacccctcgcgaacctaggtgtgtgcagctcatcaaccaccttcacgctgttgctacccaattcttgccaacgccccagttattgacccaacaagttccattatcaaagggcactggcgccccttccgctgctgggtccgctgctgcgccctgtctggagcgcgcgggtcagaaattagagccacttgcatattgtgtacccgttatacaaagaacacagccttccgccgagttggctgcggagaatgatacagatacagattccggctatgggggagaggctgaggctcgccctgacagggaaaaaggtaagggtgctggtgcgagcagggttacaattaagcaggagccaccaggggaggattctccagcccctaaacgtatgaagctagacagcaggggtggtgggtcaggggggggcccaggaggcggcgcagcagccgcagcagcagcattgcttgggccagatccggcggctgcagctgctctattgcgtccggacgctgccttgctctctagccttgttgcttttggtggcggtggtggtgcccctttcccacagcctgccgcggctgctgctcccttctgtttgccattttgctttttatcaccatctgctgcagctgcatatgtccagccattcctggataaaagtggattggagaagtacttataccccgcggctgcagccgctcctttcccacttttgtatcctggcattcctgcacctgccgctgccgctgcagcggcagctgccgcggctgcagctgcagcggcgttcccgtgtttaagtagtgtattgtctcctcctcctgagaaagctggagcagctgctgctacactacttccgcacgaggtggcacctcttggagctcctcaccctcaacacccacacggaaggacccatctaccattcgctggcccaagagagcctggaaatccagagtcgtcagctcaagaggatccgagccaacccggtaaagaggcacct

SEQ ID NO: 219927 - DNA, 1446 bp, Artificial Sequence
  derived and/or modified sequence
atggatgaaggcattccacacctgcaagaaagacaacttctcgaacatagagacttcattgggctggactactcttctctgtacatgtgtaagcctaagcgctcaatgaagcgcgatgataccaaggatacgtacaaactgccgcacagactcattgaaaagaagaggcgggacagaatcaacgaatgtatcgcacaacttaaggatctgctgccagagcacctgaagctgactactctggggcatcttgaaaaggccgtggtcctcgaactcacccttaagcatctcaaggccctcaccgccctgactgaacaacaacatcaaaagattatcgcactgcagaacggtgaaagatcgcttaaatcccctattcaaagtgatcttgacgcattccactccggtttccagacttgtgcaaaggaggtgcttcaatacctgagcaggttcgaatcttggaccccacgcgagcctcggtgcgtccaactgataaatcacctgcatgcggtggcgacccagtttctgcccactccacagctcctcacccaacaggtgcctctttcgaaagggaccggagcaccatcagccgcgggaagcgcggcagcaccatgccttgaacgagcggggcagaagctggaaccacttgcatactgtgtccctgtgatccagagaactcaaccatcagccgagctcgcagcagagaacgataccgacactgactcagggtacggaggagaggccgaagcacgtcctgatcgggagaagggcaagggagccggagcatcacgcgtgacgattaaacaggagccacctggtgaagattcgcctgcgccaaagagaatgaagctggactccaggggaggcggatcagggggtggtccaggaggtggggctgcggcggccgctgccgcactgcttggacctgatccggcggcagccgccgcgcttctgcgtcccgatgcagccctgctttcatcgctcgtggctttcgggggtgggggaggtgcaccattccctcagcccgcagcagctgcagctcctttctgtctgccattttgtttcctgtcgcctagcgcggctgcagcgtacgtgcaacctttccttgacaagtcggggctcgagaagtacctctatcctgctgccgccgccgctccttttccacttctgtacccaggaattcccgccccagccgcagccgctgccgccgcagcagcagcagcggccgcggcagctgcatttccctgtcttagctcagtgctgtccccaccccctgagaaagcgggagcggccgcagcaacccttcttccccatgaagtggcaccattgggcgcaccacatccccaacaccctcacggacgcacccatcttcctttcgcaggtccgagagaaccaggtaaccctgagtcgtccgcccaggaagatccctcgcagccaggaaaggaagcacca

SEQ ID NO: 219928 - DNA, 1446 bp, Artificial Sequence
  derived and/or modified sequence
atggacgagggcattcctcatctgcaggagcgacagctgctggagcatcgggatttcattggtctggattacagtagcctttacatgtgcaaaccaaagagatccatgaaacgagacgatacaaaggatacttataaactgcctcaccgcctgattgagaagaagcgaagagatcgcattaatgagtgcatcgctcagttgaaggatcttctccccgagcatcttaagctgacaacactgggccacctcgagaaagccgtcgtgcttgagttgactctgaaacacctcaaagcccttaccgcactgaccgaacagcaacaccagaaaataattgcacttcaaaacggagaaaggtccctgaagagccctattcaaagcgaccttgacgcttttcacagtggcttccagacttgcgccaaggaagtgctgcaatatctttctcgcttcgaatcatggacacctagggagccgaggtgcgtccagttaatcaatcatctgcatgccgtggcaacacagtttctccctacaccccagttgcttactcagcaggtacctctctctaagggaaccggcgccccatctgccgccgggtcagcagccgctccgtgtttggaacgcgcaggccaaaagttggagcctttggcttattgcgtcccagtgatccaaaggacacagccttctgcggaactggccgccgaaaatgataccgacactgacagtggttacggcggcgaagctgaagctaggcccgatagggagaagggaaaaggtgcaggcgcatcccgcgtgaccatcaaacaagagccaccaggcgaggatagcccagcgcctaaacgcatgaaattggactctagaggcggcggaagcggcgggggtcccggggggggggccgcggccgctgctgcagcacttctgggccctgaccccgcggcggccgccgcgttgttgaggcccgatgccgctctgctgagcagcctggtcgcttttgggggcggaggaggtgctcctttccctcaacctgctgctgcggcagcccctttttgcctgcctttctgctttctgagcccctcagctgctgcagcatacgtgcaaccatttctggacaaaagcggactcgagaaatacctgtaccctgcggccgccgccgctccctttcctttactgtacccaggtatcccagcaccggcagcggcggctgccgccgccgctgcagccgctgccgcagctgcagcgtttccttgtctgtcctccgtgttgtccccaccaccagagaaagcaggagccgcagccgccacactcctcccccatgaagtagcccctctgggggccccccacccccagcacccgcacggcaggacccaccttccattcgccggtcctagggagccgggaaatcctgaatcctctgcacaggaggatccttcccaacccggtaaagaggccccc

SEQ ID NO: 219929 - DNA, 1446 bp, Artificial Sequence
  derived and/or modified sequence
atggatgagggaatcccccatctgcaggaacggcagctcctcgaacaccgagactttatcggtctggattactcgtcactgtacatgtgcaagccgaagcggtcgatgaaacgggacgacaccaaagacacctacaagctgcctcatcgccttatcgaaaagaaacgccgcgaccggatcaacgagtgcatcgcccagctgaaggatctcctgcctgagcacctgaaactcactactctgggacatctggaaaaggctgtggtgttggaacttactctgaagcacctcaaggcgctgactgcgttgactgaacagcaacaccaaaagattatcgccctgcaaaacggagaaagatcgctgaaatccccaatacagtccgacctggatgcgttccattcaggattccagacttgtgccaaggaagtgctccagtacctgagccgcttcgagtcatggactccgagagaaccacggtgtgtccagctcatcaaccaccttcatgctgtcgccactcaattcctgcccactccacaactccttacccagcaggtgccactctccaagggaactggtgcgccatccgccgccggatccgccgcggctccatgccttgagagagccggacaaaagttggaaccactggcatactgcgtcccggtgatccagcgcacccaacccagcgcggagctcgcagccgaaaacgacacggacacggacagcggctacggaggtgaggccgaagccaggccggatcgggaaaaaggaaagggagcgggagcgtcaagagtgacgatcaagcaagaacctcccggtgaagatagcccggccccgaagcggatgaagctggactcgcgcggcggaggaagcggtggaggacccgggggcggtgcggcagcagccgctgcagcactcttgggaccagatccggcggccgcggctgcactcctgcggccggacgccgccctgttgtcgagcctcgtggcgttcggagggggcggaggtgcgccgtttccgcaacctgcggccgccgctgcaccgttctgcctgccattctgttttctttcgccatcagccgcggcggcatacgttcaaccattcctggataaatcggggctggagaaatacctgtatcctgccgccgccgccgcgccgttccctttgctgtacccgggcatccctgctcccgcagcggccgcagccgcagcggcagcggcggcggctgccgcggcggccttcccttgtctttcatccgtgctgtcaccgccgcctgagaaggccggagctgcggccgccaccctcctgccgcatgaggtcgcaccgctgggcgcccctcacccacagcaccctcacggaagaacccatcttcctttcgccggaccgcgggaaccggggaacccggaatcatcggcacaggaggaccctagccaaccggggaaggaggcaccg

SEQ ID NO: 219930 - DNA, 1446 bp, Artificial Sequence
  derived and/or modified sequence
atggacgaaggaatcccgcacctgcaggaacggcagctcctggaacatcgcgactttatcgggctggactactccagcctgtacatgtgcaagcctaaacgcagtatgaagagggacgataccaaggatacttacaaactgccacaccggctcatcgagaaaaagaggagagacagaatcaacgaatgtatcgcacagttgaaggaccttctgccggaacacctgaaactcaccactttgggtcacctcgaaaaggccgtcgtgctcgagttgaccctcaaacaccttaaggctctgactgccctcaccgaacaacagcatcagaagatcatcgcactgcagaacggagagcggagcctcaagtccccgattcagtccgatctggacgcttttcattcgggatttcagacctgtgctaaggaagtgcttcaatacctgtccagattcgagtcctggaccccaagagaaccgcgctgcgtgcaacttatcaaccaccttcatgccgtggctacccaattcctgcccacgccgcagctgctgacccagcaagtccccctgtcgaagggaacgggagcaccctccgccgcaggttccgctgcggcaccgtgtctcgagcgggctggacaaaagctggaacccctggcttactgcgtcccagtgatccaacgcacgcagccatcagccgaactcgctgcggagaacgacactgatactgactcgggatacggcggcgaagccgaagctagaccggacagagaaaagggaaagggcgctggagcttcacgcgtcaccatcaagcaagagccaccgggagaagattccccggccccgaagcgcatgaaacttgattcacgcggtggagggtctggaggaggacctgggggaggggcagccgcagcagccgccgcattgctgggacctgatcctgctgctgccgccgcactgctgcggccggacgcggcactgctctcttcacttgtggctttcggaggaggcggaggagcaccattcccgcaacccgccgcggccgccgcccctttctgtctgcctttttgcttcctgagcccaagcgcggcggctgcgtacgtgcaaccgttccttgacaagtcaggactcgaaaagtacctctacccggctgcggcagctgcgccgttcccactgctgtacccgggtatcccggccccggccgccgctgcggcggccgcagcggccgccgcggctgccgccgcggcctttccgtgtctgagcagcgtgctcagccccccacccgaaaaggccggcgcggcggcggcaactctgctgccccacgaggtggccccactcggagcgccgcaccctcagcatccgcatggaaggacccacctgccatttgctgggccacgggaaccgggaaaccctgaatcctcggcacaggaggatccgtcgcaacccggaaaagaagcccca

SEQ ID NO: 219931 - DNA, 1446 bp, Artificial Sequence
  derived and/or modified sequence
atggatgaaggaattcctcacctgcaagagagacagcttctggaacatagggactttatcggtctggactactcgagtctctacatgtgtaaaccaaagcgatcgatgaagagagatgacaccaaggatacttacaaacttcctcatcggctgattgagaagaaacggagagacagaatcaacgagtgtattgcacaattgaaggatctgctcccggaacatctgaagctgactactttgggacatctcgaaaaggcagtggtcctcgaacttaccctcaagcatctcaaggcgctgaccgccctgaccgaacagcagcatcagaagataatcgctcttcagaatggagaaagatccctgaaatcgcccattcaatcggatctcgatgcattccactccggatttcagacttgcgcaaaagaagttctccagtaccttagccggtttgaatcgtggaccccacgcgaacccagatgcgtgcagcttatcaatcacctgcacgcagtggcaactcagtttcttccaaccccccagcttttgactcagcaagtgccccttagcaaagggacgggagcaccctccgccgctggatcagcagcagcgccgtgtctggaaagagcagggcaaaagctggaaccactggcatactgcgtgccagtaattcagcgcacccaaccctccgctgaacttgcagctgaaaacgataccgacaccgattcgggatacggcggtgaagcagaggcaaggccggacagggaaaaaggaaaaggtgctggggcctcgagagtgactataaagcaggagcctccaggggaagattcaccagcccctaaaaggatgaaacttgattctcgtggaggcggttcaggaggtggacctggcggtggggctgcagctgcggcagccgcacttcttgggcctgatcctgcggcagctgcagcactgctgcgacctgacgcagctcttctgtctagccttgtcgccttcggcggcggaggcggagcacctttccctcaacctgcggccgccgcagcacctttttgtctgcccttttgcttcctgagcccaagcgcggcggcagcatacgtgcagccattccttgataaaagcggtcttgagaagtacttgtaccccgcagcggcggcggcgccatttcctcttctgtacccagggatcccagcccctgcagccgctgcggcggctgcagcagcagccgcagcagccgccgctgcatttccttgccttagctcagttttgtccccacctcctgagaaggcaggagccgcagcggcgacccttctgcctcatgaggtggcccctcttggggctcctcacccgcagcatcctcacggaaggactcacctcccatttgcaggtccaagggaaccaggcaaccctgaatcgtccgcccaagaggacccatcgcaaccgggcaaggaagcaccc

SEQ ID NO: 219932 - DNA, 1446 bp, Artificial Sequence
  derived and/or modified sequence
atggacgaagggatccctcacttgcaggagcgacagttgctcgagcaccgagatttcataggcttagattattcgtccctgtacatgtgcaaacccaaacgaagcatgaagagggacgataccaaggatacatataagcttccccaccgactgattgaaaaaaagagaagagacagaattaacgagtgtattgcccagcttaaggacctgctgcctgagcacttgaagcttactacactggggcatctcgagaaagctgtggttctagagttgacattgaaacacctgaaagctctaacggctctgacggagcagcaacaccagaagataatcgccctccaaaatggcgagcgatcattgaagagccctatccaatctgacctggatgcatttcattccgggtttcagacctgcgctaaggaggttttgcagtaccttagccgattcgagtcttggactccccgcgaaccacggtgcgtgcaactcatcaatcatctgcatgccgtggccacccagtttttgcccacacctcagcttctgacgcagcaagtcccactgtctaaaggcaccggcgccccttccgctgccgggtctgctgctgccccctgccttgaaagggccgggcagaagctggaaccactggcctattgcgtgccagtgattcagagaacccagcctagcgctgagctcgcggcagaaaatgacacggacacggatagcgggtatgggggcgaagccgaagccaggccagatagagagaagggaaagggtgccggcgcatcaagagttactatcaaacaggaacctcctggggaagactccccagctccaaagcgaatgaaactggattccagaggagggggatcaggcggaggcccaggaggaggcgccgctgcggcagcagcagcactcttgggaccagaccctgcagcggcagccgccctgctgagaccagatgcagcactgctgtcatctttggtcgcattcggcgggggggggggagcgccttttcctcagcctgcggcagcggccgcacctttctgcctgcctttctgcttcttaagcccctccgccgcggcagcctacgtccaacctttcttggataagtctggacttgagaagtacctataccctgcggcggcggccgctccattccctttgctctatcccggcatacccgcccccgccgctgccgcagctgctgccgcggctgctgcagcggcggctgcggcttttccatgtcttagctcagttctgtctccaccccctgaaaaagctggagcggccgccgcaaccttactgccccacgaggtagcgccactcggagccccccatcctcagcacccgcatgggcggactcacctaccatttgctggtcctagggagccagggaaccccgaaagtagtgcccaggaagaccccagccagccaggcaaagaggccccc

SEQ ID NO: 219933 - DNA, 1446 bp, Artificial Sequence
  derived and/or modified sequence
atggatgaaggaatccctcacttacaagagagacagctgctggaacacagagattttataggcctggactattcctctctgtatatgtgtaagcctaagcgttcaatgaagcgggacgacactaaagatacatacaaactgcctcaccggttgatagagaagaagagaagagacaggatcaacgagtgtattgcccaattgaaggatctgcttccggaacatctcaaactgaccactctgggacacctcgagaaagctgtggtgttagagttaacgctaaagcacctcaaagcactcacagctctgaccgaacagcagcatcagaagatcatagcgctccagaatggcgagcggtctctcaaaagcccaatacaatccgatctggacgcattccactccggctttcaaacctgtgcaaaagaggttctccaatacctgagccgattcgaatcttggacccctcgagagcctaggtgcgtgcaactgatcaatcaccttcacgccgttgcaacccaattcctaccgacgccacagctactcacacagcaggttcccctgtccaaggggaccggtgcacctagcgccgctgggtccgctgctgccccctgcctcgagagggccggacagaagttggaaccgttggcgtactgtgtgcccgttatccaacgcacgcagcctagcgccgaattagctgccgaaaacgacacagataccgactcgggctacggaggcgaggcagaagcccgacccgatcgggaaaagggaaagggcgctggggccagccgggtgacaataaagcaagaacctcccggagaagactcccccgcaccaaagcgaatgaaattggactctaggggaggcgggtctggtgggggcccaggaggcggcgccgccgccgccgctgccgctctgttggggcccgaccccgcagctgccgctgcacttctccgtccagacgccgcgctgctctcttccctagtggcattcggtgggggtggaggagcgccctttccccaacctgccgcagctgccgcacccttctgtctgccattctgtttcctgtccccatcagccgccgccgcctatgtgcaacccttcctcgacaagagtgggctggaaaaatacctgtacccagcagccgctgccgcaccatttcccctgctgtaccccgggatacctgcgccggcagctgcagcagctgccgcagcggccgccgctgctgcagcagcggcctttccatgtttatccagcgtgcttagccccccgcccgaaaaagctggagccgctgctgctacgctgctgccccacgaagtagcaccactaggcgcccctcatcctcagcaccctcatgggcgtactcatttacccttcgcgggaccccgcgaaccgggcaacccagaaagctccgcgcaggaagaccctagccagcccggaaaagaggcgcct

SEQ ID NO: 219934 - DNA, 1446 bp, Artificial Sequence
  derived and/or modified sequence
atggacgaaggcatcccccacctgcaggagcggcagctcctggagcaccgggacttcatcggtctggactactcgagcctgtacatgtgtaagccgaagcggtccatgaagagagacgataccaaggatacttacaaactgccacaccggctgattgaaaagaagaggagagatcgcatcaacgagtgcatcgcccagctgaaagatctcttgccagaacatctgaaattgactaccctcggacatctggaaaaagcggtggtgctggaactgaccttgaagcacctgaaggcgctcaccgcgctgaccgagcagcagcatcagaagatcatcgctttgcagaatggcgaacggtcacttaaatccccgatccaaagcgatctggacgcatttcactctggcttccagacctgcgccaaagaggtgctccagtacctcagccggtttgagtcatggaccccccgagaaccgaggtgcgtccaactgatcaaccatcttcacgccgtggcaacccagttcctcccgacgccgcagttgctgactcaacaagtgccgttgtcgaagggaactggggcaccttccgcagccggctcggccgccgccccatgcctggaacgcgcgggacagaagctcgagccattggcatactgtgtgcctgtcatccagcggactcagccatcggcggaactggcagccgaaaacgacactgatactgacagcggatacggtggggaagcggaggctcgcccggaccgggaaaaggggaagggagcgggagctagccgcgtcactatcaaacaggaaccaccgggggaggatagcccagcaccaaagcggatgaaacttgacagccgcgggggtggcagcgggggagggccgggtggaggcgccgcagcggcagccgcagcactgctggggccagatcctgctgcggcggcagcccttctgcgcccggacgccgccctgctgtcgtcccttgtggcatttggaggagggggaggggcaccattcccgcagcctgccgccgctgcagccccgttctgcctgccgttttgcttcctgtcgccttccgcggcggctgcgtacgtccagccgttcctggacaagtcaggattggagaagtacctgtacccagccgccgccgccgcaccgtttcccctgctctaccctggcataccagccccagcagcggcagcagcagccgcggcggcggccgcagccgctgctgcggcctttccttgtctcagctcggtgttgagcccgcccccggaaaaggccggggcggcagctgccaccctgctgcctcacgaagtggcaccattgggtgcgccacatccgcagcatccccacggacgcacgcatctgccgtttgcgggaccgagagagccgggcaatcccgaatcatcggctcaagaggacccttcgcagcctggaaaggaggccccg

SEQ ID NO: 219935 - DNA, 1446 bp, Artificial Sequence
  derived and/or modified sequence
atggatgagggcatcccgcacttgcaagagcgccaactgctcgagcatcgagatttcatcggcctggactatagcagcttgtacatgtgtaagcctaaacgctcaatgaagcgggacgataccaaagacacttacaagctcccgcacagattgatcgaaaagaagagaagagacagaatcaatgaatgcatagcacagctcaaggacctgctgccggaacacctgaagctgactaccctcggacacctggaaaaggcggtggtcctggaactcacccttaagcatcttaaggccctgactgccctgactgagcagcaacatcaaaagattatcgcgctgcagaatggagagcgctcccttaaaagcccaatccagagcgatctcgacgctttccactcaggatttcagacctgcgcgaaagaggtgcttcagtacctctcgagattcgagagctggaccccgcgcgaacctcgctgcgtccaactcatcaatcatttgcatgcagtggccacgcaatttcttccgaccccgcagctcctgacccaacaggtgccactgagcaagggcactggcgcaccttcagcggcaggatccgcggccgcaccttgcctggaaagagcaggacagaagctggaaccattggcctactgcgtcccagttatccagcgcactcaaccctccgccgagcttgccgctgagaatgataccgacactgatagcggatacggtggagaggctgaagccagacctgaccgggaaaaaggaaagggagcgggggcttcaagggtgactatcaaacaggaaccgccaggggaggacagccctgcacctaagcgaatgaagctggactcgcggggcggcggatcggggggcggacccggagggggagccgcggctgccgccgccgctctgctgggccccgatcccgccgcagcagctgcactgctcagacccgatgccgcgttgctttcttcgctcgtcgcatttggaggtggaggcggggccccatttccacagcctgctgctgccgcagcacccttctgcctgccattctgttttcttagccctagtgcagcggccgcgtacgttcagccctttctcgacaagtcaggactggagaaatacctgtacccggcggctgcagcagctccatttccactcctgtacccgggcatcccggcccctgcagcggctgcggctgccgcggctgcagctgccgcagctgccgccgcgttcccgtgcctctccagcgtgctgtcaccgccgccggaaaaggccggagccgccgctgccaccctgctgcctcacgaggtggccccgctgggagccccacacccgcagcacccgcacggacggacccacctcccgttcgccggtccgcgcgagccggggaatccggaaagctccgcgcaagaggacccatcacagccaggtaaagaagctccg

SEQ ID NO: 219936 - DNA, 1446 bp, Artificial Sequence
  derived and/or modified sequence
atggatgaaggtatcccacatctccaagaacgacaactgctcgagcatagggactttatcgggcttgattacagctcgctgtacatgtgcaagccaaagagatccatgaagcgcgacgatacgaaggatacgtataagctgccgcacaggctgatagaaaagaaacggcgcgatcgtataaacgaatgtattgcccagcttaaggacctcttgcccgagcacctgaagttgaccacgttgggccatttggaaaaggcagtcgtccttgaactcaccctgaaacatctcaaagcgctcactgcgcttaccgaacaacaacaccagaaaatcattgcgctccagaacggtgagcgatccctcaaatcccctattcaatcagacctggatgcatttcattcagggtttcaaacttgtgcgaaggaggtgcttcagtacttgtcacgcttcgaaagctggaccccacgagaacccaggtgtgtgcaactgatcaaccatctgcatgccgtcgccactcaattcctgcctacccctcaattgcttacccaacaggtgccactttcgaagggaactggagctccctcggcggccggctccgccgctgcaccatgtctggaaagggcaggccagaagctcgagccgctcgcttactgtgtgcctgtcattcagcggacccagcccagcgcagagctcgctgcagagaacgacactgataccgattcaggatacggtggtgaagcagaggcacggcccgatagagagaaaggaaagggagcaggcgcaagtagagtgaccattaagcaggaacctccaggagaagatagccctgcccctaagagaatgaaactggattcgaggggaggaggctcgggtggcgggcctgggggaggagcagcggctgcagctgccgctctgcttgggccggaccctgccgcagctgcagcgcttctgaggccggatgcagcacttcttagctccttggtggcatttggtggtgggggaggtgctccgtttccgcagccagcagccgcagcagccccattttgcttgcccttctgttttctgtcaccgagcgcggccgccgcatatgttcagcctttccttgataagtctgggcttgagaagtacctgtacccggctgccgcagcagcacctttccccttgctgtacccgggaattccagcacccgccgcagcggctgcggccgcggctgccgctgccgcagcggcggcagcatttccatgcctttcttcagtgttgtcaccacctcctgaaaaggcgggtgccgcagccgcaacgcttctgccccacgaagtggctccacttggagcacctcacccacaacatccacacggccggactcacctcccttttgcaggccccagggaacctggaaatccggaaagctccgcacaggaggatccatctcaaccgggaaaagaagcacct

SEQ ID NO: 219937 - DNA, 1446 bp, Artificial Sequence
  derived and/or modified sequence
atggacgagggcatcccccatcttcaggaaaggcagctcctggaacaccgtgattttataggacttgactactctagtctgtacatgtgcaaacctaaacggtctatgaagagagacgacactaaagacacatacaagctgccccataggctaatcgagaagaaaaggcgggacaggatcaacgaatgtatcgcacaactcaaagacctcctccccgaacacctcaagctgacgaccctgggacaccttgagaaggccgtcgtgcttgagttaactctgaagcatttgaaggccctgacggccctgacagagcagcagcaccagaagataattgctctgcagaatggggagagatcactcaagagtcctatccagtctgacctggacgcctttcattcaggattccagacgtgtgcaaaggaggttctgcagtacctgtccaggtttgagtcttggacaccacgcgagccccgttgtgttcagttaatcaaccacctccacgcagttgcgacacaattcttgccaacgccccaactgctgacgcaacaggtgcccctaagcaagggaacaggagctccatcagctgccggctctgctgctgcaccctgcctcgaacgtgcagggcagaagcttgagccactcgcgtactgcgtccctgtgattcagcggactcagcctagcgccgagctggctgccgagaacgataccgacaccgacagcggatatggcggcgaggccgaggcgcgacccgaccgcgagaagggtaagggggccggcgcgagtagggttactatcaaacaggagccccccggggaggattctcctgcccccaagcgcatgaagctggactcacggggaggcggcagcgggggcggcccaggggggggggcggccgccgcggccgccgcactgcttggccctgacccggctgccgccgccgcacttctgcggcccgacgccgccctgctttctagcctcgtggcatttgggggtggaggaggcgccccatttccacagccagccgcagcagccgcgccattctgccttcctttttgcttcctctccccttctgcagctgcagcgtacgtgcagccctttctggataagtcaggtcttgagaaatatctgtaccccgccgccgctgccgcgccattcccactgttataccccgggattcccgcacccgctgctgctgccgcagcagcagctgcggcggctgccgccgccgcggccttcccctgcctctcttccgtactgtcgccccctccagagaaggccggcgcagctgcagcgaccctgctccctcacgaggtcgcgcccctcggtgcccctcatccgcagcacccacatggacgcactcacctcccctttgctggccctcgcgaacccggaaatcctgagagcagtgctcaagaggacccctctcaaccaggcaaagaagcgcct

SEQ ID NO: 219938 - DNA, 1446 bp, Artificial Sequence
  derived and/or modified sequence
atggacgagggcatcccacacctacaagaacggcagctgttggaacatagggatttcattggtctggactacagcagtctgtacatgtgcaaacccaaacgttcaatgaagcgcgatgacactaaggatacatacaagctgccacaccgcctcatcgagaagaagagacgggatcggatcaatgagtgcattgcacagttgaaggatctgctgcccgagcacctgaaactcactactttaggtcatctagaaaaggcagtggtgttagaactgactctgaaacatctgaaagctttaactgcactgaccgagcagcagcaccaaaaaatcatcgctctgcagaacggagagcgctccctgaagtcaccaatccaatccgacctagacgctttccattccggcttccagacctgtgctaaggaggtgctgcaatatttgtcccggttcgaaagttggactcctagagaaccacggtgcgtccagttaataaatcacctgcacgctgtggctacccagttcctgcccactccacaactgctgacacagcaggttccactgtctaaagggaccggcgccccctctgcagccggcagtgctgcagcaccatgtttagagcgggcaggccagaagctagagccactggcatactgcgtgcctgttattcagcgcactcaaccatctgctgagctagccgctgagaatgatactgacacagactctgggtacggcggtgaagcagaagcccgccccgatagagagaaaggcaaaggcgccggcgcttcccgcgtgactatcaaacaggagcctcctggtgaagacagccccgcaccaaaacgaatgaagcttgatagtcgtggcggcggatctggagggggcccaggggggggcgcagctgctgctgcagcagcactgctaggccccgatccagctgctgccgctgctctactgcggccagatgctgccctgctgtccagcctggtggctttcggaggggggggcggcgccccattccctcaaccagccgctgccgccgcccccttctgtcttcctttctgcttcctaagcccatccgctgccgccgcttatgttcagcccttcctggataagagcggtctggaaaagtacctgtaccctgcagcagcagccgctccatttccactgctgtatcctgggattcctgcacccgccgctgctgctgccgccgccgccgctgccgcagccgccgccgctgctttcccctgcctctcttctgttctgtcccccccacccgagaaagcaggcgctgctgcagctacccttctgcctcatgaagtcgccccattaggagcaccacacccccagcatccacacggaaggactcaccttcccttcgccggcccccgtgagccaggaaatccagaaagctctgcacaggaggatccctcccaacctgggaaagaggcaccc

SEQ ID NO: 219939 - DNA, 1446 bp, Artificial Sequence
  derived and/or modified sequence
atggacgaaggaatcccgcacctgcaagaacgccagttgctggagcacagagacttcatcggactcgactacagctcgctgtacatgtgtaaaccgaaacgttccatgaagagagatgacacgaaggatacctataagctgccgcaccgcctgatcgaaaagaagcgccgcgaccgcataaatgagtgcatcgctcagcttaaggacttgctgccggaacatctgaaattgactactctgggccacctggagaaggcggtggtgctcgagctgactcttaaacaccttaaggcactgaccgcactgacggaacaacagcaccagaagattattgcattgcagaacggagaacggtcgctgaagtcaccgatccagtcggacctggacgcatttcatagcgggttccagacctgcgcaaaggaagttctccagtacctgagtcgtttcgaatcatggacgccgcgcgagccaaggtgcgtgcaattgatcaaccatctgcatgcagtcgctacccagtttttgcctacccctcaactgctgacccagcaggtgcccctctccaagggaactggagcccctagcgctgcaggctcagcggctgccccatgcctcgagcgagctggacaaaagctggagccgctggcgtactgcgtcccagtgatccagagaactcaaccctccgcagagctggcggcggaaaacgacaccgacaccgactcgggatacggcggtgaggccgaggcccggccggaccgggaaaagggtaaaggggcaggggcttcgcgcgtgaccatcaaacaggaacctccgggagaagatagccccgcgcccaagagaatgaaactcgattccagaggcggaggatcgggtgggggcccaggaggaggagccgcggccgccgcggctgcactgctcggaccggatcctgccgccgcagcggctttgttgaggccggatgctgccttgctttctagcctggtggcctttggtggaggaggtggcgccccgttcccgcagccggcagccgctgctgcaccgttctgtctccccttctgtttcctgtcaccatcggctgcggccgcttacgtccaaccgttcttggacaagtcgggacttgaaaagtacctttacccagcggccgcggcagcgccgttcccccttctttacccaggcatcccagcgccggccgccgcagccgccgccgccgcggcagcagccgcagccgcagcagcctttccgtgcctgtcctcagtgttgtccccaccaccagagaaggccggggcagcggccgcaacgctgcttccacatgaggtcgcgccacttggcgctccccacccacagcacccgcacggccgcacgcatctcccattcgcgggaccaagggaaccagggaacccggaatcctcagcgcaggaggatcccagccagccaggcaaggaggcaccc

SEQ ID NO: 219940 - DNA, 1446 bp, Artificial Sequence
  derived and/or modified sequence
atggacgagggcattccgcatcttcaggagaggcagctgctagagcatagggattttattggactcgactattcaagcctttacatgtgcaaaccaaagcgcagcatgaagcgggatgataccaaggacacttacaagctgccacaccgcttgatcgaaaagaagaggcgcgaccggatcaatgagtgcatcgcacaattgaaggatctgctgccagaacacctgaagctgactactctgggacatctggagaaggcggtggtgctggaactgacgcttaaacatctcaaggccttgacggccctcactgagcaacagcaccagaagattattgctcttcagaacggagaaaggtctcttaaatcccccatccagagcgacctggacgcctttcactcgggatttcagacttgtgctaaggaagtgttacagtatctttcgcgctttgaatcttggacgccgagagaaccgcggtgcgtccaattgataaatcacctgcacgcggtggcaacacagtttttgccaactccacagctattgactcagcaggtgcctctttcaaaagggactggtgcacccagcgccgccggtagtgctgcggcaccttgtctagagcgagcgggtcaaaaattggagccacttgcgtactgcgttcccgtaattcagcgcacgcaaccttcagcagagctggccgcagaaaacgacaccgacacagactcagggtacgggggtgaggctgaggcacgcccagaccgggagaagggaaaaggcgcaggtgcatctcgcgtaaccataaaacaagaaccccccggtgaagactcaccagccccaaaaagaatgaaattggacagcagggggggtggctcagggggcggccccggaggcggtgccgccgcagccgcagctgcacttctaggacctgaccccgcagcagccgccgctttgcttagacctgatgccgcattgctgtctagcttggtggcattcggcggtggcgggggggctccattcccgcaacccgccgcagctgcggcacctttttgtttgccattctgtttcctctcgccgagtgctgcagccgcatacgttcagcctttcctggataaatcagggctggagaagtacttgtatcccgcggccgcggcagccccattcccactgctttaccctggcattcctgccccagccgccgccgccgccgccgctgcagcagctgcagctgctgctgcggccttcccctgtctatcatctgtgctctcaccaccacccgaaaaggctggagcagccgccgccactcttctgccacacgaggttgctcctctaggggctccacaccctcagcatcctcacgggaggacccacttgccattcgccgggccgcgcgagccagggaaccccgagtcctctgcacaagaagatccctcacagccgggcaaagaagctccg

SEQ ID NO: 219941 - DNA, 1446 bp, Artificial Sequence
  derived and/or modified sequence
atggacgaaggaattccgcacctccaggaacgtcagctgctcgaacatcgggatttcatcgggttggactactcttcgctttacatgtgtaaacctaagagaagcatgaagagggatgatacgaaagatacctacaagctgcctcatcgccttattgagaaaaagagaagagacaggattaatgaatgcatagcacaactgaaggatcttctgcctgaacaccttaaactcacgaccctgggccatctcgagaaggcagtcgtgcttgaattgacccttaagcaccttaaggcacttactgcacttactgaacagcaacatcaaaagatcattgcattgcagaacggcgagcggtcgctgaaatcgcctattcaatctgacttggacgcgtttcattccggttttcaaacctgtgccaaagaggttctccaatacctgtcgagattcgagagctggactcccagagaacccaggtgtgtccagttgatcaaccatcttcacgctgtagcgactcaatttctgccaacgccacagcttctgacccagcaggtccctcttagcaagggtaccggagcacccagcgcagcaggatccgccgccgccccttgcctggaaagggcgggccaaaaacttgagcccctggcatattgtgtgccagtgatccaacgcacgcaaccctcagcagaactggcggcggaaaatgatactgatactgattcaggatacggaggtgaggcggaggcgcgcccggaccgggaaaagggtaaaggagcgggtgcatccagggtcactattaagcaggaaccacctggggaggattcacctgcaccgaagagaatgaagctggattcccggggtggcggttccgggggaggaccagggggaggagcagctgcagccgcggcagcacttcttggaccggatccagctgccgcggccgcacttctcagacctgatgccgcactcttgtcatctctggttgcatttggcggtgggggcggggccccgttcccacagccagccgccgctgcagcacctttttgcctccccttctgttttcttagtccaagcgccgccgccgcatacgtccaaccttttctggacaagtcggggctcgaaaagtacttgtaccccgcagcagccgcagcccccttcccgctgctctaccccggaatccctgcaccagctgcagcagcagctgcggcggccgcagccgccgcggctgccgctgcattcccttgtctgagctccgtgctttcgcccccgccagagaaggcaggagctgccgccgcgaccttgcttccacacgaagtggctccactgggtgcgcctcacccgcagcatccacatggccgtactcatctcccttttgcgggacctcgagaacctggcaaccctgaatcgtcggcacaagaggaccctagccaaccaggcaaggaagcccct

SEQ ID NO: 219942 - DNA, 1446 bp, Artificial Sequence
  derived and/or modified sequence
atggatgagggaattccacacctgcaggagcgacaactgctggaacacagggactttatcggactcgattactcctcactgtatatgtgcaagcctaaacgctctatgaagcgcgatgataccaaagatacatataaactgcctcaccgcctgatcgaaaaaaaacgcagagaccgcatcaacgagtgcatcgcccagctgaaagatttgctccctgaacatctcaaactgaccacactgggtcacttggagaaggccgtggtgctggaactgaccttgaagcacttgaaagccctcacagcactgacagagcagcagcaccaaaagataatcgccttgcagaacggggagagaagtctgaagagtccgattcagtctgacctggatgccttccattcaggatttcagacatgtgccaaggaggtcctgcagtatctgtccagattcgagagttggaccccccgcgaaccacgctgtgtgcagctcatcaaccacctgcatgccgtggccacccagtttctccctacacctcaacttttgacacagcaagtcccgttgtcaaaagggactggggctccgtccgccgctgggtcagctgcggcaccatgtctggaacgagccgggcagaagctggagcccctggcttattgcgtgcccgttatccagcgaacacaacccagtgcagaactggccgccgaaaacgataccgacactgactccggttacggcggcgaagccgaagccagacccgatagagagaagggtaagggagcaggagcctcccgggtcacaattaagcaggagccacccggcgaagactctccagcccctaagcgaatgaaactggactctcgcggcggagggtccggcggcggcccaggcgggggcgccgctgcggcagcagctgccttgctcggtcccgatccggctgccgccgctgcccttctgagacctgacgctgccctgttgtcctccttggtggcgtttggcggcggtggcggggcacccttcccacagccggcggccgcagcagcgcccttctgcctccctttctgctttctgagcccaagtgcggcagcagcttacgttcaacccttcctcgataaaagtggtctcgaaaagtatctgtatcctgccgctgccgcagctccatttccattgctgtaccctggcatccctgcacccgctgccgcggcggccgctgctgccgccgctgccgccgcagcggccgcctttccgtgcctgtcatccgtgttgtccccacctccagaaaaagccggcgccgccgcagccaccctcctcccgcatgaggtggctccactgggagcaccccatccgcagcacccccacggcaggacacatttgccatttgccggcccccgggagccgggtaatccggaatcatctgcacaggaggaccctagtcagcccggtaaggaagcccca

SEQ ID NO: 219943 - DNA, 1446 bp, Artificial Sequence
  derived and/or modified sequence
atggatgagggtatccctcatctgcaggagcgacagctcctggagcatagagacttcatcggcctagactatagtagtctgtatatgtgtaagcccaagcggtcaatgaagcgggatgatactaaggatacttacaagctgcctcacagactaattgaaaaaaagcggagggatagaattaacgaatgtattgcccagttgaaggacctgctcccggagcatcttaagctcactactctgggccatttggagaaggcggtggtgttggagttgacactcaagcaccttaaggcgctgaccgcacttacagaacagcagcaccaaaaaatcattgccttacagaacggggaacggtctctaaagagccccattcagtctgacctggatgccttccacagcggatttcaaacgtgcgccaaggaggttctgcaataccttagcagattcgagtcatggacgccgcgtgaacctcgctgcgtacaacttattaaccatcttcacgcggtggccacccagtttctgcccacaccccagctgctcacacagcaagtgccactgagcaaaggaactggcgcccccagcgctgccgggtctgcggctgcaccttgcctcgagcgtgcgggacagaagctggagccactggcctactgtgtcccagtgattcagaggacacagccatcagcagagttggccgcagaaaacgacactgatacggactctggatacggcggagaggctgaggcccgccccgatcgggagaagggtaagggcgctggcgcgagccgagtaaccatcaagcaggaacctcctggcgaggattcccccgcacctaaaaggatgaaacttgacagtcgcggcggaggctccggggggggccctgggggtggggctgcagccgccgccgccgctctgctgggcccagaccctgcagccgcggctgcattgctccgccccgacgccgcgctactgtcatcgctggtggcctttggcgggggcggtggcgctcctttcccccagccagctgctgctgccgctccattctgtctgccgttttgttttttaagcccgagcgccgcggccgcttacgtgcagccttttctggacaagtcaggactggaaaaatacttgtaccctgcagccgccgccgcaccatttcctctgctctaccccggtatcccggcaccggccgccgcggccgcagcagccgcggcagctgcagccgcggctgccgcattcccttgtctatcttccgttctgagcccccctccggagaaggctggtgctgccgcagccacactcttgcctcacgaagtggctcccctgggagccccccaccctcaacaccctcacggcagaacgcacctgccgttcgcgggtccaagggagcctggcaaccctgaatccagcgcgcaagaagacccctctcagcccggcaaagaggcgcct

SEQ ID NO: 219944 - DNA, 1446 bp, Artificial Sequence
  derived and/or modified sequence
atggatgagggtatacctcatctccaagaacgccaactgctcgaacacagggactttatcggtctggattactcaagcctttacatgtgtaagcctaagagatctatgaaacgagatgacactaaagatacttacaaactgcctcacaggcttattgaaaagaaacggcgggacagaatcaacgagtgtatagctcaactcaaagatctccttcctgagcacctcaaacttaccacccttgggcacctggagaaggcagtggtgttggaacttactcttaagcatttgaaggcattgaccgcacttactgagcaacaacaccaaaagattattgctctgcaaaatggagaacgtagtcttaagtcgcctattcaatcggatctggatgcctttcactcggggtttcagacttgcgcaaaagaagtgctgcagtacctttcgcggttcgaatcttggactcccagagaacctagatgcgtgcaactgattaaccatctccatgcagtcgcaacccagttcctgcccaccccacagctgctcacgcagcaagtaccgctctcgaagggtaccggcgcaccctcggcagcaggttcagctgcagcaccgtgcctggagcgcgccggacaaaaactggagccacttgcctactgcgtccctgtcatacaacggacccagccatccgcagaattggcagcagagaacgatacggataccgacagcggatacggtggcgaggcagaagcgcgtccagatagggaaaagggcaagggtgcaggagcatcgagagtcactattaagcaagaacccccgggtgaagattcgccagccccaaagaggatgaaattggactcccggggtgggggatcgggcggaggaccaggtggtggagcggcggcggcagcggcagcattgctgggcccggacccagcagcggctgcagcgttgcttagaccagatgcggccctgctttcctctctggtcgcatttggtggaggaggaggggcaccatttccacagccagccgctgcggcagctcctttctgtctgccgttttgctttttgtccccctcagcagcagcagcatacgtgcaaccattcctggataagtcagggctggaaaagtatctttacccggcagccgccgcagctccattccccctgctctaccctgggattcctgcccctgcagcggccgccgccgcggcagccgcagccgccgcggctgcagcagccttcccctgtctttcaagcgttctctcaccaccgccagaaaaggcgggggcagcagccgcaacccttcttcctcatgaggtggcacctcttggagcaccgcatccccagcatccgcatggaagaactcatctcccatttgcaggtcctagagagcctggtaatcctgagtcgtccgcacaggaggatccatcgcagccggggaaggaggcccca

SEQ ID NO: 219945 - DNA, 1446 bp, Artificial Sequence
  derived and/or modified sequence
atggacgagggtatccctcatcttcaggagaggcagttactggaacatcgggacttcattggtctggactactcatccctctacatgtgtaagcctaaacggagcatgaaaagagatgatacgaaagatacatacaagctgccacaccggttgatcgagaagaagaggagagacagaatcaacgaatgcatcgcacagctgaaagacctattgccagagcatctaaagctgaccactctgggtcatctcgagaaggcagtagtgcttgagctgaccctaaaacatctcaaggctctgactgcgttaacggagcagcaacaccagaaaattatcgcgctgcagaatggggagaggtcattgaagtctcctatccagagcgaccttgacgcttttcacagtgggttccagacatgtgccaaagaagtcctgcagtacctctctcggtttgagagttggacaccaagagaacctcgttgcgtccagttaattaaccatctgcacgccgtggccactcagttccttcccacaccccagctgttgacacagcaggttccacttagtaagggtacaggcgcgccttccgccgcagggtcagccgccgccccctgtctggagcgcgccgggcaaaagctggaacctctcgcgtattgcgtgccagtcattcagaggacccagcctagcgctgagctagcagcggaaaacgacacagacaccgatagtggctacggaggggaggcagaggctaggcccgaccgcgagaaaggaaaaggcgccggagcctctcgggtcacgataaaacaggaaccacccggtgaggactccccagccccgaaaagaatgaaactcgattctcggggtggcgggagtggtggaggccccggcgggggggccgctgcggcagccgctgcactactgggccctgaccccgccgctgcagccgcactgcttcggcccgacgctgcgctgttatcttctctggttgcatttgggggcggcggtggggctccttttccccagccagccgctgctgccgcccctttttgcctgccattttgcttcctgagtccttctgcagctgcagcctatgtgcaaccattccttgacaagtcaggactcgagaaatacctgtatcccgctgccgctgctgcaccatttccactgttataccctggcataccagcacctgccgctgcggccgccgctgcggcggccgccgccgctgcggcggctgcatttccatgcctaagcagtgttttatctcctcctcccgaaaaagctggggccgccgccgcaactttgctgccccatgaagtcgctccacttggggccccacaccctcagcatccgcatggtcggacccatctgcctttcgctggtccccgcgaacccgggaaccccgaatcctctgcccaggaagatccgagtcagcctggaaaagaggcgccc

SEQ ID NO: 219946 - DNA, 1446 bp, Artificial Sequence
  derived and/or modified sequence
atggacgagggaatcccacatctgcaggaaagacaactgcttgagcatcgcgactttatcgggctggactactcctcgttgtacatgtgtaaacctaaaaggagcatgaagcgggatgataccaaggatacctataaacttccccataggctcatcgaaaagaagagacgtgataggattaatgagtgcattgcacagctgaaggacctcctgcccgagcaccttaaacttactaccctggggcatctggaaaaagccgtcgttcttgagttgactttgaagcaccttaaagctctgaccgcactcactgaacaacagcaccagaagatcattgcactgcagaatggagaacggtcccttaagtccccaatacagtccgacctggatgcatttcactcaggattccaaacttgcgcaaaggaagtcctccaatacctctcacgcttcgagtcgtggactcctcgagaaccccggtgtgtgcaactcattaaccatctgcacgcggtggcaactcagttcctcccaaccccacaactgcttacccaacaagtgcccttgtcaaagggtaccggtgcaccatctgccgccggctcggcagcggcaccatgtttggagcgagctgggcaaaagttggagcctcttgcgtactgcgttcctgtgattcaaagaactcaacccagcgccgaactggccgcagagaacgatacggacacggacagcggctatggaggcgaagccgaagcaagacccgacagagagaaaggtaagggtgcaggagcctcccgagttaccattaaacaggaaccacctggagaagattcgccagcaccaaagagaatgaaactggatagccggggcggagggtccggaggaggtcccggagggggcgcagcggcggcagccgcggcactgttggggccggatcccgcagccgcagcagctctccttaggcccgatgcagctctcctctcttccttggtagcatttggcggtggcggcggagcccctttcccgcagcccgcggcagcagcagcacctttctgccttcctttttgttttctgtccccaagcgccgcggcagcgtacgtccagccctttctcgataagtcgggacttgaaaagtacctgtaccctgcggcggccgcagcaccatttccacttctctacccaggtatccctgccccagctgccgccgccgccgctgctgccgccgcagcggccgccgcggccgcatttccatgtctgtcctcagtgctgtccccaccgcctgagaaggccggagccgctgccgcaacgcttcttccgcatgaagtcgccccacttggcgcccctcatccacagcaccctcatggtaggacgcatctgccatttgcagggcccagagaaccaggcaaccctgaaagctccgcacaagaagatccaagccagccaggaaaggaagcacct

SEQ ID NO: 219947 - DNA, 1446 bp, Artificial Sequence
  derived and/or modified sequence
atggacgaaggaatcccccaccttcaagagcgccagctgctggaacatcgggacttcattggcctcgactacagcagcctgtacatgtgcaagcccaagcggagcatgaaacgggatgatacgaaggatacctacaagctgccacatcgactgatcgagaagaagcggcgtgaccgaatcaatgagtgcatcgcacagttgaaagatcttttgccggaacatttgaagctgaccaccctggggcatctggaaaaagcggtcgtgctggaactgaccctgaagcacctgaaggccctcaccgctctgactgaacagcaacatcaaaagattatcgccctccagaacggcgagaggagcctgaagtcgccaatccaatcagaccttgacgccttccactcgggatttcagacctgtgccaaagaggtgcttcagtacctgtcgcgtttcgagtcctggaccccgagagaaccgcggtgtgttcagctgattaaccacttgcacgcagtcgccactcaatttctcccgactccacagctgcttactcagcaggtgcctctttcaaaaggaactggagccccgtcggccgccggctccgcagccgccccgtgtctggaaagagctggccaaaagctcgagcctctggcgtactgcgtgccggtcatccagcggacccagccctccgcagaacttgcggctgagaacgatacggacaccgactcgggatacggtggggaagccgaagcgcggcctgacagagaaaagggcaagggagcgggtgcgtcacgggtgaccatcaagcaagaaccgccaggagaagattcaccagcgcccaagagaatgaagctggatagcagagggggcggatccggcggcgggccaggaggaggagctgcggcggctgcggccgcgctcctgggtccggatccagcagcagctgcggcgctgctgaggcctgatgcggccctcctgagctccttggtagctttcgggggtggtggaggtgcaccgtttccacaaccagcggccgcggcagcgccgttctgccttccattctgcttcctgtccccgtcagccgccgcggcttatgtgcagccctttttggacaaatccggcctggagaagtacttgtaccctgcggccgccgctgcgccgtttccactcctgtacccaggaatcccagccccggcagctgcagcggctgccgccgccgcagccgctgctgcagcggccgctttcccgtgcttgtcctccgtgctgtcaccgccgccggagaaggctggagctgccgcagcgacgctgctgccccacgaggtggcaccgctgggcgcacctcatccgcagcacccgcatggacgcacccacctgcccttcgcgggaccaagagagcccggcaatccagagagctcggcgcaggaagacccgtcacaacccggaaaggaagctccg

SEQ ID NO: 219948 - DNA, 1446 bp, Artificial Sequence
  derived and/or modified sequence
atggacgaaggcatcccacacctgcaggagaggcagcttctcgagcatagagacttcatcggactggattactcgtccctgtacatgtgcaagcccaagcggtcgatgaaacgggacgataccaaggatacgtacaaactgccgcatagactcatcgagaagaagcggagagatcggatcaatgaatgcatcgcccagttgaaggatctgctgcctgagcatctcaagctcactacgctgggccacctggaaaaggcggtggtcctggagctcaccctgaagcacctgaaagccctcactgccctgaccgaacaacagcaccagaaaatcatcgcgctgcaaaacggagaacggtcacttaaatcccccatccagagcgacctggacgccttccactctggctttcagacctgtgcaaaagaagtgctccagtacctgagcagattcgagtcatggactccgcgcgaaccacgctgcgtgcaattgattaatcacctccacgccgtggccactcagttcctccctactccacagctcctgacccagcaggtgcccttgagcaaaggaactggcgccccgtcggccgctggtagcgctgccgcaccgtgcctcgaacgggcaggacaaaagctcgagcccctggcctactgtgtccctgttatccaacgcacccagccatcagcggaacttgccgccgaaaacgacaccgacactgactccggatacggtggcgaagcagaagctcgcccggatcgcgaaaagggaaagggcgcgggagcctcgcgcgtgaccattaaacaagagcctccaggggaggattccccggcgccaaagaggatgaagctcgactctaggggcggtggcagcggaggagggccggggggaggtgccgctgctgccgcagcagccctgttgggaccagaccccgcggcggcggccgcattgcttcgacctgacgccgccctgctgtcgtcgctggtcgccttcggaggaggaggcggggcaccgttccctcaacctgccgctgcggcggccccgttctgccttccgttctgctttctgtcaccgtcagcagccgccgcctacgtgcagcccttcctggacaagtccggtctggaaaagtacctgtacccggccgcggcagccgcacctttccctcttctgtatcccggaattcctgctccagccgcagccgctgctgctgctgcagctgcggcggcagcggcggccgcgtttccgtgtctgtcctccgtcctttcgcccccgccagaaaaggcgggagcagctgccgcaactctcctcccgcatgaggtggcacctctgggagcaccgcatccgcaacacccgcatgggcgcacccacctcccatttgcgggaccacgtgagccgggcaacccggagtccagcgcgcaagaggatccgtcgcagccagggaaggaagctccg

SEQ ID NO: 219949 - DNA, 1446 bp, Artificial Sequence
  derived and/or modified sequence
atggatgagggcattccccacttgcaagaacgccagttgttggaacatcgggattttattggcctggactattcttcactttatatgtgcaagccaaaaagatccatgaagagagacgacactaaggacacttacaaactgccacacagattgattgagaagaagcggcgggatcgcatcaatgagtgcatcgcccagctcaaggacctcctccccgagcatctgaaactgaccaccctaggacacctcgaaaaagctgtggtcctagaactcaccctgaaacacctgaaagccctgacagcgctgaccgagcagcagcaccagaaaataatagctcttcagaatggcgaacggagtctcaagtctccaattcagtctgacctggatgctttccattccggatttcagacatgtgctaaggaggtgttacagtacctgtccagattcgagtcctggaccccgcgggaaccgcgatgtgtccaactgatcaaccacctgcacgccgtcgcgacccagttcctgcctaccccacagttgctcacgcagcaagtgcccctttcgaagggaaccggtgcaccgagcgctgctgggagcgctgccgcaccctgtctagaacgcgcgggccagaagctagagcccctggcatattgcgtgccagtcatccagcgaacacagccctctgccgaactcgccgccgaaaatgatacggacactgatagtggatatgggggggaggccgaagcaaggcccgacagagaaaagggcaaaggcgctggggcctctagggtaactatcaagcaggagccgccaggagaggatagcccagcccccaagaggatgaagctagattcccggggaggaggctctggcggcgggcccggcggcggggctgcggccgccgcagccgctttacttggtcccgatcctgccgccgcggccgcccttctgcgtccagacgccgccttgctcagctccctggtagcctttggtggagggggtggtgcgccatttccgcagccagcggccgctgccgcccctttttgcctgcctttctgctttctctccccaagtgccgccgctgcatatgtacagcccttcctagataaatccggactggagaagtacctttatccggccgcagcagccgccccctttcctctactctatcctggcatcccagcaccagccgccgcggccgccgccgcagccgcggccgccgccgctgccgccgcctttccctgtctttcctcagtcttatctccacctcccgaaaaggcgggagctgcagctgctaccttgctaccccatgaggtggcccccttaggcgcaccacatccccaacaccctcatggacgcacacatcttccattcgccgggcccagggagccggggaacccagagagcagcgcccaggaggaccccagccaacccgggaaggaagctccc

SEQ ID NO: 219950 - DNA, 1446 bp, Artificial Sequence
  derived and/or modified sequence
atggacgaagggattcctcatctccaagagcgccagcttctggaacacagggacttcatcggacttgattactccagcctctacatgtgcaagccgaagcgatccatgaaacgggacgatactaaggatacctacaagctcccacaccgcctgattgagaagaaaaggagagacagaatcaacgagtgtattgcgcagcttaaggacctgctgccagaacatttgaagctgactactctgggacatcttgaaaaagcagtggtgctggagcttacgctcaaacacctcaaggctctgaccgcactgaccgaacagcaacatcaaaagatcattgcattgcaaaacggtgaaagatctctcaagtcgcctatccaaagcgacctggatgcattccattcgggtttccaaacgtgtgcgaaagaggtgcttcaatacttgtcacgcttcgaatcgtggacccccagagaaccgcgttgcgtccaattgatcaatcatctccatgcagtcgccacccagtttcttcctacgcctcagcttctgacccagcaggtccccttgtcaaagggcaccggcgccccttcagctgccggatcagcagctgcaccttgtttggaaagggcaggacagaaactggaaccgctggcctactgtgtcccagtgattcagcggacccagccttccgcagagcttgccgccgagaatgacaccgatactgattcgggctacggtggcgaagccgaagcacggccagatcgcgagaaaggaaagggtgcgggagcctccagagtgactattaagcaggaaccgcccggggaagattcacccgcaccaaagcggatgaagctcgattccaggggcggtggtagcgggggcggacccggaggaggtgcggccgcagcagcagctgccctgctcgggccagatcctgcggcggcagccgcacttctgcggccagacgccgcccttctgtcgagccttgttgcatttggaggcgggggaggcgcgccttttcctcagcccgctgcagccgcggcacctttttgtctgcccttttgtttcctctccccaagcgcggcagccgcctacgtgcagcctttcctcgataagagcggactcgagaaatatctttacccagcagcggctgcagccccttttccacttttgtacccaggtatccctgcgcccgcagccgccgcggcagctgcggcggctgctgcggcagcggcagcggcctttccttgcctgtcgtcggtgttgtctcctccaccggaaaaagcgggagcagctgcagcgactctcttgcctcacgaggtggcccctttgggtgcaccacacccgcaacacccacatggacgaactcatctccctttcgccggaccaagagaacccggaaatccggaatcaagcgcacaagaggatccatcacagcccgggaaggaagcccct

SEQ ID NO: 219951 - DNA, 1446 bp, Artificial Sequence
  derived and/or modified sequence
atggacgagggcattcctcatctgcaggaacggcaattactcgagcacagagactttattggtctcgactacagctctttgtacatgtgcaagccgaagaggtccatgaagcgcgacgatacgaaagatacctataagctgccacaccgtctaattgaaaaaaaacgacgcgataggattaatgagtgtattgctcagttgaaagacttactgcctgagcacctgaaactgactacgctgggccacctggagaaagccgttgtgctggagttgaccctgaaacacctcaaagcgctgacggccctgaccgaacagcagcaccagaaaattatcgcactccagaatggcgaacgctccctgaagtcaccgatacaaagcgatctggacgccttccatagcgggttccagacttgcgccaaggaagtgctgcagtacctgagcagatttgaatcgtggaccccccgcgaacctcgctgcgttcaactgatcaatcaccttcacgcagtggctactcagttcttaccaacgccgcaactgctgacccaacaggtcccgctcagcaagggtactggcgccccaagtgcggcaggtagcgccgccgcgccgtgcctcgaacgggctggtcagaaactggaaccgctggcatattgcgtcccagttattcagagaactcagccgagcgctgaactggccgctgagaatgacactgacactgatagcggttatggtggagaggcggaggcgcgcccagatcgcgaaaaaggtaaaggtgcgggagcgtcacgcgtgaccattaaacaggaacctcccggggaggatagcccagcgccaaaacgtatgaagctggactccaggggcggcggatctggaggtggcccgggtggaggtgcagccgcagcggcggcggctctgctgggcccagatcctgcagctgctgccgccctgctgcgccctgacgcagctctgctgagctcactggtcgcatttggcgggggtgggggtgcaccttttccacagcctgcagcggcagcggcccccttctgcctgcctttttgctttctgagcccaagcgccgctgcagcgtatgtacagccgtttctggacaagtccgggctggagaaatatctctatccagcggcggccgcggctccatttccactgctgtacccaggaatcccagcgccagccgccgctgccgccgccgcggcggcagctgccgctgccgcagcagccttcccgtgtttgtctagcgtgctgtcacctccgccagagaaggctggtgccgctgctgcgacgctcctgcctcacgaagttgcgcctctgggcgcgccacaccctcagcatccgcatggtaggacccatctgccattcgcaggtccgcgagaaccaggtaacccggaatccagcgcgcaagaagatcctagccagcccggtaaagaagctcca

SEQ ID NO: 219952 - DNA, 1446 bp, Artificial Sequence
  derived and/or modified sequence
atggatgaggggatccctcacttgcaggagcggcagctgcttgagcatcgagactttatcggcctggactacagcagcctttacatgtgcaaacctaagcgatccatgaagagggacgatactaaggatacctataagctgccacataggctcatcgaaaaaaagcgcagagaccggattaatgaatgcattgcccaactcaaggacctgctccccgagcacttgaaactgactacacttggacacctggagaaagctgtggtgctcgaactgactttgaagcatctgaaagcactgacagccctgaccgaacagcagcaccagaaaattattgctctccagaacggtgagcgcagcctcaaatccccaattcagtccgacctcgacgccttccattcagggtttcagacatgtgccaaggaagtgttgcagtacctgagccggtttgagtcttggacccccagagaaccccgctgcgtccagctgatcaatcacctccacgcagtcgccacccaattcctgcccaccccccagttgttgacccagcaagtgccattgtcaaaaggcacaggagccccgagtgccgccgggagcgcagccgcgccttgcctggagcgagcaggacaaaagctggagccactggcctattgtgtacctgtgatccagcgaacccagcccagtgctgagctggctgccgaaaatgatactgatacagacagcggctacggaggagaagccgaagcacggcctgaccgagagaagggaaagggcgctggggccagtcgggtgactattaaacaggagccaccgggtgaggactctccagcacctaagagaatgaagctcgattctcggggagggggcagcggcggcggcccgggcgggggggctgccgccgcagcggccgctctcctggggcctgaccctgctgcggccgccgccctgctccgcccagacgctgctcttctgtcttccctcgtggccttcggaggcggaggaggagcaccttttcctcaacctgctgcggctgccgcgccattctgcctccctttctgttttctgtcacccagcgcagcggcagcctatgtccaacccttcctggataagtccggcctcgaaaagtacctgtacccagccgcggctgccgcgccctttccgctcttgtatcccggcatacctgcccccgctgcagcagcagctgccgccgcagcggctgcggcggctgccgccgcttttccctgcttgtcaagcgtcttgtctcccccccctgaaaaggctggagcagccgccgctaccctgctgccgcatgaggtcgcacccctgggggctcctcatcctcagcacccacacggccgaacacatttgcctttcgccgggccacgggaaccgggcaatcccgagagcagtgcccaggaggacccgtcacagcctggtaaggaagctccc

SEQ ID NO: 219953 - DNA, 1446 bp, Artificial Sequence
  derived and/or modified sequence
atggatgagggaataccacatctccaagaaagacagctcctggaacaccgggactttattggtctggattacagttccctttacatgtgtaagccaaaacgctcaatgaagcgagacgacacaaaggacacttataagttgccacacaggctgatcgagaagaagcgaagagacagaatcaatgaatgcatcgcgcagttaaaggatttattgcccgagcatcttaagctcaccacactgggacatcttgaaaaagccgttgtgctcgagctgaccctcaaacatctgaaagccctaaccgcactgaccgagcaacaacaccaaaaaatcattgcactgcagaacggagaacgctcactcaagtctcccatacaaagcgacttggatgcgtttcacagcggcttccagacctgcgccaaggaagtcctccagtacctgtccaggttcgaaagttggactccacgcgaacccaggtgtgtacagctgataaatcacttgcatgccgtggccactcagtttcttcccacccctcagttgctgactcagcaagtgcccctatccaaaggtaccggagctcctagcgccgccggatcagcggcagccccctgtctggaaagagctggccagaagttggagccgcttgcctattgcgtaccagtcatccagcggacgcagccatccgcagaattagctgccgagaacgacacagacacagactctggctatggtggcgaggccgaagcccgacccgaccgcgagaaaggcaaaggggcaggcgcatctagagttaccattaagcaggagcctcccggcgaagacagtcctgctcccaaacgcatgaaactcgactccagggggggggggtcgggtgggggtccaggaggaggagccgctgcagcggcggccgctttattgggtccggaccccgccgcggccgctgctctgctgcgacctgatgctgctctgctgagctctcttgtggccttcgggggaggaggcggtgcccctttcccccagcccgccgcagcggctgcccctttttgcctgcccttctgcttcttgtcaccgtccgcggctgcggcctacgttcagcctttccttgataaatcagggctggagaaatacctctacccggccgcagcagccgcaccattccctctgttatatcccggaatccccgcaccagcagccgctgccgccgccgccgcagcagctgcagccgccgcagccgcgttcccgtgtcttagcagtgtgctgagccctcctcctgagaaggcgggagcagcagccgcgactctcctgccacacgaggtggctcccctgggtgctccgcatccccagcacccccacggaaggactcacttgccatttgccggcccacgcgagccaggcaatcccgaatcctctgcacaggaggacccttcacaaccgggaaaagaggccccc

SEQ ID NO: 219954 - DNA, 1446 bp, Artificial Sequence
  derived and/or modified sequence
atggatgagggcatcccgcatctgcaggaacgccaacttttagaacatagagattttattgggttggattattcaagcctgtatatgtgtaaaccaaaaagaagcatgaaacgggatgacacgaaagatacatataaacttccacacagacttatagagaagaaacggcgtgaccgtatcaacgaatgtattgcccagttgaaagatcttctcccggaacatctgaaattaaccacgttgggccatctggaaaaggcggtcgtgctagaattaacgctcaaacatctaaaggcgctgactgcattgacagagcagcagcatcagaaaattattgctctgcaaaacggcgagcggtcgctaaaatcacccattcagtcagacctggatgcgtttcattcaggcttccaaacttgtgcaaaagaagtccttcagtatctttcccgttttgaatcatggacaccgagagaaccacgctgtgttcagctgatcaaccatttgcatgcagtagcgacacaatttcttcctacgccgcaactgttgacgcagcaggtgcctttatctaaaggtacgggagcaccatcagccgcaggatcggctgcagctccctgcctggagcgtgcgggacagaaacttgaaccgctggcatactgcgtgccagtcattcagcgtacacagccgtctgccgaattggctgccgaaaatgatacggacacagattctggttatggaggcgaagcggaagcccgacctgatcgcgagaaaggaaaaggagccggtgcgtcaagagtaactatcaaacaggaaccacctggggaagattctccagcccctaaaaggatgaaattggattcaagaggtggcgggtccggcggaggccctggcggcggggctgcggcagcagcagccgcattactgggaccggacccggcagcagcagcggcactccttcggccggatgcggcactactttcctcacttgtggccttcggtggtggtggcggggcaccttttccacaacccgctgctgctgctgcaccgttttgcttgccgttttgctttctgtccccaagtgcagcggctgcctatgtacagccatttcttgataagtcaggacttgagaagtatttgtatccggctgcggcggccgccccttttccgttactttatccgggcattccagctccagcagcagcggccgcagccgcggcggcagccgcggctgccgcagccgcctttccgtgtctgtcaagtgtcttgtccccgcctccagaaaaagcgggtgctgcggccgctactctcttgccgcacgaagtcgcgccgttaggagcccctcatcctcagcatccgcatggcagaacccaccttccgtttgctgggccgagagaaccgggcaaccccgaatctagcgcgcaagaagacccgagtcagccagggaaagaagcgccg

SEQ ID NO: 219955 - DNA, 1446 bp, Artificial Sequence
  derived and/or modified sequence
atggacgaagggatcccgcacctccaggagcgccaattgttggagcacagggactttatcggtctggactactcgtcactgtatatgtgtaaaccgaagcggagcatgaagcgggacgataccaaggatacctacaagctcccccacagactgatcgaaaagaaacgccgggacagaatcaacgaatgcattgctcaactgaaggaccttctgccggaacacctgaaactgaccactctcggccacctcgaaaaggccgtggtgcttgaactcaccctgaagcatctgaaagcactcaccgcgctgaccgagcagcagcatcagaaaatcatcgccctgcaaaatggagagagaagcctgaaaagcccaatccaaagcgatctggatgccttccatagcgggttccaaacctgcgcgaaggaagtgctccagtacctttcgcgcttcgaatcatggaccccgcgcgaaccacgctgcgtccagctcatcaaccacttgcacgcggtcgcgacgcaatttcttcccaccccgcaactcctgactcagcaggtgccgctgtcgaaagggacgggagccccctcggccgcgggctcggccgctgcgccttgcctggaacgggcgggacaaaaactcgagccgctggcgtattgcgtcccagtgatccagagaacccaaccgtcagcggaactggccgcagagaacgacactgacactgacagcggatacggcggagaagcggaagctcggccggatagagaaaagggaaagggagcaggagctagcagggtcaccattaagcaagagccgccaggcgaagattcacctgcccctaagcgcatgaagctggattcgcgcggaggagggtccggaggagggcctgggggaggagcagcagcagccgctgcagctctcctgggaccagacccggccgcagccgcagctctgctccgaccggacgccgccctcctgtccagcctggtcgctttcggagggggcggaggcgctccgttcccccagcctgctgctgctgcagctccgttctgcttgccattttgctttctcagcccgtcggccgccgccgcttacgttcaaccgttccttgataaatcggggctggagaagtacctctatccagcggcagcggctgcaccgttcccactcctgtaccctgggatcccggctccagccgcagcagctgccgccgcagcggctgccgctgcggcagctgcagcattcccttgtctgtcctcggtcctctccccgccgccggagaaggccggagccgcggcggccactctgctgccgcacgaagtcgccccattgggcgcaccgcatccgcagcaccctcatggacgcactcatctgccttttgccgggccgcgggagccgggcaacccggagagcagcgctcaggaagatccatctcagcctggaaaggaggcgcct

SEQ ID NO: 219956 - DNA, 1446 bp, Artificial Sequence
  derived and/or modified sequence
atggacgaggggatcccccatctccaggagagacagctgctcgagcaccgcgacttcatcgggctggactactccagtctttatatgtgtaagcccaaaaggtccatgaagagagatgataccaaggatacttataaactgccccatcggctgattgaaaagaagaggcgggatagaattaatgaatgcatcgctcagctgaaggacctacttccagagcacctgaaacttacgaccctgggtcatctcgaaaaagccgtggtacttgagctgacactgaagcacctcaaagccctgactgcactcactgagcagcagcatcagaaaatcatcgcactccagaacggcgagaggtcactcaagtcccccatccagagtgacctggatgcgtttcactccggattccagacgtgtgctaaagaagtcctacagtatttgtcacgattcgaatcctggaccccccgagagcctcggtgcgtacaactcattaaccacctgcatgcagtggcaacccagtttctgcccactcctcaactgctgacacagcaagtgccactgtccaagggcaccggtgcaccctcggccgctggcagcgccgcagcgccttgtcttgagagggccggacagaaactcgaacctctcgcttattgcgtccctgtgatccagcggacccaacccagcgccgaattagctgcagaaaacgatacagacacagactcagggtatggcggtgaggctgaagctaggccggatagggagaagggaaaaggcgctggggcttcacgggtcactatcaagcaggaaccacctggagaggacagtcccgctcctaaacgcatgaagttagattctcgggggggcggctcggggggagggcctgggggcggggccgcggcggccgccgcagccctgctcggacctgatccggctgccgcggctgccctgcttagacctgatgcagcgctgctgtcttcactcgtcgcattcggaggcggcggcggtgccccctttccacagccagcagccgctgctgcaccattctgcctgcctttttgttttctgtcacccagcgctgccgccgcctatgtgcagccttttctggataagtccgggctggagaagtatttgtacccggctgccgcagctgcaccattcccactcctctatcctgggatacctgcgcctgccgccgccgccgcagcagccgccgcagccgccgctgctgccgccgctttcccctgcctttctagtgtgctgtccccacctccagagaaggccggcgccgcagcagccacattgctgcctcatgaagtggcgcccctgggcgcaccccatccacagcatccacacgggcgaacccacttgccctttgcggggcctagagagccagggaatccagagagctccgcccaggaggatcccagccagcccggaaaggaagcaccc

SEQ ID NO: 219957 - DNA, 1446 bp, Artificial Sequence
  derived and/or modified sequence
atggatgaaggtattccgcaccttcaggaaagacagttgctcgagcatcgggactttatcggccttgattattcctcactgtacatgtgtaagccaaagaggagcatgaaaagagatgacaccaaggacacctacaagctccctcatcgactgatcgaaaagaagcgtagagatcgcatcaacgagtgtattgcacagcttaaagatctcctgcccgagcaccttaaactcaccacgcttggacatcttgaaaaggcagtggtgttggagctgactcttaagcatctgaaggcacttaccgcccttactgaacaacagcaccagaaaatcatagccctccaaaacggagaaagaagcctgaaatcccccatacagtctgacctggacgcattccattccgggtttcaaacctgcgcgaaggaagtcctgcagtacctgtcgagattcgaatcgtggactcctcgcgaaccgagatgtgtgcagcttatcaatcatctgcacgcagttgcaacccagtttctccctactccacagctgcttacccagcaagtgcccctttcgaagggcaccggggccccttccgcggctggatcggccgcagccccttgtcttgagagagcgggacaaaaactggaacctctcgcctactgtgtgcccgtcattcagcgcacgcagcccagtgccgaactcgcagcagaaaacgacaccgatactgactcgggctacggaggagaagcagaggcccggcctgatagggaaaaaggaaagggagctggagcaagcagggtcactattaagcaagaaccccctggcgaggattccccagcaccaaaaagaatgaaactggactcacgtggagggggttccggaggtggacccggaggcggagcagctgccgcagcggcagccctcctcgggccagaccctgccgccgccgccgctctgcttcgcccagatgccgctcttttgtcctcgttggtggcgttcggtggaggaggtggcgctccttttccacaacccgccgcggccgcagcgccattctgtttgccgttctgttttctgtccccttccgctgcagcagcctacgtccaaccattcctggacaaatccggtcttgagaaatacctttaccctgcggcagcggccgctccattcccactcttgtaccctggcattccagctccggcagccgctgccgccgcagcggcggctgcagcggccgcggctgccgcatttccatgtctgagctctgtcctgtcgcctcctcctgaaaaagcaggagcagccgcagcgaccctgcttcctcatgaagttgcaccactgggcgccccacacccccaacatccgcatggtcgaacccaccttccatttgccggaccacgcgaacctggcaatcctgaatcctccgcacaagaagatcctagccaaccagggaaggaagccccc

SEQ ID NO: 219958 - DNA, 1446 bp, Artificial Sequence
  derived and/or modified sequence
atggatgaggggatccctcatctgcaggagcggcagttgctggagcatagagacttcataggcctggattacagcagtctgtacatgtgtaagccaaagagatcaatgaagagagacgacaccaaagatacttacaagctgcctcacaggctaattgagaagaagcgccgtgatagaattaatgagtgcatcgctcagctaaaagatttgctccccgaacacctcaagctcacaaccctggggcatttagaaaaagcggtggtccttgagctcacactgaagcatcttaaggctctgaccgccttgactgaacagcagcaccagaagattatcgctttgcagaacggagagcgttccctgaagtctcctatacaaagtgacctggatgcattccacagcgggtttcagacttgtgctaaggaggtgttgcagtacttgagccgcttcgagtcttggacccctcgcgagcctcgatgcgtgcagctaatcaaccacctacatgccgtggctacacagttcctaccaactccccaacttctcacccagcaggtacctctcagcaaagggactggcgccccctcagctgccggctccgccgctgccccctgcctggagcgggcaggacagaaactggagccactggcttactgtgtgcccgtaatccagcgaacacagccctccgcggaactcgcagctgaaaatgacacagataccgactctggatacgggggcgaagctgaggcacgtcccgacagggaaaaaggcaagggggcaggagcctcccgggttactattaaacaagagccacctggagaggattcgcctgcgcccaagcgaatgaagctagattcccgtggtggcggcagcgggggcggacccggcgggggagccgccgccgctgccgccgctttgctggggccggatccagcagcggcagccgcactgcttcgcccagacgctgctcttctgagcagtctcgtggcctttgggggcggcggcggcgccccatttcctcagcctgctgccgctgctgcgccattttgcctgccattctgctttctcagtcccagcgcagctgctgcctatgtccagccgtttctcgacaagtccggattagagaagtacctttaccctgctgcagcggctgctcctttcccactgctatacccgggcatcccagcgccggccgccgccgccgccgcggctgctgcggctgcagcagctgctgctgccttcccatgcctctccagcgtcctgagtcctcccccagagaaggccggagctgcagccgcaacgctgttaccgcacgaagtagcaccccttggcgcgccccatccacagcacccgcacggccggacccaccttcccttcgctggtccccgagagccgggaaacccggaaagtagtgcacaagaagatccatcacagccgggcaaagaggcgcca

SEQ ID NO: 219959 - DNA, 1635 bp, Artificial Sequence
  derived and/or modified sequence
taatacgactcactatagggaaataagagagaaaagaagagtaagaagaaatataagagccaccatggacgaaggaattcctcatttgcaagagagacagttactggaacatagagattttataggactggactattcctctttgtatatgtgtaaacccaaaaggagcatgaaacgagacgacaccaaggatacctacaaattaccgcacagattaatagaaaagaaaagaagagaccgaattaatgaatgcattgctcagctgaaagatttactgcctgaacatctgaaattgacaactctgggacatctggagaaagctgtagtcttggaattaactttgaaacacttaaaagctttaaccgccttaaccgagcaacagcatcagaagataattgctttacagaatggggagcgatctctgaaatcgcccattcagtccgacttggatgcgttccactcgggatttcaaacatgcgccaaagaagtcttgcaatacctctcccggtttgagagctggacacccagggagccgcggtgtgtccagctgatcaaccacttgcacgccgtggccacccagttcttgcccaccccgcagctgttgactcaacaggtccctctgagcaaaggcaccggcgctccctcggccgccgggtccgcggccgccccctgcctggagcgcgcggggcagaagctggagcccctcgcctactgcgtgcccgtcatccagcggactcagcccagcgccgagctcgccgccgagaacgacacggacaccgacagcggctacggcggcgaagccgaggcccggccggaccgcgagaaaggcaaaggcgcgggggcgagccgcgtcaccatcaagcaggagcctcccggggaggactcgccggcgcccaagaggatgaagctggattcccgcggcggcggcagcggcggcggcccggggggcggcgcggcggcggcggcagccgcgcttctggggcccgaccctgccgccgcggccgcgctgctgagacccgacgccgccctgctcagctcgctggtggcgttcggcggaggcggaggcgcgcccttcccgcagcccgcggccgccgcggcccccttctgcctgcccttctgcttcctctcgccttctgcagctgccgcctacgtgcagcccttcctggacaagagcggcctggagaagtatctgtacccggcggcggctgccgccccgttcccgctgctataccccggcatccccgccccggcggcagccgcggcagccgccgccgccgctgccgccgccgccgccgcgttcccctgcctgtcctcggtgttgtcgccccctcccgagaaggcgggcgccgccgccgcgaccctcctgccgcacgaggtggcgccccttggggcgccgcacccccagcacccgcacggccgcacccacctgcccttcgccgggccccgcgagccggggaacccggagagctctgctcaggaagatccctcgcagccaggaaaggaagctccctgataataggctggagcctcggtggccatgcttcttgccccttgggcctccccccagcccctcctccccttcctgcacccgtacccccgtggtctttgaataaagtctgagtgggcggctctaga

SEQ ID NO: 219960 - protein, 66 aa, Artificial Sequence
  derived and/or modified sequence
PKRKSATKGDEPARRSARLSARPVPKPAAKPKKAAAPKKAVKGKKAAENGDAKAEAKVQAAGDGAG

SEQ ID NO: 219961 - protein, 282 aa, Artificial Sequence
  derived and/or modified sequence
MPKRKAAGQGDMRQEPKRRSARLSAMLVPVTPEVKPKRTSSSRKMKTKSDMMEENIDTSAQAVAETKQEAVVEEDYNENAKNGEAKITEAPASEKEIVEVKEENIEDATEKGGEKKEAVAAEVKNEEEDQKEDEEDQNEEKGEAGKEDKDEKGEEDGKEDKNGNEKGEDAKEKEDGKKGEDGKGNGEDGKEKGEDEKEEEDRKETGDGKENEDGKEKGDKKEGKDVKVKEDEKEREDGKEDEGGNEEEAGKEKEDLKEEEEGKEEDEIKEDDGKKEEPQSIV

SEQ ID NO: 219962 - protein, 148 aa, Artificial Sequence
  derived and/or modified sequence
MPKRKAAGQGDMRQEPKRRSARLSAMLVPVTPEVKPKRTSSSRKMKTKSDMMEENIDTSAQAVAETKQEAVVEEDYNENAKNGEAKITEAPASEKEIVEVKEENIEDATEKGGEKKEAVAAEVKNEEEDQKEDEEDQNEEKGEAGKED

SEQ ID NO: 219963 - protein, 102 aa, Artificial Sequence
  derived and/or modified sequence
MPKRKAAGQGDMRQEPKRRSARLSAMLVPVTPEVKPKRTSSSRKMKTKSDMMEENIDTSAQAVAETKQEAVVEEDYNENAKNGEAKITEAPASEKEIVEVKE

SEQ ID NO: 219964 - protein, 89 aa, Artificial Sequence
  derived and/or modified sequence
MPKRKAAGQGDMRQEPKRRSARLSAMLVPVTPEVKPKRTSSSRKMKTKSDMMEENIDTSAQAVAETKQEAVVEEDYNENAKNGEAKITE

SEQ ID NO: 219965 - DNA, 849 bp, Artificial Sequence
  derived and/or modified sequence
atgcccaagcgcaaggcggctggccagggagacatgaggcaggagccaaaacggagatccgctcggctaagtgctatgctcgtgcctgttacacccgaggtgaagcccaaaagaactagctcttcccgaaaaatgaagacgaaaagcgatatgatggaggagaatatcgacactagcgcccaggcagtagctgaaactaaacaggaggctgtagtggaagaagactataacgaaaacgccaaaaacggagaagctaaaattactgaggcaccagcttcagagaaggaaatcgtggaagtgaaggaagagaacatagaggacgcaacagaaaaaggtggagagaagaaagaggcggtcgcagccgaagttaagaacgaagaggaagaccagaaggaggacgaagaggatcagaacgaagaaaagggggaggccggcaaagaggataaggacgaaaagggagaggaagacggcaaggaagacaaaaatgggaatgagaaaggggaggacgccaaagagaaagaagacgggaaaaagggggaggacgggaaggggaatggtgaagacggtaaggaaaagggcgaagacgagaaggaggaggaggaccggaaggaaacaggcgacggcaaggagaacgaggacggaaaagagaaaggggataagaaggagggtaaagacgtaaaggtgaaagaagatgagaaggagagagaagacggaaaagaagatgaggggggcaatgaagaggaggccggcaaggagaaggaggacctgaaagaggaggaggagggaaaggaagaggacgagatcaaagaggacgacggaaagaaggaagagcctcaatctatagtgtag

SEQ ID NO: 219966 - DNA, 447 bp, Artificial Sequence
  derived and/or modified sequence
atgcctaagaggaaggctgctgggcagggagacatgcggcaggaacctaagcgtcgctcagctcggctgagtgcaatgctggtgccagtaactcccgaggtcaagcctaagcggacctccagctcgagaaaaatgaaaactaaaagcgatatgatggaagaaaacatcgacacgagtgcccaggccgtcgccgaaactaagcaagaggctgtggtggaggaggattataatgaaaatgctaagaacggggaggctaaaatcaccgaggcacccgcaagcgaaaaagagatcgtggaagtgaaggaagagaacattgaggatgccacggagaagggaggtgaaaaaaaagaagccgtcgccgcggaagtgaaaaatgaagaggaagaccagaaagaggatgaagaagaccaaaacgaagagaaaggagaagcggggaaggaagattag

SEQ ID NO: 219967 - DNA, 309 bp, Artificial Sequence
  derived and/or modified sequence
atgccaaagagaaaagcagctggccagggtgacatgagacaagaaccgaaacgcaggagcgccagattaagcgccatgctggtgccggtcacccctgaagttaagccgaagaggacctcaagttctaggaaaatgaagaccaaaagtgacatgatggaagaaaatatcgacacatccgcacaggccgttgccgaaacaaaacaggaagccgtggtggaagaggattataacgaaaatgcaaaaaatggtgaggccaaaattacggaagcaccagcctctgagaaagagatcgtggaggtcaaagaatag

SEQ ID NO: 219968 - DNA, 270 bp, Artificial Sequence
  derived and/or modified sequence
atgccaaagcgaaaggctgccggacagggagatatgagacaggagccgaagagaaggtccgcccgactgtctgccatgttagtgcctgtaacacccgaggtcaaacctaagcgaactagcagcagcagaaagatgaaaacgaaaagtgacatgatggaagagaatatcgacactagcgcccaggccgttgcagaaacaaagcaggaggccgtggtggaagaggactacaatgagaacgccaaaaacggggaggccaaaatcactgagtag

SEQ ID NO: 219969 - DNA, 849 bp, Artificial Sequence
  derived and/or modified sequence
atgcccaagaggaaggctgctggccagggcgacatgaggcaggagcccaagagaagaagtgcccggctgagcgccatgctggtgcctgtgaccccagaggtgaagcccaagaggaccagcagcagcaggaagatgaagaccaagagtgacatgatggaggagaacatcgacaccagcgcccaggccgtggccgagaccaagcaggaggccgtggtggaggaggactacaatgaaaatgccaagaatggagaggccaagatcacagaggccccagccagcgagaaggagatcgtggaggtgaaggaggagaacattgaagatgccacagagaagggcggggagaagaaggaggccgtggccgctgaggtgaagaatgaggaggaggaccagaaggaggatgaggaggaccagaatgaggagaagggggaggccggcaaggaggacaaggatgagaagggggaggaggatggcaaggaggacaagaatggaaatgagaagggggaggatgccaaggagaaggaggatggcaagaagggggaggatggaaaaggaaatggagaagatggcaaggagaagggggaggatgagaaggaggaggaggacaggaaggagactggagatggcaaggaaaatgaagatggcaaggagaagggggacaagaaggagggcaaggatgtgaaggtgaaggaggatgagaaggagcgggaggatggcaaggaggatgaaggaggaaatgaggaggaggccggcaaggagaaggaggacctgaaggaggaggaggagggcaaggaggaggatgagatcaaggaggatgatggcaagaaggaggagccccagagcatcgtgtag

SEQ ID NO: 219970 - DNA, 447 bp, Artificial Sequence
  derived and/or modified sequence
atgcccaagaggaaggctgctggccagggcgacatgaggcaggagcccaagagaagaagtgcccggctgagcgccatgctggtgcctgtgaccccagaggtgaagcccaagaggaccagcagcagcaggaagatgaagaccaagagtgacatgatggaggagaacatcgacaccagcgcccaggccgtggccgagaccaagcaggaggccgtggtggaggaggactacaatgaaaatgccaagaatggagaggccaagatcacagaggccccagccagcgagaaggagatcgtggaggtgaaggaggagaacattgaagatgccacagagaagggcggggagaagaaggaggccgtggccgctgaggtgaagaatgaggaggaggaccagaaggaggatgaggaggaccagaatgaggagaagggggaggccggcaaggaggactag

SEQ ID NO: 219971 - DNA, 309 bp, Artificial Sequence
  derived and/or modified sequence
atgcccaagaggaaggctgctggccagggcgacatgaggcaggagcccaagagaagaagtgcccggctgagcgccatgctggtgcctgtgaccccagaggtgaagcccaagaggaccagcagcagcaggaagatgaagaccaagagtgacatgatggaggagaacatcgacaccagcgcccaggccgtggccgagaccaagcaggaggccgtggtggaggaggactacaatgaaaatgccaagaatggagaggccaagatcacagaggccccagccagcgagaaggagatcgtggaggtgaaggagtag

SEQ ID NO: 219972 - DNA, 270 bp, Artificial Sequence
  derived and/or modified sequence
atgcccaagaggaaggctgctggccagggcgacatgaggcaggagcccaagagaagaagtgcccggctgagcgccatgctggtgcctgtgaccccagaggtgaagcccaagaggaccagcagcagcaggaagatgaagaccaagagtgacatgatggaggagaacatcgacaccagcgcccaggccgtggccgagaccaagcaggaggccgtggtggaggaggactacaatgaaaatgccaagaatggagaggccaagatcacagaatag

SEQ ID NO: 219973 - DNA, 849 bp, Artificial Sequence
  derived and/or modified sequence
atgcccaagcggaaggccgccggccagggcgacatgcggcaggagcctaaaaggcgttccgcgagactctcagctatgctcgtccccgttactcccgaggtcaagcccaaacgtacttcttctagtagaaagatgaagaccaagagtgacatgatggaagaaaatattgatacgtcagcccaagctgtcgccgagacgaagcaggaggcggtggttgaagaggactataacgaaaacgctaagaatggtgaggccaaaattacagaggcacccgcctcagaaaaggaaatagtggaggtgaaagaggaaaacattgaagatgccacagagaagggaggagaaaagaaagaagcagtggcagccgaggtcaaaaacgaggaggaggatcagaaagaggacgaagaggatcagaacgaggagaaaggcgaagccggcaaggaagataaagatgagaaaggcgaagaagatggcaaggaggataaaaacgggaatgagaagggagaagacgcgaaggaaaaagaagacgggaagaagggtgaagacggcaagggcaatggggaagacggcaaagagaagggtgaggacgaaaaggaggaggaagatcggaaggagacaggagatgggaaggagaacgaagacggaaaggagaaaggcgataaaaaggaggggaaggacgtaaaggtcaaggaggacgaaaaagagagagaggatgggaaggaggatgaggggggcaatgaggaagaagcaggaaaggagaaagaggatctcaaagaagaagaggaaggaaaggaggaggatgagattaaagaggacgacgggaaaaaagaagaaccacagtcaattgtctag

SEQ ID NO: 219974 - DNA, 447 bp, Artificial Sequence
  derived and/or modified sequence
atgcccaagcggaaggccgccggccagggcgacatgcggcaggagcctaaacgaagaagtgcccgcctgagcgctatgctggtgccggtgacccccgaggtcaagccaaaacgaacctccagctctcggaaaatgaagacaaagtccgatatgatggaagaaaacatcgacacaagcgcccaggcggtggctgagacaaagcaggaggccgtagtcgaggaggactacaacgaaaatgcgaagaatggagaggcgaaaattacagaggccccagccagtgaaaaggaaattgtggaggttaaggaagagaacattgaagatgccacagaaaaaggcggcgagaaaaaagaagctgtggcagcagaggtaaagaatgaagaagaagatcagaaggaagatgaagaagaccagaatgaggagaaaggagaggcagggaaggaggactag

SEQ ID NO: 219975 - DNA, 309 bp, Artificial Sequence
  derived and/or modified sequence
atgcccaagcggaaggccgccggccagggcgacatgcggcaggagcctaaacgacgaagcgctcggctaagtgcaatgttggtccctgtgactccagaagtcaagcctaagcggacatcatctagccgtaagatgaaaacaaaaagtgatatgatggaggagaacatcgacactagcgcacaggctgtcgccgagaccaagcaggaggccgtggtggaggaagactataatgaaaacgctaagaatggagaggcaaaaatcacagaggccccagccagcgaaaaggagatagtggaggttaaagaatag

SEQ ID NO: 219976 - DNA, 270 bp, Artificial Sequence
  derived and/or modified sequence
atgcccaagcggaaggccgccggccagggcgacatgcggcaggagcccaaacggcgatcagcgcgcctgtccgcaatgttggtcccggtgactcccgaggtgaagccaaaacgcacttcgtcctcacggaagatgaagacgaagagtgacatgatggaggagaacattgacactagtgctcaggccgtggctgaaactaagcaggaggctgtagtagaggaggattacaacgagaatgccaagaatggggaagccaagatcacggaatag

SEQ ID NO: 219977 - DNA, 849 bp, Artificial Sequence
  derived and/or modified sequence
atgcccaaaaggaaagctgctggccagggggacatgaggcaggaacccaaaaggagatcagccagactgtcggctatgttggttccagtgacccccgaggtgaagcctaagcgcaccagcagctcccgcaaaatgaagaccaaatccgacatgatggaggaaaatatcgacacgtcggcacaagccgtcgctgaaacaaaacaggaggctgtggtagaagaggactacaacgaaaatgctaaaaacggcgaagctaagattacggaggcacccgcatcagagaaggagatcgtcgaggtcaaagaggaaaacatcgaagatgctacagagaagggaggcgaaaagaaggaggccgtggcggctgaggtcaagaatgaagaagaagaccagaaggaggatgaagaggatcagaacgaggaaaagggcgaagctgggaaggaagataaagatgagaaaggggaggaggacggcaaggaggataaaaatggtaacgagaaaggagaggacgccaaagagaaagaagatggaaaaaagggtgaggatggtaaaggcaatggagaggacggaaaggagaaaggggaagatgaaaaggaagaagaagacagaaaggaaactggggacggcaaggagaatgaggacggaaaagagaaaggtgacaagaaagagggcaaagacgtcaaggttaaagaagacgaaaaggaacgcgaagacggcaaggaggatgaagggggaaatgaggaggaggcagggaaggagaaagaagatctgaaggaggaggaggagggcaaagaggaggatgaaatcaaggaagacgacggcaaaaaggaagagcctcagtccattgtgtag

SEQ ID NO: 219978 - DNA, 447 bp, Artificial Sequence
  derived and/or modified sequence
atgccaaagcgtaaggccgctggccagggtgacatgaggcaggagccaaaaaggcggtccgccagactctctgctatgctcgtgcccgttacccctgaggtcaaaccaaagaggactagttccagcagaaagatgaagaccaaatctgacatgatggaagagaatatcgatacgagcgcccaagccgtggccgagaccaagcaagaagccgtggtcgaagaggactataacgagaatgccaagaacggcgaagccaagataactgaggcacctgcatctgagaaggagattgtagaagtgaaagaggagaatattgaggacgcaaccgagaagggcggtgaaaaaaaagaggccgtcgctgctgaggtgaaaaacgaggaagaagaccagaaggaggacgaagaagatcaaaacgaagaaaaaggcgaagcgggaaaagaggactag

SEQ ID NO: 219979 - DNA, 309 bp, Artificial Sequence
  derived and/or modified sequence
atgcctaagcgtaaggccgcaggtcagggagacatgcgccaggagccgaagcgcagatcagcccgtctgagcgccatgctggtgcccgtgaccccagaagtaaaacccaaacgcacaagctcctcccgcaagatgaagactaagtccgacatgatggaagaaaatatagatacctccgcccaagccgtagcagaaacaaagcaggaggcggtagtggaagaggactataatgagaacgcgaagaatggggaagctaagattaccgaagccccagcaagcgaaaaggaaattgtggaagtgaaggaatag

SEQ ID NO: 219980 - DNA, 270 bp, Artificial Sequence
  derived and/or modified sequence
atgccaaagaggaaggcagcaggacagggcgacatgcggcaggagccaaagcggcgaagcgcgagactgtcagccatgctggtgcctgttacacctgaagtgaagccaaagcgtacatcctcctctcgcaagatgaagacaaagagcgacatgatggaggagaacatcgatacctctgcccaagcagtcgctgagaccaagcaagaggctgtagtggaggaagattacaacgagaacgctaaaaatggtgaggctaagatcacagagtag

SEQ ID NO: 219981 - DNA, 849 bp, Artificial Sequence
  derived and/or modified sequence
atgcccaagagaaaggccgccggccagggcgacatgagacaggagcccaagagaagaagcgccagactgagcgccatgctggtgcccgtgacccccgaggtgaagcccaagagaaccagcagcagcagaaagatgaagaccaagagcgacatgatggaggagaacatcgacaccagcgcccaggccgtggccgagaccaagcaggaggccgtggtggaggaggactacaacgagaacgccaagaacggcgaggccaagatcaccgaggcccccgccagcgagaaggagatcgtggaggtgaaggaggagaacatcgaggacgccaccgagaagggcggcgagaagaaggaggccgtggccgccgaggtgaagaacgaggaggaggaccagaaggaggacgaggaggaccagaacgaggagaagggcgaggccggcaaggaggacaaggacgagaagggcgaggaggacggcaaggaggacaagaacggcaacgagaagggcgaggacgccaaggagaaggaggacggcaagaagggcgaggacggcaagggcaacggcgaggacggcaaggagaagggcgaggacgagaaggaggaggaggacagaaaggagaccggcgacggcaaggagaacgaggacggcaaggagaagggcgacaagaaggagggcaaggacgtgaaggtgaaggaggacgagaaggagagagaggacggcaaggaggacgagggcggcaacgaggaggaggccggcaaggagaaggaggacctgaaggaggaggaggagggcaaggaggaggacgagatcaaggaggacgacggcaagaaggaggagccccagagcatcgtgtag

SEQ ID NO: 219982 - DNA, 447 bp, Artificial Sequence
  derived and/or modified sequence
atgcccaagagaaaggccgccggccagggcgacatgagacaggagcccaagagaagaagcgccagactgagcgccatgctggtgcccgtgacccccgaggtgaagcccaagagaaccagcagcagcagaaagatgaagaccaagagcgacatgatggaggagaacatcgacaccagcgcccaggccgtggccgagaccaagcaggaggccgtggtggaggaggactacaacgagaacgccaagaacggcgaggccaagatcaccgaggcccccgccagcgagaaggagatcgtggaggtgaaggaggagaacatcgaggacgccaccgagaagggcggcgagaagaaggaggccgtggccgccgaggtgaagaacgaggaggaggaccagaaggaggacgaggaggaccagaacgaggagaagggcgaggccggcaaggaggactag

SEQ ID NO: 219983 - DNA, 309 bp, Artificial Sequence
  derived and/or modified sequence
atgcccaagagaaaggccgccggccagggcgacatgagacaggagcccaagagaagaagcgccagactgagcgccatgctggtgcccgtgacccccgaggtgaagcccaagagaaccagcagcagcagaaagatgaagaccaagagcgacatgatggaggagaacatcgacaccagcgcccaggccgtggccgagaccaagcaggaggccgtggtggaggaggactacaacgagaacgccaagaacggcgaggccaagatcaccgaggcccccgccagcgagaaggagatcgtggaggtgaaggagtag

SEQ ID NO: 219984 - DNA, 270 bp, Artificial Sequence
  derived and/or modified sequence
atgcccaagagaaaggccgccggccagggcgacatgagacaggagcccaagagaagaagcgccagactgagcgccatgctggtgcccgtgacccccgaggtgaagcccaagagaaccagcagcagcagaaagatgaagaccaagagcgacatgatggaggagaacatcgacaccagcgcccaggccgtggccgagaccaagcaggaggccgtggtggaggaggactacaacgagaacgccaagaacggcgaggccaagatcaccgagtag

SEQ ID NO: 219985 - DNA, 2126 bp, Artificial Sequence
  derived and/or modified sequence
aatagcaccgcgagatctgttgaaacattgatttttgacgattccttccctgagaagagggcgaggagaagaagaaagaaaaaggagaactgaattgaattagattagcatgaaggaccttttcacgcggagactaaaagtactgcgcataacttcctgctcagaaatatatgcaaataagaagacagatcctgaaagagcaagctaggagagtacaggtcgtgctgcagttagttcattgaaaactcatttgctcttggagcagtcaggcagtgactgccttcggctttttttctgctgactaagatctcctatagagagctacaacaatgcccaaaagaaaggctgcaggtcaaggtgatatgaggcaggagccaaagagaagatctgccaggttgtctgctatgcttgtgccagttacaccagaggtgaagcctaaaagaacatcaagttcaaggaaaatgaagacaaaaagtgatatgatggaagaaaacatagatacaagtgcccaagcagttgctgaaaccaagcaagaagcagttgttgaagaagactacaatgaaaatgctaaaaatggagaagccaaaattacagaggcaccagcttctgaaaaagaaattgtggaagtaaaagaagaaaatattgaagatgccacagaaaagggaggagaaaagaaagaagcagtggcagcagaagtaaaaaatgaagaagaagatcagaaagaagatgaagaagatcaaaacgaagagaaaggggaagctggaaaagaagacaaagatgaaaaaggggaagaagatggaaaagaggataaaaatggaaatgagaaaggagaagatgcaaaagagaaagaagatggaaaaaaaggtgaagacggaaaaggaaatggagaagatggaaaagagaaaggagaagatgaaaaagaggaagaagacagaaaagaaacaggagatggaaaagagaatgaagatggaaaagagaagggagataaaaaagaggggaaagatgtaaaagtcaaagaagatgaaaaagagagagaagatggaaaagaagatgaaggtggaaatgaggaagaagctggaaaagagaaagaagatttaaaagaagaggaagaaggaaaagaggaagatgagatcaaagaagatgatggaaaaaaagaggagccacagagtattgtttaaaactgccctatgtagtttcataatttggtaacatgtaccttcatgttgtaaagttaatagagataaatatttttatcaaaaattttataaacacagcctttctttagcattgatttaatttcagaacatcttcatattgattattagccataaagtttctaacatgaaacatttatctataaattttgtgattatagtagtggaatacatagaaaaaaatatgctttcaactttgtgagtgaatttcgtgttgtgtaagttatatgtcaaatctttgaattttaattttactcttttatacatgtgataatttcataaagtgagggatcccaaaaaaagagtttcatccaacattcttgttctgcaggttgcttttataaagaaggtgaactattttcatgtaatgttaagagttaaacttatctttcccaaatataactttattattagcttgggaaaaatgaaattgtattcccatttttaaaataaatacaaatgtttatttcagaagggcagttttgattatatgtgaatacacaaattttactggatttatcttaataaaaagactctgacgatgattgtgttttgttatatcttcaaaaatatagctagtgaaatattgtgcttaatttttttctattgtgttattcatgaaaatatttaatattcactgacataaaattaatataaagtaaaattcaccattttaattataataaaaataaagtatataattcaatggttgtcagtatattcacaatgttgtgtccactgtttaattccagagaatttttatcacccaaataagaaacaaagcaccaattagcagtctcttcccattttcgcccaacttatcccccacctccatcccttggcaaccactaatctgccttctatctctatggatttgcctattctgaacatttattataaatggaatcacat

SEQ ID NO: 219986 - DNA, 578 bp, Artificial Sequence
  derived and/or modified sequence
tttttttccagaggagagtacaggtcgtgctgcagttagttcattgaaaactcatttgctcttggagcagtcaggcagtgactgccttcggctttttttctgctgactaagatctcctatagagagctacaacaatgcccaaaagaaaggctgcaggtcaaggtgatatgaggcaggagccaaagagaagatctgccaggttgtctgctatgcttgtgccagttacaccagaggtgaagcctaaaagaacatcaagttcaaggaaaatgaagacaaaaagtgatatgatggaagaaaacatagatacaagtgcccaagcagttgctgaaaccaagcaagaagcagttgttgaagaagactacaatgaaaatgctaaaaatggagaagccaaaattacagaggcaccagcttctgaaaaagaaattgtggaagtaaaagaagaaaatattgaagatgccacagaaaagggaggagaaaagaaagaagcagtggcagcagaagtaaaaaatgaagaagaagatcagaaagaagatgaagaagatcaaaacgaagagaaaggggaagctggaaaagaagac

SEQ ID NO: 219987 - DNA, 859 bp, Artificial Sequence
  derived and/or modified sequence
gatttttgacgattccttccctgagaagagggcgaggagaagaagaaagaaaaaggagaactgaattgaattagattagcatgaaggaccttttcacgcggagactaaaagtactgcgcataacttcctgctcagaaatatatgcaaataagaagacagatcctgaaagagcaagcttatgacatccctttcccttctcaagtggacactgctatgctctcacccctcactcagaactaagagtctccagatgcttcctgcccttgaacattggaatacaagttcttcagctttgggactcttggaccttcgaccacagactgaaggctgcactgtcggcttccctatttttgaggttttggaacttggactggctttcttgctcctcagcttgcagacagcctaatgtgggacttcatcttgtgatcgtaggagagtacaggtcgtgctgcagttagttcattgaaaactcatttgctcttggagcagtcaggcagtgactgccttcggctttttttctgctgactaagatctcctatagagagctacaacaatgcccaaaagaaaggctgcaggtcaaggtgatatgaggcaggagccaaagagaagatctgccaggttgtctgctatgcttgtgccagttacaccagaggtgaagcctaaaagaacatcaagttcaaggaaaatgaagacaaaaagtgatatgatggaagaaaacatagatacaagtgcccaagcagttgctgaaaccaagcaagaagcagttgttgaagaagactacaatgaaaatgctaaaaatggagaagccaaaattacagaggcaccagcttctgaaaaagaaattgtggaagtaaaagaa

SEQ ID NO: 219988 - DNA, 720 bp, Artificial Sequence
  derived and/or modified sequence
gagggcgaggagaagaagaaagaaaaaggagaactgaattgaattagattagcatgaaggaccttttcacgcggagactaaaagtactgcgcataacttcctgctcagaaatatatgcaaataagaagacagatcctgaaagagcaagctatgcttcctgcccttgaacattggaatacaagttcttcagctttgggactcttggaccttcgaccacagactgaaggctgcactgtcggcttccctatttttgaggttttggaacttggactggctttcttgctcctcagcttgcagacagcctaatgtgggacttcatcttgtgatcgtaggagagtacaggtcgtgctgcagttagttcattgaaaactcatttgctcttggagcagtcaggcagtgactgccttcggctttttttctgctgactaagatctcctatagagagctacaacaatgcccaaaagaaaggctgcaggtcaaggtgatatgaggcaggagccaaagagaagatctgccaggttgtctgctatgcttgtgccagttacaccagaggtgaagcctaaaagaacatcaagttcaaggaaaatgaagacaaaaagtgatatgatggaagaaaacatagatacaagtgcccaagcagttgctgaaaccaagcaagaagcagttgttgaagaagactacaatgaaaatgctaaaaatggagaagccaaaattacagag

SEQ ID NO: 219989 - protein, 508 aa, Artificial Sequence
  derived and/or modified sequence
MLLWSLLVIFDAVTEQADSLTLVAPSSVFEGDSIVLKCQGEQNWKIQKMAYHKDNKELSVFKKFSDFLIQSAVLSDSGNYFCSTKGQLFLWDKTSNIVKIKVQELFQRPVLTASSFQPIEGGPVSLKCETRLSPQRLDVQLQFCFFRENQVLGSGWSSSPELQISAVWSEDTGSYWCKAETVTHRIRKQSLQSQIHVQRIPISNVSLEIRAPGGQVTEGQKLILLCSVAGGTGNVTFSWYREATGTSMGKKTQRSLSAELEIPAVKESDAGKYYCRADNGHVPIQSKVVNIPVRIPVSRPVLTLRSPGAQAAVGDLLELHCEALRGSPPILYQFYHEDVTLGNSSAPSGGGASFNLSLTAEHSGNYSCEANNGLGAQCSEAVPVSISGPDGYRRDLMTAGVLWGLFGVLGFTGVALLLYALFHKISGESSATNEPRGASRPNPQEFTYSSPTPDMEELQPVYVNVGSVDVDVVYSQVWSMQQPESSANIRTLLENKDSQVIYSSVKKS

SEQ ID NO: 219990 - DNA, 1527 bp, Artificial Sequence
  derived and/or modified sequence
atgctgctgtggagcctgctggtgatcttcgacgccgtgaccgagcaggccgacagcctgaccctggtggcccccagcagcgtgttcgagggcgacagcatcgtgctgaagtgccagggcgagcagaactggaagatccagaagatggcctaccacaaggacaacaaggagctgagcgtgttcaagaagttcagcgacttcctgatccagagcgccgtgctgagcgacagcggcaactacttctgcagcaccaagggccagctgttcctgtgggacaagaccagcaacatcgtgaagatcaaggtgcaggagctgttccagagacccgtgctgaccgccagcagcttccagcccatcgagggcggccccgtgagcctgaagtgcgagaccagactgagcccccagagactggacgtgcagctgcagttctgcttcttcagagagaaccaggtgctgggcagcggctggagcagcagccccgagctgcagatcagcgccgtgtggagcgaggacaccggcagctactggtgcaaggccgagaccgtgacccacagaatcagaaagcagagcctgcagagccagatccacgtgcagagaatccccatcagcaacgtgagcctggagatcagagcccccggcggccaggtgaccgagggccagaagctgatcctgctgtgcagcgtggccggcggcaccggcaacgtgaccttcagctggtacagagaggccaccggcaccagcatgggcaagaagacccagagaagcctgagcgccgagctggagatccccgccgtgaaggagagcgacgccggcaagtactactgcagagccgacaacggccacgtgcccatccagagcaaggtggtgaacatccccgtgagaatccccgtgagcagacccgtgctgaccctgagaagccccggcgcccaggccgccgtgggcgacctgctggagctgcactgcgaggccctgagaggcagcccccccatcctgtaccagttctaccacgaggacgtgaccctgggcaacagcagcgcccccagcggcggcggcgccagcttcaacctgagcctgaccgccgagcacagcggcaactacagctgcgaggccaacaacggcctgggcgcccagtgcagcgaggccgtgcccgtgagcatcagcggccccgacggctacagaagagacctgatgaccgccggcgtgctgtggggcctgttcggcgtgctgggcttcaccggcgtggccctgctgctgtacgccctgttccacaagatcagcggcgagagcagcgccaccaacgagcccagaggcgccagcagacccaacccccaggagttcacctacagcagccccacccccgacatggaggagctgcagcccgtgtacgtgaacgtgggcagcgtggacgtggacgtggtgtacagccaggtgtggagcatgcagcagcccgagagcagcgccaacatcagaaccctgctggagaacaaggacagccaggtgatctacagcagcgtgaagaagagctag

SEQ ID NO: 219991 - DNA, 2579 bp, Artificial Sequence
  derived and/or modified sequence
gttggtgaccaagagtacatctcttttcaaatagctggattaggtcctcatgctgctgtggtcattgctggtcatctttgatgcagtcactgaacaggcagattcgctgacccttgtggcgccctcttctgtcttcgaaggagacagcatcgttctgaaatgccagggagaacagaactggaaaattcagaagatggcttaccataaggataacaaagagttatctgttttcaaaaaattctcagatttccttatccaaagtgcagttttaagtgacagtggtaactatttctgtagtaccaaaggacaactctttctctgggataaaacttcaaatatagtaaagataaaagtccaagagctctttcaacgtcctgtgctgactgccagctccttccagcccatcgaagggggtccagtgagcctgaaatgtgagacccggctctctccacagaggttggatgttcaactccagttctgcttcttcagagaaaaccaggtcctggggtcaggctggagcagctctccggagctccagatttctgccgtgtggagtgaagacacagggtcttactggtgcaaggcagaaacggtgactcacaggatcagaaaacagagcctccaatcccagattcacgtgcagagaatccccatctctaatgtaagcttggagatccgggcccccgggggacaggtgactgaaggacaaaaactgatcctgctctgctcagtggctgggggtacaggaaatgtcacattctcctggtacagagaggccacaggaaccagtatgggaaagaaaacccagcgttccctgtcagcagagctggagatcccagctgtgaaagagagtgatgccggcaaatattactgtagagctgacaacggccatgtgcctatccagagcaaggtggtgaatatccctgtgagaattccagtgtctcgccctgtcctcaccctcaggtctcctggggcccaggctgcagtgggggacctgctggagcttcactgtgaggccctgagaggctctcccccaatcttgtaccaattttatcatgaggatgtcacccttgggaacagctcggccccctctggaggaggggcctccttcaacctctctttgactgcagaacattctggaaactactcctgtgaggccaacaacggcctgggggcccagtgcagtgaggcagtgccagtctccatctcaggacctgatggctatagaagagacctcatgacagctggagttctctggggactgtttggtgtccttggtttcactggtgttgctttgctgttgtatgccttgttccacaagatatcaggagaaagttctgccactaatgaacccagaggggcttccaggccaaatcctcaagagttcacctattcaagcccaaccccagacatggaggagctgcagccagtgtatgtcaatgtgggctctgtagatgtggatgtggtttattctcaggtctggagcatgcagcagccagaaagctcagcaaacatcaggacacttctggagaacaaggactcccaagtcatctactcttctgtgaagaaatcataacacttggaggaatcagaagggaagatcaacagcaaggatggggcatcattaagacttgctataaaaccttatgaaaatgcttgaggcttatcacctgccacagccagaacgtgcctcaggaggcacctcctgtcatttttgtcctgatgatgtttcttctccaatatcttcttttacctatcaatattcattgaactgctgctacatccagacactgtgcaaataaattatttctgctaccttctcttaagcaatcagtgtgtaaagatttgagggaagaatgaataagagatacaaggtctcaccttcatctactgtgaagtgatgagaacaggacttgatagtggtgtattaacttatttatgtgctgctggatacagtttgctaatattttgttgagaatttttgcaaatatgttcattgggaatattggcctgaaattttcttttccactgtgtctctgccagaatgtttgtatcaggctgatgctggcttcatagaatgagttaggcaggagcccttcctccttgattttttggcatagtttcagcaggattggtaccagttattctttctgcatcttgtagaattcagctatgaatccatctggtctagggcttttgtgttggttggtaagttttttattactaattcaacttcagcgcttgatattggtctaggaggggtttctgtctcttcctggttcaatcttgggagattgtgtgtttccaggaatttagccgtttcctccagattttcttctttatgtgcatcgacttgagtgtaaacataacttatatgcactgggaaaccaaaaaatctgtgtgacttgctttattgcagcatttgttttattttggtagtctggaactgaacctgcaatatcaccaaagtatgcatatagttgcaaaaatgtgatttttgacatagtaaatatgagtatttgcaataaactatgatattacttttgtaagtatatagaataaaatgtaaataatctata

SEQ ID NO: 219992 - DNA, 1527 bp, Artificial Sequence
  derived and/or modified sequence
atgctcctgtggagcctgcttgtaatcttcgatgcagtgaccgaacaagcagacagcttaacattagtggctccctcctcagtgttcgaaggcgattctattgtgctcaaatgccagggcgagcagaattggaagattcagaagatggcctaccacaaagataacaaagagctctcagtctttaaaaagttctccgatttcctgattcagagcgctgttctgagtgattcaggcaattacttttgctcgacaaaaggacagctgtttttatgggacaagacctctaatatagtgaagattaaagttcaggagctattccagcgccccgtgctcacagcttctagcttccagcctattgaaggaggacctgtatccctcaaatgtgagactaggctaagtcctcaacggctcgacgtccagctccaattctgttttttccgggagaatcaggtgttggggtccggctggtccagctcacctgagcttcagatcagcgctgtatggagcgaagatacgggtagctactggtgtaaagctgaaaccgtaacccaccggatccgtaagcagtccttacagtcccagattcacgttcaacgtatccccatttcgaacgtcagcctcgagattcgggcgccgggaggccaggtcacggagggacaaaagctgatcctcttgtgctcagtggccggcgggacaggaaatgtaacattttcatggtacagggaggcaacaggaacaagcatgggtaagaaaacacagcggtctctgagtgcagagctggagatcccagcggtgaaggagagtgatgccggaaaatattactgtcgtgccgacaacggccacgtgcctattcagtcaaaagtagtgaatatacccgtaagaattcccgtaagcagacccgtgttaactttaagaagccccggcgcacaggcagctgtgggggacttactggaattgcactgcgaggcccttcggggatctccgcctatcctctaccagttctaccacgaagacgtcactctcggaaactccagtgccccttccggcggaggcgccagctttaaccttagtctgactgccgaacacagcggcaactattcttgtgaagctaacaatggactcggagctcagtgtagcgaagctgtccctgtgtctatcagtgggcccgacggttacagacgcgatctgatgacagcgggagtgctgtggggactcttcggtgttcttgggttcacaggagtggcccttctcttgtacgcacttttccacaaaatctccggcgagagctccgccaccaatgaaccacgtggcgccagccggcccaacccacaggaatttacctacagttcccctacacccgacatggaggagttgcagccagtttacgttaatgtgggttcggtcgatgtggatgtggtttactcccaagtgtggtccatgcagcagcccgaatcttccgctaatatcagaacgctgttggaaaataaggattcccaagtgatatacagctcggtaaagaagagctag

SEQ ID NO: 219993 - DNA, 1527 bp, Artificial Sequence
  derived and/or modified sequence
atgctgctgtggagcctgctggtgatctttgatgctgtgacagagcaggccgacagcctgaccctggtggcccccagctctgtgtttgaaggagacagcatcgtgctgaagtgccagggcgagcagaactggaagatccagaagatggcctaccacaaggacaacaaggagctgtctgtgttcaagaagttcagtgacttcctgatccagagcgctgtgctgagtgacagcggcaactacttctgcagcaccaagggccagctgttcctgtgggacaagaccagcaacatcgtgaagatcaaggtgcaggagctgttccagaggcctgtgctgacagccagcagcttccagcccattgaaggaggccctgtgtccctgaagtgtgagacccggctgagcccccagaggctggatgtgcagctgcagttctgcttcttccgggagaaccaggtgctgggcagcggctggagcagcagccctgagctgcagatctctgctgtgtggagcgaggacaccggcagctactggtgcaaggccgagaccgtgacccaccgcatcaggaagcagagcctgcagagccagatccacgtgcagaggatccccatcagcaatgtgtccctggagatccgggcccctgggggccaggtgacagagggccagaagctgatcctgctgtgcagcgtggccggcggcactggaaatgtgaccttctcctggtaccgggaggccaccggcacctccatgggcaagaagacccagaggagcctgtctgctgagctggagatcccagctgtgaaggagagtgatgctgggaagtactactgcagagctgacaatggacatgtgcccatccagagcaaggtggtgaacatccctgtgcgcatccctgtgtccaggcctgtgctgaccctgcggagccctggggcccaggccgctgtgggggacctgctggagctgcactgtgaggccctgcggggcagcccccccatcctgtaccagttctaccatgaagatgtgaccctgggcaacagcagcgcccccagcggcggcggggccagcttcaacctgagcctgacagctgagcacagcggcaactacagctgtgaggccaacaacggcctgggcgcccagtgcagcgaggccgtgcctgtgtccatcagcggcccagatggctacagaagagacctgatgacagctggggtgctgtggggcctgtttggagtgctgggcttcaccggggtggccctgctgctgtatgccctcttccacaagatcagcggggagagcagcgccaccaatgagcccaggggggccagccggcccaacccccaggagttcacctacagcagccccaccccagacatggaggagctgcagcctgtgtatgtgaatgtgggctctgtggatgtggatgtggtgtacagccaggtgtggagcatgcagcagcctgagagcagcgccaacatccgcaccctgctggagaacaaggacagccaggtgatctacagctctgtgaagaagagctag

SEQ ID NO: 219994 - DNA, 1527 bp, Artificial Sequence
  derived and/or modified sequence
atgctgctgtggagcctgctggtgatcttcgacgccgtgaccgagcaggctgattctttgactctggttgctcctagttctgtgttcgagggggacagcatcgtgctgaaatgccagggggagcagaactggaagatccagaagatggcttaccataaggataataaggagcttagtgtcttcaagaaattctccgactttctaatccagagtgccgtcctatccgatagcggtaactatttttgctctaccaaagggcagctgtttctgtgggacaagacatcgaatattgtaaaaattaaggtgcaggaactgttccaacgtccagtgcttactgcaagcagcttccaaccaatcgagggaggccctgtctccctgaaatgcgaaactagattgtctcctcaacggcttgatgttcagttacagttttgcttttttcgggaaaatcaggtgcttggctccgggtggtcttcctccccagagctgcaaatctccgcagtttggagcgaggacaccgggagctattggtgcaaagctgaaaccgtgacccacagaattagaaagcagtctttgcagagtcaaatccacgtgcaacgaatcccgatctctaacgtctccctggagatccgcgctcccggcggccaggtaacagaggggcagaagctgattctgctctgcagtgttgccgggggaactggaaacgtgaccttcagttggtacagggaggctaccggaacgtcaatgggaaagaaaacccagaggtcactcagtgctgaactggaaatcccagccgtgaaagaatccgatgcaggcaagtactactgcagggccgacaacgggcacgttcccatacagagcaaagtggtcaacatcccagtccgcatccctgtgtcccgccccgtgctcacactgcgctctcccggggcccaggctgccgtgggggacctcctggagctccattgcgaggctcttcggggtagcccacccatcttataccaattctaccatgaagacgtcacactgggaaacagctccgcaccatctggggggggcgcctcttttaatttgtcacttacagccgaacactccggaaattattcttgcgaggcgaacaacggcctgggtgcccagtgttctgaggctgtgcctgtgagcatcagcgggcccgacgggtacaggcgggacttgatgacggcaggcgtgctctggggactctttggagttttgggtttcactggtgtggccctgctcctttatgccctgtttcacaaaatatcaggggagtcatccgctactaatgagcccagaggagcttctcgacccaaccctcaagaattcacttattcatcacctactccagacatggaggagctgcagccggtgtacgttaatgtcggatcagtggatgtggatgtcgtgtactcccaggtttggtctatgcagcagcccgagtcctcagctaacatccggacattgctcgagaataaagatagtcaagtaatatatagtagtgtaaagaagtcatag

SEQ ID NO: 219995 - DNA, 1527 bp, Artificial Sequence
  derived and/or modified sequence
atgttactgtggtctttgctggtcatctttgacgctgtgacagagcaagctgactctctgacattggtggctccaagctcagtttttgagggcgattccattgtgttgaaatgccagggcgagcagaattggaaaatccagaaaatggcttaccacaaggacaataaagaattgtctgtgttcaagaaattttccgactttttgattcagtccgccgtgttgtctgatagcgggaactatttttgcagcactaaaggccagttattcctatgggacaagacctccaatatcgtgaaaatcaaggtccaggagctattccagagacccgtactcaccgcttcgtcatttcagcccattgaaggaggtccagtcagcttgaagtgcgagacacggctgtcaccccaacgtctggacgtgcagctgcagttttgtttcttccgggagaaccaagtgctgggctctggctggtccagttccccagaactccagatctcagctgtatggagcgaagacaccggaagctattggtgtaaggctgagacggtgacacaccggatcaggaagcagtccctccagagtcagattcacgtgcagagaattcctatctccaacgtttctctggagattcgcgctccaggtggacaggtcacagagggccaaaagctgatcttgctgtgcagtgttgccggaggtaccggaaacgttaccttttcctggtaccgcgaagcgaccggcacgtccatgggcaaaaaaacccagcggtctttgagtgccgaattagagatacctgccgtgaaagagagtgacgccggaaaatactactgcagggcagataacggccacgtgcctatccagtccaaggtcgtcaacatccctgtccggatccccgtgtcccgccctgtcctcactctgcgatctcctggggcacaggcagcagtgggtgacctgttggagctgcattgtgaggccctgcggggatcccccccaattctttaccagttttatcatgaagacgtcacattaggtaactcatctgcccctagtggagggggagcttcctttaacctgagtttgacagccgagcattcaggaaattactcctgtgaagccaacaacggactaggagcacagtgttccgaggccgtgcccgtcagtattagcggcccagatggataccggagggacctgatgaccgcaggggtactttggggactttttggagttctaggatttactggggtcgcgcttctactttacgcgctatttcataaaatctcaggggagtctagcgccactaatgagcccagaggagcctccaggccaaacccacaggaattcacatactctagtcccacccctgatatggaggagctgcaacccgtttacgtgaacgttgggtcagtggacgtggacgtggtctacagccaagtgtggtctatgcaacagccagagagtagtgccaacatccggactcttttagagaacaaagattcccaggtgatttatagttctgtaaaaaaatcctag

SEQ ID NO: 219996 - protein, 252 aa, Artificial Sequence
  derived and/or modified sequence
MCSTSGCDLEEIPLDDDDLNTIEFKILAYYTRHHVFKSTPALFSPKLLRTRSLSQRGLGNCSANESWTEVSWPCRNSQSSEKAINLGKKKSSWKAFFGVVEKEDSQSTPAKVSAQGQRTLEYQDSHSQQWSRCLSNVEQCLEHEAVDPKVISIANRVAEIVYSWPPPQATQAGGFKSKEIFVTEGLSFQLQGHVPVASSSKKDEEEQILAKIVELLKYSGDQLERKDTAFIPIPLVDTSIQGFPQDGLMACI

SEQ ID NO: 219997 - DNA, 831 bp, Artificial Sequence
  derived and/or modified sequence
atgtgcagcaccagcggctgcgacctggaggagatccccctggacgacgacgacctgaacaccatcgagttcaagatcctggcctactacaccagacaccacgtgttcaagagcacccccgccctgttcagccccaagctgctgagaaccagaagcctgagccagagaggcctgggcaactgcagcgccaacgagagctggaccgaggtgagctggccctgcagaaacagccagagcagcgagaaggccatcaacctgggcaagaagaagagcagctggaaggccttcttcggcgtggtggagaaggaggacagccagagcacccccgccaaggtgagcgcccagggccagagaaccctggagtaccaggacagccacagccagcagtggagcagatgcctgagcaacgtggagcagtgcctggagcacgaggccgtggaccccaaggtgatcagcatcgccaacagagtggccgagatcgtgtacagctggccccccccccaggccacccaggccggcggcttcaagagcaaggagatcttcgtgaccgagggcctgagcttccagctgcagggccacgtgcccgtggccagcagcagcaagaaggacgaggaggagcagatcctggccaagatcgtggagctgctgaagtacagcggcgaccagctggagagaaaggagaaggagtgggaggagagcgccaagaccaagatcaagatggccctgctgtggagaagcagcggcggcggccccagagtgctgagcatccccgaggccttcatgaagaacagcttcaccctgaccccccccggcttcagcgagcacaactag

SEQ ID NO: 219998 - DNA, 153 bp, Artificial Sequence
  derived and/or modified sequence
atgtgcagcaccagcggctgcgacctggaggagatccccctggacgacgacgacctgaacaccatcgagttcaagatcctggcctactacaccagacaccacgtgttcaagagcacccccgccctgttcagccccaagctgctgagaacctag

SEQ ID NO: 219999 - DNA, 759 bp, Artificial Sequence
  derived and/or modified sequence
atgtgcagtacttccggctgtgatctggaggagatcccactcgatgacgacgacctgaacacaatcgaattcaaaattttggcgtattatacccgacaccatgtgttcaagtccacacccgccctgttctcccctaaactgctgaggacacgtagcttatctcagagaggactgggtaattgctccgcaaacgagtcctggacagaggtgtcctggccatgcagaaactcccagagctcagaaaaagcaatcaatctcggaaaaaaaaagagcagctggaaggcattttttggtgtggttgaaaaggaggactcccaatctacaccggcgaaagtttccgcccaagggcaaagaacactggagtatcaagatagccatagccagcagtggtctcgctgcctgtctaacgtcgaacaatgtctcgaacacgaagccgtagatccgaaggtcattagcattgctaaccgggtggcagagattgtctacagctggcctccaccccaggccacgcaggcaggagggttcaagagcaaggaaatattcgtcactgagggattgagctttcagctccagggacacgtgcccgtggcttcttcgtccaagaaagacgaagaggagcaaattctggcaaaaatcgtggaacttctgaagtacagtggtgatcaacttgaaagaaaagacaccgcatttatccctatcccactcgttgacacatcaattcagggttttccccaggacggcttaatggcctgtatatag

SEQ ID NO: 220000 - DNA, 831 bp, Artificial Sequence
  derived and/or modified sequence
atgtgttccacaagcggctgcgacctggaggagatcccactggacgacgacgacctcaatacgatcgaattcaaaatacttgcctattacacccggcatcacgtgttcaagagcacccccgcactgttttctcccaagctgctccgcacacgatctttaagtcagagggggctagggaattgctcggccaacgaaagctggaccgaggtgagctggccttgccgaaacagccagtcctcggagaaggccatcaacctggggaagaaaaagtcctcatggaaggccttcttcggcgtcgtcgaaaaggaggatagccaatccactccagcaaaggttagtgcacaggggcagcggacactggagtatcaggacagccacagccagcaatggagcagatgcctcagtaacgtcgaacaatgtctagaacatgaagccgtcgatccaaaggttataagcattgcaaatcgggtggctgaaattgtctacagttggccgccgcctcaggccactcaagccggaggatttaagtccaaggaaatctttgtgaccgagggactctcgttccagctgcagggacacgtccctgtggcgagttccagcaagaaggacgaagaggaacagattctggccaagattgtggagttgctgaagtactctggcgatcaattggaacgcaaagagaaagaatgggaggagagtgccaagactaaaatcaagatggctcttctgtggagatccagtgggggtgggccccgggttctgagtattcccgaggcgtttatgaagaatagctttactttgacccctccaggtttcagcgaacacaactag

SEQ ID NO: 220001 - DNA, 153 bp, Artificial Sequence
  derived and/or modified sequence
atgtgcagtacaagtgggtgcgacctcgaagaaatcccattggatgatgatgacttgaatactattgaatttaagatcctcgcctattatacacgacaccatgtatttaagtctacacctgctctgtttagtcctaagctgctgaggacctag

SEQ ID NO: 220002 - DNA, 759 bp, Artificial Sequence
  derived and/or modified sequence
atgtgcagcaccagcggctgtgacctggaggagatccccctggatgatgatgacctgaacaccatcgagttcaagatcctggcctactacaccaggcaccacgtgttcaagagcaccccagccctcttcagccccaagctgctgcggaccaggagcctgagccagaggggcctgggcaactgcagcgccaatgaatcctggacagaggtgtcctggccctgcaggaacagccagagcagcgagaaggccatcaacctgggcaagaagaagagctcctggaaggccttctttggagtggtggagaaggaggacagccagagcaccccagccaaggtgtctgcccagggccagaggaccctggagtaccaggacagccacagccagcagtggagccgctgcctgagcaatgtggagcagtgcctggagcatgaagctgtggaccccaaggtgatcagcatcgccaacagagtggccgagatcgtgtacagctggcccccaccccaggccacccaggccggcggcttcaagagcaaggagatctttgtgacagagggcctgtccttccagctgcagggccacgtgcctgtggccagcagcagcaagaaggatgaggaggagcagatcctggccaagatcgtggagctgctgaagtacagcggggaccagctggagaggaaggacacagccttcatccccatccccctggtggacaccagcatccagggcttcccccaggacggcctgatggcctgcatctag

SEQ ID NO: 220003 - DNA, 831 bp, Artificial Sequence
  derived and/or modified sequence
atgtgcagcaccagcggctgtgacctggaggagatccccctggatgatgatgacctgaacaccatcgagttcaagatcctggcctactacaccaggcaccacgtgttcaagagcaccccagccctcttcagccccaagctgctgcggaccaggagcctgagccagaggggcctgggcaactgcagcgccaatgaatcctggacagaggtgtcctggccctgcaggaacagccagagcagcgagaaggccatcaacctgggcaagaagaagagctcctggaaggccttctttggagtggtggagaaggaggacagccagagcaccccagccaaggtgtctgcccagggccagaggaccctggagtaccaggacagccacagccagcagtggagccgctgcctgagcaatgtggagcagtgcctggagcatgaagctgtggaccccaaggtgatcagcatcgccaacagagtggccgagatcgtgtacagctggcccccaccccaggccacccaggccggcggcttcaagagcaaggagatctttgtgacagagggcctgtccttccagctgcagggccacgtgcctgtggccagcagcagcaagaaggatgaggaggagcagatcctggccaagatcgtggagctgctgaagtacagcggggaccagctggagaggaaggagaaggagtgggaggagagcgccaagaccaagatcaagatggccctgctgtggaggagcagcggcggcggcccccgggtgctgagcatccctgaggccttcatgaagaacagcttcaccctgaccccacctggcttcagcgagcacaactag

SEQ ID NO: 220004 - DNA, 153 bp, Artificial Sequence
  derived and/or modified sequence
atgtgcagcaccagcggctgtgacctggaggagatccccctggatgatgatgacctgaacaccatcgagttcaagatcctggcctactacaccaggcaccacgtgttcaagagcaccccagccctcttcagccccaagctgctgcggacctag

SEQ ID NO: 220005 - DNA, 759 bp, Artificial Sequence
  derived and/or modified sequence
atgtgcagcaccagcggctgcgacctggaggagatccccctggacgatgacgatctcaacactatagaatttaaaatcctggcctattacacaaggcatcacgtgttcaagtctactcccgctttattttctcccaagcttctccggaccaggagcttgagtcaacgaggcctaggcaattgtagcgctaacgaatcttggaccgaagtatcttggccatgccggaattcacagagtagcgaaaaggcaattaatcttggcaaaaagaagagttcttggaaggctttctttggtgtcgtggagaaggaggattcacagagcacccccgcaaaagtgtcagcacaaggccaacgaaccctggaatatcaagattctcactctcaacaatggagcaggtgcctctccaatgtcgaacagtgccttgaacacgaggctgtggatcccaaagttatatccatagccaatcgcgtcgctgagatcgtgtactcctggccccctccacaggctactcaggcgggcgggtttaaatccaaagagattttcgttacagaaggtctgtccttccagttgcaggggcatgttccagtcgcgtcgagcagtaagaaagatgaggaggaacagatccttgcgaagattgtcgagttgttgaagtatagcggtgatcagttagagaggaaggataccgcctttatccccattcctttagttgatacatcaattcagggctttccacaggatggtctgatggcctgcatttag

SEQ ID NO: 220006 - DNA, 1026 bp, Artificial Sequence
  derived and/or modified sequence
aatgacatgacagccattccgtggccagggacaccactgcccaagctggagaccacgaggattcagggactgaagccagcatgggaattcctggtttgagatcagagtcctgagtacctcgtgggaacttgggcactcatccgcaggaggtctagacccccagagaattccttgagtctaaggcacaggcccaacatgtgtagcaccagtgggtgtgacctggaagaaatccccctagatgatgatgacctaaacaccatagaattcaaaatcctcgcctactacaccagacatcatgtcttcaagagcacccctgctctcttctcaccaaagctgctgagaacaagaagtttgtcccagaggggcctggggaattgttcagcaaatgagtcatggacagaggtgtcatggccttgcagaaattcccaatccagtgagaaggccataaaccttggcaagaaaaagtcttcttggaaagcattctttggagtagtggagaaggaagattcgcagagcacgcctgccaaggtctctgctcagggtcaaaggacgttggaataccaagattcgcacagccagcagtggtccaggtgtctttctaacgtggagcagtgcttggagcatgaagctgtggaccccaaagtcatttccattgccaaccgagtagctgaaattgtttactcctggccaccaccacaagcgacccaggcaggaggcttcaagtccaaagagatttttgtaactgagggtctctccttccagctccaaggccacgtgcctgtagcttcaagttctaagaaagatgaagaagaacaaatactagccaaaattgttgagctgctgaaatattcaggagatcagttggaaagaaaggaaaaagaatgggaggagtcagcaaagaccaagataaaaatggcacttctctggaggagcagtggtggtggacccagagttctgagtatacctgaggcatttatgaagaacagcttcactctcaccccacctggcttctcagaacacaattag

SEQ ID NO: 220007 - DNA, 831 bp, Artificial Sequence
  derived and/or modified sequence
atgtgcagcaccagcggctgcgacctggaggagatccccctggacgatgatgacctgaacacaatcgagttcaagatccttgcctactatactcgccaccatgtgtttaaaagtacgcccgcgctcttcagtcccaagctgctgaggactcgaagtctgtctcagagaggcctgggaaactgtagcgcgaatgaatcctggacagaagtgtcttggccttgccgcaattcacagagctcggaaaaagctataaatttgggcaaaaaaaaatccagttggaaggcgttcttcggtgtggtcgagaaggaggatagccagtctacccctgccaaagtatctgcccagggtcagcgtaccctagagtaccaagattcccattcacaacagtggtcccgctgtctgtcgaacgttgaacagtgcctggaacatgaagcagtggatccgaaagttatctcgattgccaaccgcgtcgccgaaatagtgtactcttggcccccgccgcaagccactcaggctggcgggtttaaaagtaaagagatttttgtgactgaagggcttagtttccagctgcaagggcatgtcccagtcgcttccagttccaaaaaggatgaggaagaacaaatccttgctaaaatcgttgaactattgaagtatagtggagatcagctagaacgcaaggaaaaggagtgggaggagagcgccaagaccaagatcaaaatggccttgctgtggagatcttctgggggggggcctcgggtgctgagtattcccgaggcctttatgaagaattccttcacactgacaccaccaggattttcggaacacaactag

SEQ ID NO: 220008 - DNA, 153 bp, Artificial Sequence
  derived and/or modified sequence
atgtgcagcaccagcggctgcgacctggaggagatccccctggacgatgacgatctgaacaccatcgagttcaaaatccttgcctattacacgagacatcacgtgttcaaatctacacccgctctcttttctcctaaactcctcagaacatag

SEQ ID NO: 220009 - DNA, 759 bp, Artificial Sequence
  derived and/or modified sequence
atgtgttcaacatcaggctgcgacctggaggagattcctctcgacgatgatgatttaaacacaatcgagttcaaaatcttagcctattatacacggcaccatgtattcaaatcaactccagccttgtttagccctaagctcctgagaactcggtcattgtctcagaggggccttggcaactgtagtgccaacgagtcgtggactgaagttagctggccgtgtcgcaactcgcagtcttccgaaaaggccataaatttagggaaaaaaaaatcatcttggaaggcattctttggagtggtcgaaaaggaagactctcagtctacccccgcaaaagtcagtgcgcagggccagagaactctggagtaccaggatagccactcacagcagtggagtcggtgtctgagtaatgtcgaacaatgtctcgaacatgaggccgtggaccctaaggttatctcaatcgctaatcgggtcgctgagattgtctatagctggcctccgccacaggcaacccaggccggaggcttcaagtctaaggaaattttcgtgaccgagggcctgagctttcagttacaggggcacgtcccagtggctagcagctccaagaaagacgaagaggaacagattcttgcaaagatcgtggaactccttaaatacagtggcgatcagttggagagaaaggatacagcgtttatcccgattccactcgtggatacatctatacagggatttccacaggacggcctcatggcctgcatttag

SEQ ID NO: 220010 - DNA, 831 bp, Artificial Sequence
  derived and/or modified sequence
atgtgcagcacatctggatgcgacctggaggagatcccccttgacgatgacgatctgaacaccatcgaattcaagattttagcctactacacccgacatcatgtcttcaagtcgacccccgctctctttagtccaaaacttctgcggacaagatcactgagccagaggggcctcggcaactgtagcgcgaatgagtcttggactgaggtaagctggccttgcagaaactcacaaagcagcgaaaaagctataaaccttgggaaaaaaaaaagctcttggaaggccttcttcggggttgtagaaaaggaggacagccagtccaccccggcaaaggtgtctgcccaaggacagaggaccctggagtatcaagactctcactctcaacagtggtcacgatgcctttcaaacgtcgaacagtgtctggagcacgaagccgtcgacccaaaggttatcagcatagctaacagagtcgcagagatcgtgtacagctggccacccccacaagcaactcaggctggagggtttaaatccaaggagattttcgtcacggagggtctgagcttccagctccagggtcatgtgccagtggcatcatcttccaaaaaggacgaagaggaacaaatccttgctaagatagtggaacttcttaagtattccggggaccagttggaacggaaggagaaggagtgggaagaatccgccaagaccaaaatcaaaatggccctcctttggaggtctagtggtgggggtcctagggttttgagcatccccgaggcttttatgaagaattcattcacactcactccaccaggcttttccgaacataactag

SEQ ID NO: 220011 - DNA, 153 bp, Artificial Sequence
  derived and/or modified sequence
atgtgcagtaccagcggatgtgacctagaagaaatcccactagatgatgacgacctgaacaccattgagtttaagatcctagcttactatactcgccaccacgtttttaagtccacacctgccctgttcagccccaagctgttgaggacttag

SEQ ID NO: 220012 - DNA, 575 bp, Artificial Sequence
  derived and/or modified sequence
gctttcgcttcatcctagaggctaaatgggctcccctggactcgcctggcagaactaaccacctagaagaacgttattgtaagggggaaatgcaaacagggtgaagacaagaggcataggtgatggacactaaaacaaagaccctgccacccaccgggagggaagtgaaatctcacctcaacaagtgagtccgcagagcgagaaccgtgcgacagtgcgtctgccaatacctggaatgtaggtgttcgttgcagtgtggccttcccagccggcctctcagcacacccggccaggcagccagtgttcccagaggacacgctggggccagacgtggaggaccccggccacctcggggagggaaagagaccaagaaaagaacctctgtagccttgcttctgagagtgcaggtttgttacaggcccaacatgtgtagcaccagtgggtgtgacctggaagaaatccccctagatgatgatgacctaaacaccatagaattcaaaatcctcgcctactacaccagacatcatgtcttcaagagcacccctgctctcttctcaccaaagctgctgagaaca

SEQ ID NO: 220013 - DNA, 759 bp, Artificial Sequence
  derived and/or modified sequence
atgtgcagcaccagcggctgcgacctggaggagatccccctggacgacgacgacctgaacaccatcgagttcaagatcctggcctactacaccagacaccacgtgttcaagagcacccccgccctgttcagccccaagctgctgagaaccagaagcctgagccagagaggcctgggcaactgcagcgccaacgagagctggaccgaggtgagctggccctgcagaaacagccagagcagcgagaaggccatcaacctgggcaagaagaagagcagctggaaggccttcttcggcgtggtggagaaggaggacagccagagcacccccgccaaggtgagcgcccagggccagagaaccctggagtaccaggacagccacagccagcagtggagcagatgcctgagcaacgtggagcagtgcctggagcacgaggccgtggaccccaaggtgatcagcatcgccaacagagtggccgagatcgtgtacagctggccccccccccaggccacccaggccggcggcttcaagagcaaggagatcttcgtgaccgagggcctgagcttccagctgcagggccacgtgcccgtggccagcagcagcaagaaggacgaggaggagcagatcctggccaagatcgtggagctgctgaagtacagcggcgaccagctggagagaaaggacaccgccttcatccccatccccctggtggacaccagcatccagggcttcccccaggacggcctgatggcctgcatctag

SEQ ID NO: 220014 - protein, 1439 aa, Artificial Sequence
  derived and/or modified sequence
MASSETEIRWAEPGLGKGPQRRRWAWAEDKRDVDRSSSQSWEEERLFPNATSPELLEDFRLAQQHLPPLEWDPHPQPDGHQDSESGETSGEEAEAEDVDSPASSHEPLAWLPQQGRQLDMTEEEPDGTLGSLEVEEAGESSSRLGYEAGLSLEGHGNTSPMALGHGQARGWVASGEQASGDKLSEHSEVNPSVELSPARSWSSGTVSLDHPSDSLDSTWEGETDGPQPTALAETLPEGPSHHLLSPDGRTGGSVARATPMEFQDSSAPPAQSPQHATDRWRRETTRFFCPQPKEHIWKQTKTSPKPLPSRFIGSISPLNPQPRPTRQGRPLPRQGATLAGRSSSNAPKYGRGQLNYPLPDFSKVGPRVRFPKDESYRPPKSRSHNRKPQAPARPLIFKSPAEIVQEVLLSSGEAALAKDTPPAHPITRVPQEFQTPEQATELVHQLQEDYHRLLTKYAEAENTIDQLRLGAKVNLFSDPPQPNHSIHTGMVPQGTKVLSFTIPQPRSAEWWPGPAEDPQASAASGWPSARGDLSPSSLTSMPTLGWLPENRDISEDQSSAEQTQALASQASQFLAKVESFERLIQAGRLMPQDQVKGFQRLKAAHAALEEEYLKACREQHPAQPLAGSKGTPGRFDPRRELEAEIYRLGSCLEELKEHIDQTQQEPEPPGSDSALDSTPALPCLHQPTHLPAPSGQAPMPAIKTSCPEPATTTAAASTGPCPLHVNVEVSSGNSEVEDRPQDPLARLRHKELQMEQVYHGLMERYLSVKSLPEAMRMEEEEEGEEEEEEEGGGDSLEVDGVAATPGKAEATRVLPRQCPVQAEKSHGAPLEEATEKMVSMKPPGFQASLARDGHMSGLGKAEAAPPGPGVPPHPPGTKSAASHQSSMTSLEGSGISERLPQKPLHRGGGPHLEETWMASPETDSGFVGSETSRVSPLTQTPEHRLSHISTAGTLAQPFAASVPRDGASYPKARGSLIPRRATEPSTPRSQAQRYLSSPSGPLRQRAPNFSLERTLAAEMAVPGSEFEGHKRISEQPLPNKTISPPPAPAPAAAPLPCGPTETIPSFLLTRAGRDQAICELQEEVSRLRLRLEDSLHQPLQGSPTRPASAFDRPARTRGRPADSPATWGSHYGSKSTERLPGEPRGEEQIVPPGRQRARSSSVPREVLRLSLSSESELPSLPLFSEKSKTTKDSPQAARDGKRGVGSAGWPDRVTFRGQYTGHEYHVLSPKAVPKGNGTVSCPHCRPIRTQDAGGAVTGDPLGPPPADTLQCPLCGQVGSPPEADGPGSATSGAEKATTRRKASSTPSPKQRSKQAGSSPRPPPGLWYLATAPPAPAPPAFAYISSVPIMPYPPAAVYYAPAGPTSAQPAAKWPPTASPPPARRHRHSIQLDLGDLEELNKALSRAVQAAESVRSTTRQMRSSLSADLRQAHSLRGSCLF

SEQ ID NO: 220015 - protein, 572 aa, Artificial Sequence
  derived and/or modified sequence
MASSETEIRWAEPGLGKGPQRRRWAWAEDKRDVDRSSSQSWEEERLFPNATSPELLEDFRLAQQHLPPLEWDPHPQPDGHQDSESGETSGEEAEAEDVDSPASSHEPLAWLPQQGRQLDMTEEEPDGTLGSLEVEEAGESSSRLGYEAGLSLEGHGNTSPMALGHGQARGWVASGEQASGDKLSEHSEVNPSVELSPARSWSSGTVSLDHPSDSLDSTWEGETDGPQPTALAETLPEGPSHHLLSPDGRTGGSVARATPMEFQDSSAPPAQSPQHATDRWRRETTRFFCPQPKEHIWKQTKTSPKPLPSRFIGSISPLNPQPRPTRQGRPLPRQGATLAGRSSSNAPKYGRGQLNYPLPDFSKVGPRVRFPKDESYRPPKSRSHNRKPQAPARPLIFKSPAEIVQEVLLSSGEAALAKDTPPAHPITRVPQEFQTPEQATELVHQLQVSGTHGCGCVTKAPVGLGWRLIGVGRPGVEAGWGGEAWDRAWLGWEALGRRLVGWGGLGWRLARVGSPGMEASGVGRPGVGSPGVEPGGVGRPGVEAGWGRKPWDRGWWGGEAWGGGWLGQEALG

SEQ ID NO: 220016 - DNA, 4320 bp, Artificial Sequence
  derived and/or modified sequence
atggcctccagtgagaccgagatccgatgggcagaacctggattgggaaaagggccgcagcggcggcgttgggcctgggccgaggacaagagagacgttgatagatcatccagccagagctgggaagaggaacgtctgtttcccaacgctacaagcccagagcttctggaggattttcgactggcgcagcaacatctgccccccttagagtgggatccgcacccacagccggacggccatcaggactctgagtctggtgagactagcggtgaggaggccgaagctgaagacgtggattcccccgccagctctcacgagcctctagcgtggctaccacagcaaggccggcagttggatatgaccgaagaggaacccgatggtactctcgggagcctagaggtagaggaagccggcgagtcatcatccaggttgggttacgaagcaggtctgagcctggagggccacggcaacactagcccaatggccttggggcacggacaagcaagaggttgggtcgcaagcggcgaacaggcatctggcgacaagcttagcgagcatagcgaagttaacccttcagttgaacttagcccagccagatcctggtcctcaggcaccgtgtcactggatcacccttctgactccttagatagtacctgggagggagaaacggacggaccccagccaacagctcttgctgaaaccctgccagaagggcccagtcaccatctcttaagccctgatggaaggacagggggctccgtggcgcgggcaacccccatggaatttcaagattcttccgctccgccagctcaatccccccagcacgccaccgacaggtggaggagagagacgactagattcttctgcccgcagcctaaagagcatatctggaagcagactaagacctcccccaaaccgctaccgagtaggttcatcggatccatctcgccactgaacccccagccccggccaactcgccaagggaggcctcttccccggcagggagctacactcgccggaagatcttcgtcgaacgctcctaagtatggtagaggacagctgaattaccccttaccagactttagtaaagtggggccgcgggttcgcttccccaaggacgagtcttaccgccctcctaagtcacgatcacataatagaaagccccaagcgccggcccgccccttaattttcaagtccccggccgaaatcgtccaggaagttctactcagttcgggtgaggccgccctggccaaagatactccaccggcccaccccatcaccagagtgccacaggaattccagacccccgaacaggcaaccgagctcgtgcatcaactccaggaggattatcataggctccttacaaaatatgccgaagctgagaacactatcgaccagttgcggcttggcgccaaggtaaatttgttttctgaccccccacagcctaatcactctatccacaccggaatggtgccacagggcactaaggtgttaagcttcacaataccacaaccgcgctctgcagagtggtggccgggtcccgcagaggatccccaggcatccgccgctagcggatggccctccgcgcggggtgacctttctccgtctagtctgacctcgatgccaaccctcggctggctgcccgagaatagggatatttccgaggaccagagttccgcagagcagacacaagccctcgcttcccaggcatcacagttcctcgccaaagtagagtctttcgaacggttaatccaggccggaagattgatgccccaggaccaggtaaagggcttccaaagactgaaggcagcccatgcagccctcgaagaagaatacctaaaagcctgcagggagcaacatcccgcccaacctctggccgggtctaaggggacccccggccgttttgacccgcgccgggaactggaggccgaaatataccgcctcggcagttgcctggaggaattgaaagagcacattgaccagacccaacaggaacctgagcctcccgggtcggatagtgcgctggatagcacgccagccctgccctgtctgcaccagcctactcacctccctgctccttccggccaggctcctatgcccgctataaagacttcatgcccagaacctgcaaccacaaccgctgctgcaagcaccggaccctgccccctccacgtgaacgttgaggtctccagtggtaactccgaggtggaggaccggccccaagacccactcgcccggctcagacacaaagagctgcagatggagcaggtgtatcacggtttgatggaaaggtacctgagcgtcaaaagcctgccagaagccatgaggatggaggaagaagaggagggcgaggaagaggaggaggaggaaggcgggggcgattccctggaagttgacggggtcgcggccacaccgggtaaagcagaagcgacgcgcgtgctgcctcgccagtgccctgttcaggccgaaaaatcccacggagcccctttggaggaagccaccgaaaagatggtgagtatgaaaccaccaggtttccaggcaagcctagcaagagatggtcacatgagcggcttgggcaaggcagaggcggcaccccctggcccaggagtacctccccatccacctggcaccaagagcgccgcatctcaccagtcatccatgacaagtttagagggatctggaatctccgaacggcttccccagaagcccttacaccggggtggtggcccacatctggaggagacatggatggcgagcccagaaaccgactctgggtttgtgggctcagaaacttctcgagtctcgcccctaacccaaaccccggagcatagactctcacacatcagtacggccggaacattggctcaacccttcgccgcttctgtacctagggacggcgcgtcttatccgaaggccagaggctccctgatccctcgacgggcaacagagccctcaaccccccgatcacaagcacagaggtacctgtcttctccctctgggcccctcagacagcgagcccccaattttagcctggagcgcacactggccgcagaaatggccgtgccaggatctgagtttgaaggccataaacggatttcagaacagccgcttccaaacaaaactatttctcctccacctgcccccgccccagccgctgcccctctgccatgtggccccacggaaaccatcccttcctttttgttaactcgggccggaagagatcaagcaatttgcgagctgcaggaagaagtaagtcggcttcggttgcggctagaggacagcctgcaccaacctttacagggttctcccactcgtcccgcttcggcctttgatcgccccgcgagaacaagaggacgcccagccgattcaccagccacatggggatcccattacggtagtaaatccactgaaaggctccctggggagcctcgcggagaggagcagatagtcccccctggcagacagagggctaggtccagcagtgtaccccgcgaagtgttgaggctgagtctcagtagcgagagcgagctcccatcacttccactgttctccgagaagtctaaaacgaccaaagatagccctcaggctgcaagagatggcaagaggggcgtgggaagcgccggctggcccgaccgggtgacattcagaggtcaatataccgggcatgagtatcacgtgctatccccaaaggctgttcccaagggtaacggcacagtgtcttgcccacattgcaggccgataaggacccaggatgcaggaggggcagtgactggagatccacttggcccaccacctgccgacactctgcagtgtccgctctgtggtcaggtgggtagtccacccgaggcagacggtcccggcagcgcaacctcaggagccgagaaggctactaccagaagaaaggctagctcaaccccgtctcccaagcagcgcagtaagcaggccggcagctcaccgcggcctcctccggggttgtggtatctagcaaccgcccctcccgcaccagcaccaccggccttcgcttatatatcatccgtgcctattatgccgtacccacctgctgccgtgtactatgcacccgcagggcccacgagcgcccaaccagccgccaagtggcctccaactgcaagtccccctcccgccaggcgccatcggcattctattcagttagacttgggggacctcgaggagctgaacaaggcactgagccgcgccgttcaagccgctgaaagcgtgcgatccacaactcggcaaatgcggtcttcactgtcagccgaccttagacaagctcactctttaagaggatcctgtctgttctag

SEQ ID NO: 220017 - DNA, 2496 bp, Artificial Sequence
  derived and/or modified sequence
atggcaagcagcgaaaccgagattcgctgggccgagcccggactcggtaaggggccccagagacggagatgggcgtgggctgaggacaaacgagatgtcgatagatcgtcatctcaatcgtgggaggaggagaggttattcccaaacgcgaccagccctgaactgctggaggactttagactcgcccaacaacatcttccccccctggagtgggacccacatcctcagcccgacgggcatcaagatagtgagagcggggagacctcgggtgaagaagctgaagctgaggatgtcgacagcccggcttcctctcacgagccgctagcttggctgccacagcagggccggcagctggacatgacagaagaggagccagatggcactctgggaagtcttgaagtggaggaagcaggcgaatcctcctcacggctggggtatgaagccgggctttccctagaagggcacggcaacactagtcctatggccttaggacatggacaggcccgcgggtgggtcgcatctggagaacaggcaagcggagataagctgtccgagcattctgaggtaaacccaagcgtggagctctcccctgcgcgtagctggagttccggtacagtgtctcttgaccatccctccgattccctggattctacttgggaaggcgagacggacggaccacagcctaccgccctcgcagagaccctccctgaggggccatcccaccacttgctcagcccagacggccgcactggggggagcgtggcccgtgccacccccatggaattccaagattccagcgctccacccgcccagtccccacagcacgccacggatagatggaggagggagactacgcgcttcttctgcccccaacctaaagagcacatctggaaacagactaagacctcaccaaagcctctgccgagtaggtttatagggagcatctcaccactgaatccacaacctagacccaccagacagggccggcccctccctcgccagggcgcgaccctcgctggccgttcctcatccaatgccccaaagtacggtcgaggccagttaaactacccgctacccgatttctccaaggtgggtccccgcgtgaggttcccgaaagacgagagctatagaccacccaaatcccgtagccataatcgaaagccccaagccccagctcgaccactgatcttcaaatccccagctgaaatcgttcaggaggtgcttctgtctagcggcgaggcagcgctcgcgaaagatacgccacccgctcaccccatcacccgcgtcccccaggaatttcagacaccagaacaggccactgagctcgttcaccagctgcaagaggattatcatagattgctcacgaagtatgccgaagccgagaatactattgaccaattaagactgggagcgaaagtgaaccttttctctgatcccccgcagcctaatcactctattcatacagggatggttccgcagggcacaaaagtgctgagttttactatcccccagcccagaagtgccgagtggtggcctggccccgcagaggatcctcaggcaagtgcggcttcaggctggcctagcgccaggggagacctctccccctcttccttgacaagcatgccaaccctcgggtggctacctgaaaatcgggatatctctgaggatcagtcttctgccgaacagacacaagcgctcgctagccaggcttcacagttccttgccaaggtggaaagtttcgagcggttgattcaagccggccgtctgatgccacaggatcaggtgaaggggtttcagagactaaaggcagcccacgccgctcttgaggaagaatatttgaaagcatgtcgggagcagcacccagcgcagcctctcgcgggctccaagggcactcccgggcgctttgatccacgtagggagctcgaagcagaaatctaccgcctcggatcttgtcttgaggagctgaaggagcacatcgaccaaacccagcaggagcccgaaccccctgggtctgacagcgctttggattcgacccctgccctcccctgcctgcatcagcccactcacctgccagctccatctggccaggctcccatgcctgcaattaaaacgagctgtcccgaacctgctaccaccaccgcagcagctagtactgggccatgccccctccacgtgaatgtagaggtgtctagtggaaacagtgaggtggaggacagacctcaagatcctctggctcgactgcggcataaggagctccagatggaacaggtctatcatgggttgatggagagatacctcagcgtgaagagccttcctgaggccatgagaatggaggaggaagaggagggtgaggaagaggaggaggaggagggcgggggggactctctagaggtggatggagtggctgcaacccccggtaaagctgaagcaactcgagtgctgccccggcagtgccccgtgcaggcggagaaatcccacggagcccctctggaatag

SEQ ID NO: 220018 - DNA, 4320 bp, Artificial Sequence
  derived and/or modified sequence
atggcgagcagcgagactgagatccggtgggccgagccaggcctcgggaaggggccccaacgacggcgttgggcttgggcagaagacaaaagggatgtggaccgcagctcgtcccaatcctgggaggaagagcgattgttcccaaacgcaacatctccggagcttttagaggactttcgccttgcacaacagcacctccccccgctcgaatgggacccccacccgcagcccgacggccatcaggattctgagtccggcgaaaccagcggtgaagaagctgaggctgaggacgtagacagtcctgctagtagtcacgagccactggcatggctgccccagcaggggaggcagctggatatgaccgaagaagagcctgacggaactctgggttccctggaggtagaggaagccggcgagagctcatcccggcttggatatgaggccggactgtccttggaagggcacgggaatacctcaccgatggccttggggcatggccaggcaaggggctgggttgcaagtggggaacaggcctccggcgacaaactgtcggaacatagtgaggtgaatccaagcgtagaacttagtcccgctaggtcctggagtagcggcaccgtatccctggatcatccttcagacagcttagattccacttgggaaggcgagactgacggtccacagccaacagcactggcagagaccctccctgaaggtccctcccatcacttgctttcccctgatggccgcactggaggatccgtggcacgggcaactcctatggaattccaggactcctctgctcctcccgctcagtctccccagcacgcaacagatagatggaggcgtgaaaccactcgcttcttctgtccacaacccaaagagcatatttggaaacagacaaaaacttcccccaagcccctgccaagcaggtttattggtagtattagcccactgaacccgcagccaagaccgaccagacagggcagacccctaccgcggcaaggggccactctcgccgggagaagctccagcaatgcccctaagtacggcaggggacaactgaattatcccctgcctgacttttctaaggtgggcccacgtgttcgcttccctaaggacgagtcctatcgaccacccaaatctcgcagccataacagaaagccacaggcaccggcacgtcctctgattttcaaatctcctgccgagatcgtacaggaagtgctgttatctagtggtgaggcagcccttgctaaggacacccctcctgcacatcccataactcgagtacctcaagaatttcagacacctgagcaggctacggaacttgttcaccagttacaggaggactaccatcggctacttaccaagtatgccgaagccgagaataccatcgatcagctccgtttgggtgctaaagtgaacctattcagcgacccgccccaaccaaaccacagcatccacaccgggatggtgccccaggggactaaggtgctctccttcacaattccccaaccccgatctgccgaatggtggccgggaccagctgaggaccctcaggcaagcgcagcttcgggctggccgtctgctcgtggcgacctgtcccccagctctttgacttctatgcccaccctgggatggctgccagagaacagggacatatccgaagatcagagcagtgctgaacagacccaggcccttgcatcacaggcgagccaatttcttgccaaggtagaatcctttgaacgcctaatacaggccggccgcttaatgccccaggaccaagtgaaaggtttccagcgtctgaaagccgcccatgcagctctcgaagaagagtatctgaaagcttgcagggagcagcatccagctcaaccacttgcaggtagcaagggcacaccaggtcgattcgatccccgtcgggaactggaagccgagatctatcgactgggatcttgtctcgaagaattgaaagagcatattgaccaaacccagcaggagccagagccacccggatctgacagcgctttggacagcacccccgcactgccatgcctgcatcagcctacacacctgcctgccccatccggccaagccccaatgcctgccatcaagactagctgtcccgaaccagccaccaccaccgccgctgcctctacaggcccctgcccactgcacgtcaatgtcgaagtgagtagcggaaatagcgaggtagaggacagacctcaggatcctctggctagactgcgacataaagaactgcagatggaacaagtgtaccacggcctgatggagcgttacctcagcgttaaatctttacccgaggcaatgagaatggaggaggaggaggagggcgaggaagaggaggaggaggaaggaggcggagacagcctcgaagtggacggcgtggcagctacaccgggcaaagcagaagctacgcgggttctgccccgccaatgcccagtgcaagcggaaaaaagccatggggcaccccttgaggaagccactgaaaagatggtctctatgaaaccgcctggatttcaggcaagcctggcccgagacgggcacatgagtgggcttggcaaggccgaggccgcaccacctggtccgggtgtacctcctcaccctcccggtaccaaaagcgccgcttcacaccagtcctccatgacttctctggaaggctccggtataagcgagcgtctgccccagaaaccccttcaccgtggcgggggcccacacctggaggagacctggatggctagccctgaaaccgacagcggatttgtcggaagcgagacgtcccgcgttagtcctctcacacagacaccagagcatcgattatcccatatttccacggctggaacccttgcccaaccctttgctgctagcgttccacgggatggtgccagctaccccaaagctcggggcagcctgatccccagacgggcaaccgagccctctacacctcgatcccaggctcagagatatctgagctccccgtctggtcctttgcgccagcgcgctcctaactttagcctagagcgtaccctggccgccgagatggccgtcccagggagcgagttcgagggtcacaagcgaattagcgagcagcccttgccaaataagacaataagtcctcccccagccccagccccagccgccgcgcccctgccttgcgggcctaccgagactattccctccttcctcctcactagagccggccgcgatcaggctatctgcgagctgcaggaggaggtgtcccggttgcggctgaggctggaagatagccttcatcagcctctgcagggatcccccacacgaccagccagcgctttcgaccgaccggcacgaaccaggggaagaccagcagacagcccagctacatggggttcacattatggcagtaagagcacggagcggttacctggcgagccgcgaggggaagagcagattgtgcctcccggacggcagagagctcggtcatccagcgtgcccagagaagtgttacgtctcagtctctcatctgagagcgaactgccttccctgcctctcttctctgagaagagcaagacaactaaggacagcccacaggctgctagagacggcaagaggggtgttggctctgcagggtggcccgaccgcgtgaccttcagagggcagtatactggccatgagtaccatgttttatcgcctaaggccgtccctaagggcaacggaacagttagttgcccacactgtcgtcccatccggactcaggacgccggaggggccgtgacaggcgacccacttggtccccctcccgcagacaccctccaatgtccactctgcggtcaggtcgggagccccccagaggccgacgggccgggctctgccacgtcaggcgcagagaaggccacaacccgccgaaaggcatccagcacaccatcccccaagcaacgaagtaagcaagctggttcctcaccccggcctccgcctggcctgtggtacctagcaactgctcctcccgccccagcccctcccgcatttgcctacatctctagcgtgcctattatgccgtatccacctgcagctgtctactatgcccccgccgggccaacttctgcccagccagccgcaaagtggcccccgactgccagtccccctcctgcacgcagacatcgccactccatacaattagacctgggcgatctggaagaattgaacaaggcattatcacgcgccgttcaagcggcggagtcagtgcgcagcactacgcgccagatgaggagctccctgagtgctgacctgcggcaggcccattctctcagaggctcttgcctattctag

SEQ ID NO: 220019 - DNA, 4320 bp, Artificial Sequence
  derived and/or modified sequence
atggccagcagcgagacagagatccgctgggccgagcccggcctgggcaagggcccccagaggcggcgctgggcctgggccgaggacaagagagatgtggacaggagcagcagccagagctgggaggaggagcggctcttccccaatgccaccagccctgagctgctggaggacttccggctggcccagcagcacctgccccccctggagtgggacccccacccccagccagatggccaccaggacagcgagagcggggagaccagcggggaggaggccgaggccgaggatgtggacagccctgccagcagccatgagcccctggcctggctgccccagcagggccggcagctggacatgacagaggaggagccagatggcaccctgggcagcctggaggtggaggaggccggggagagcagcagccggctgggctatgaggccggcctgagcctggagggccacggcaacaccagccccatggccctgggccacggccaggcccggggctgggtggccagcggggagcaggccagcggggacaagctgtctgagcacagcgaggtgaaccccagcgtggagctgagccctgcccgctcctggagcagcggcaccgtgtccctggaccaccccagcgacagcctggacagcacctgggagggggagacagatggcccccagcccacagccctggccgagaccctgcctgagggccccagccaccacctgctgagcccagatggccgcactggaggctctgtggcccgggccacccccatggagttccaggacagcagcgcccccccagcccagagcccccagcacgccacagaccgctggaggcgggagaccacccgcttcttctgcccccagcccaaggagcacatctggaagcagaccaagaccagccccaagcccctgcccagccgcttcatcggcagcatcagccccctgaacccccagccccggcccacccggcagggccggcccctgccccggcagggcgccaccctggccggccgcagcagcagcaatgcccccaagtatggccggggccagctgaactaccccctgcctgacttcagcaaggtgggcccccgggtgcgcttccccaaggatgagagctaccggccccccaagagccgcagccacaacaggaagccccaggccccagcccggcccctcatcttcaagagccctgctgagatcgtgcaggaggtgctgctgagcagtggagaggccgccctggccaaggacaccccaccagcccaccccatcaccagggtgccccaggagttccagaccccagagcaggccacagagctggtgcaccagctgcaggaggactaccaccggctgctgaccaagtatgcagaggccgagaacaccatcgaccagctgcggctgggcgccaaggtgaacctcttcagtgaccccccccagcccaaccacagcatccacacaggcatggtgccccagggcaccaaggtgctgtccttcaccatcccccagcccaggtctgctgagtggtggccaggccctgctgaggacccccaggccagcgctgccagcggctggcccagcgcccggggggacctgagccccagcagcctgacctccatgcccaccctgggctggctgcctgaaaatagagacatcagcgaggaccagagcagcgctgagcagacccaggccctggccagccaggccagccagttcctggccaaggtggagagctttgagcggctcatccaggccggccgcctgatgccccaggaccaggtgaagggcttccagaggctgaaggccgcccacgccgccctggaggaggagtacctgaaggcctgccgggagcagcacccagcccagcccctggccggcagcaagggcaccccaggccgctttgacccccggcgggagctggaggccgagatctaccgcctgggcagctgcctggaggagctgaaggagcacatcgaccagacccagcaggagcctgagcccccaggcagtgacagcgccctggacagcaccccagccctgccctgcctgcaccagcccacccacctgcctgcccccagcggccaggcccccatgcctgccatcaagaccagctgcccagagcccgccaccaccacagctgctgccagcacaggcccctgccccctgcacgtgaatgtggaggtgagcagcggcaacagcgaggtggaggaccggccccaggaccccctggcccggctgcggcacaaggagctgcagatggagcaggtgtaccacggcctgatggagcgctacctgtctgtgaagagcctgcctgaggccatgaggatggaggaggaggaggagggggaggaggaggaggaggaggagggcggcggggacagcctggaggtggatggagtggccgccaccccaggcaaggccgaggccaccagggtgctgccccggcagtgccctgtgcaggccgagaagagccacggggcccccctggaggaggccacagagaagatggtgtccatgaagcccccaggcttccaggccagcctggccagagatggccacatgagcggcctgggcaaggccgaggccgcccctcctggccctggggtgcccccccaccccccaggcaccaagtctgctgccagccaccagagctccatgaccagcctggagggcagcggcatcagcgagcggctgccccagaagcccctgcacagaggaggcggcccccacctggaggagacctggatggccagccctgagacagacagcggctttgtgggcagcgagaccagccgggtgagccccctgacccagaccccagagcaccggctgagccacatcagcacagctggcaccctggcccagccctttgctgcctctgtgcccagagatggagccagctaccccaaggcccggggcagcctcatcccccggcgggccacagagcccagcacccccaggagccaggcccagcgctacctgagcagccccagcggccccctgcggcagagggcccccaacttcagcctggagaggaccctggccgctgagatggctgtgcccggcagcgagtttgagggccacaagaggatcagcgagcagcccctgcccaacaagaccatcagccccccaccagccccagccccagctgctgcccccctgccctgtggccccacagagaccatccccagcttcctgctgaccagggctggccgggaccaggccatctgtgagctgcaggaggaggtgtcccggctgcggctgcggctggaggacagcctgcaccagcccctgcagggcagccccaccaggcctgccagcgcctttgacaggcctgcccggacccggggccggcctgctgacagccctgccacctggggcagccactacggcagcaagagcacagagcggctgcccggggagcccagaggagaggagcagatcgtgcccccaggccggcagagggcccggagcagctctgtgccccgggaggtgctgcggctgagcctgagcagcgagagcgagctgcccagcctgcccctcttcagcgagaagagcaagaccaccaaggacagcccccaggccgccagagatggcaagaggggcgtgggcagcgctggctggccagacagagtgaccttccggggccagtacacaggccacgagtaccacgtgctgagccccaaggctgtgcccaagggaaatggcaccgtgtcctgcccccactgccggcccatccgcacccaggatgctgggggcgctgtgactggagaccccctgggccccccacctgctgacaccctgcagtgccccctgtgtggccaggtgggcagccccccagaggctgatggccctggcagcgccaccagcggggctgagaaggccaccaccaggaggaaggccagcagcacccccagccccaagcagaggagcaagcaggccggcagcagccccaggcctcctcctggcctgtggtacctggccacagcccccccagccccagcccccccagcctttgcctacatcagctctgtgcccatcatgccctaccccccagctgctgtgtactatgccccagctggccccaccagcgcccagcctgctgccaagtggcccccaacagccagccccccaccagcccggcggcaccgccacagcatccagctggacctgggggacctggaggagctgaacaaggccctgagcagagctgtgcaggccgctgagagcgtgcgcagcaccacccggcagatgaggagcagcctgtctgctgacctgcggcaggcccacagcctgcggggcagctgcctcttctag

SEQ ID NO: 220020 - DNA, 2496 bp, Artificial Sequence
  derived and/or modified sequence
atggccagcagcgagacagagatccgctgggccgagcccggcctgggcaagggcccccagaggcggcgctgggcctgggccgaggacaagagagatgtggacaggagcagcagccagagctgggaggaggagcggctcttccccaatgccaccagccctgagctgctggaggacttccggctggcccagcagcacctgccccccctggagtgggacccccacccccagccagatggccaccaggacagcgagagcggggagaccagcggggaggaggccgaggccgaggatgtggacagccctgccagcagccatgagcccctggcctggctgccccagcagggccggcagctggacatgacagaggaggagccagatggcaccctgggcagcctggaggtggaggaggccggggagagcagcagccggctgggctatgaggccggcctgagcctggagggccacggcaacaccagccccatggccctgggccacggccaggcccggggctgggtggccagcggggagcaggccagcggggacaagctgtctgagcacagcgaggtgaaccccagcgtggagctgagccctgcccgctcctggagcagcggcaccgtgtccctggaccaccccagcgacagcctggacagcacctgggagggggagacagatggcccccagcccacagccctggccgagaccctgcctgagggccccagccaccacctgctgagcccagatggccgcactggaggctctgtggcccgggccacccccatggagttccaggacagcagcgcccccccagcccagagcccccagcacgccacagaccgctggaggcgggagaccacccgcttcttctgcccccagcccaaggagcacatctggaagcagaccaagaccagccccaagcccctgcccagccgcttcatcggcagcatcagccccctgaacccccagccccggcccacccggcagggccggcccctgccccggcagggcgccaccctggccggccgcagcagcagcaatgcccccaagtatggccggggccagctgaactaccccctgcctgacttcagcaaggtgggcccccgggtgcgcttccccaaggatgagagctaccggccccccaagagccgcagccacaacaggaagccccaggccccagcccggcccctcatcttcaagagccctgctgagatcgtgcaggaggtgctgctgagcagtggagaggccgccctggccaaggacaccccaccagcccaccccatcaccagggtgccccaggagttccagaccccagagcaggccacagagctggtgcaccagctgcaggaggactaccaccggctgctgaccaagtatgcagaggccgagaacaccatcgaccagctgcggctgggcgccaaggtgaacctcttcagtgaccccccccagcccaaccacagcatccacacaggcatggtgccccagggcaccaaggtgctgtccttcaccatcccccagcccaggtctgctgagtggtggccaggccctgctgaggacccccaggccagcgctgccagcggctggcccagcgcccggggggacctgagccccagcagcctgacctccatgcccaccctgggctggctgcctgaaaatagagacatcagcgaggaccagagcagcgctgagcagacccaggccctggccagccaggccagccagttcctggccaaggtggagagctttgagcggctcatccaggccggccgcctgatgccccaggaccaggtgaagggcttccagaggctgaaggccgcccacgccgccctggaggaggagtacctgaaggcctgccgggagcagcacccagcccagcccctggccggcagcaagggcaccccaggccgctttgacccccggcgggagctggaggccgagatctaccgcctgggcagctgcctggaggagctgaaggagcacatcgaccagacccagcaggagcctgagcccccaggcagtgacagcgccctggacagcaccccagccctgccctgcctgcaccagcccacccacctgcctgcccccagcggccaggcccccatgcctgccatcaagaccagctgcccagagcccgccaccaccacagctgctgccagcacaggcccctgccccctgcacgtgaatgtggaggtgagcagcggcaacagcgaggtggaggaccggccccaggaccccctggcccggctgcggcacaaggagctgcagatggagcaggtgtaccacggcctgatggagcgctacctgtctgtgaagagcctgcctgaggccatgaggatggaggaggaggaggagggggaggaggaggaggaggaggagggcggcggggacagcctggaggtggatggagtggccgccaccccaggcaaggccgaggccaccagggtgctgccccggcagtgccctgtgcaggccgagaagagccacggggcccccctggagtag

SEQ ID NO: 220021 - DNA, 4320 bp, Artificial Sequence
  derived and/or modified sequence
atggccagcagcgagaccgagatccggtgggccgagcccggcctgggaaaaggccctcagaggagaaggtgggcctgggccgaagataaacgggacgtcgacaggagctcctcccagagctgggaagaagagcgactgtttcccaatgctacctcacctgagctgctcgaggacttcaggctcgcacaacagcatctaccacccttagaatgggatcctcatccccagcccgatggacaccaggattccgaatccggcgagacaagtggtgaagaagccgaagcagaagacgtggacagccctgcttcgtcacacgagcccctcgcctggttgccacagcagggtagacagctcgacatgactgaggaagagccggacgggactctcggtagtcttgaggttgaggaggctggtgagagcagtagccgactgggttatgaggctgggctgtctctcgaagggcatggcaatacctcccccatggccctcggtcacggccaggcacgggggtgggtagccagtggggagcaggcaagtggagacaaactgagtgagcattctgaggtgaacccaagtgtggaattatcacctgcacggagttggtccagcggaacagtgagtttggatcatccgtctgatagtctggactcaacctgggaaggcgagacagatggtccccagccaactgctcttgcggagactcttcctgaggggccatctcatcacctgctgtcacccgacgggcgtacaggcggctcggtcgcacgcgccacacccatggaattccaggactcttccgccccaccagcccagtcacctcagcacgccacagaccgctggcgaagggagaccacacgctttttctgtccccaaccgaaagagcacatctggaagcagacaaaaactagccctaaacccttgcctagcagattcattggctctatctcccccctcaatccacagcctcggcctacaaggcagggacgccctttgccaaggcaaggcgccactctggctggccggtcttcaagcaacgcacctaaatacggacgcgggcagcttaactatcccttgccggatttttcaaaagtgggccccagggtgagatttccaaaagatgaatcgtatagaccaccaaaaagtcgaagccataaccggaagccacaagcccctgctaggcccctcatatttaaatcccctgctgagatcgtgcaagaagtgcttctcagttcgggagaggcggctctggccaaagacaccccaccggcacatccgattaccagagttccccaggaattccaaacccctgagcaggccactgaactcgtgcatcagctgcaggaggactatcaccgcctccttacaaaatacgcagaagcagaaaacaccattgaccagctgcgactcggagctaaggttaatctcttcagcgatccacctcagccaaatcacagcatccacaccggcatggtgcctcaggggactaaagtgctctctttcacgatcccacaaccccggtcagcagaatggtggcctggaccagccgaagatccccaggcaagcgctgcttccggatggcctagtgcccggggggacctgtcgccaagttctctgacttccatgcccacactggggtggctcccagagaaccgcgacatcagtgaggaccaaagctctgccgaacagacacaagcacttgccagccaggcctcccagttcctcgcaaaagtggaatcttttgaaaggcttatccaggcaggacgccttatgccacaagaccaggtcaaagggtttcagcggctgaaggctgctcacgccgcccttgaggaagaatatctgaaggcctgtcgcgagcaacatcccgctcagccactcgccggatccaagggaacacccggacgttttgacccacggagggaactagaggctgagatctaccggctcgggtcctgcctggaggagttgaaggagcatatcgatcaaactcaacaggagcccgaaccacctggcagtgacagtgccctcgatagcacccctgccctcccttgtctgcatcagcccacccacttacctgcaccctctgggcaggctccgatgccagcaatcaaaacctcatgcccggaacctgccaccacaacggcggcagccagcactgggccctgccctttgcacgtaaatgtagaggtcagcagcggaaactcagaggtcgaagaccgacctcaggaccccctggccagattgcggcacaaggagctccagatggagcaggtgtaccacgggctgatggagagatacctctcggtgaaatccctacctgaagccatgagaatggaggaggaagaggaaggggaggaggaggaggaggaagagggggggggcgacagcttggaggtcgacggcgtcgcagcaacgcctggaaaagcagaagcaacccgtgtgcttccccgacagtgtcccgtccaagcagaaaagtctcacggtgctcccttggaggaggctacagaaaaaatggtgagcatgaaaccgccggggtttcaagcaagcttagccagagacggtcacatgagcggcttgggtaaggccgaagccgcccctccgggtccaggggtgccccctcacccccctggcactaaaagcgctgcctcccaccaatcctcaatgacatccttggagggctcaggcatctccgaacgacttccccaaaaaccgctccacagaggggggggaccccaccttgaggagacctggatggcttcacctgagactgatagcggattcgttggaagcgagaccagcagagtgtcgccgctcactcagactcccgagcaccgtctttcccatatctccacagcagggaccctggcacagcccttcgcggcctcggtgcctagggatggagccagttatcccaaggccagaggcagcctaattccaagaagagcgactgaaccatccactccgcgctcgcaggcacaaagatatctctcctcacccagtggcccattaagacagagggcaccgaacttctccttggagcgcacccttgcagccgagatggcggtgccgggatccgaattcgaaggtcataagcgaattagcgagcagccacttcctaacaaaacaattagccctccacctgctcctgccccagccgccgcgccccttccttgcggccccactgaaacgatcccatcattcctccttacaagagccggtcgcgaccaagccatctgtgagttgcaggaagaggtctctagactacgccttcgcttggaagatagtctgcaccaacctctccagggatcacctacccggcccgctagtgcattcgatcgacctgcccggaccagaggtaggcctgcagattctcctgccacgtgggggtctcactatgggagcaagtcgacagaacgcctgcccggggagccgcgtggcgaggagcagattgtgcctcctggaagacagcgggctcgctcatcatctgtccctcgcgaggtcctgcgattgtccctgtccagcgagtctgagctgcctagccttcctctgttcagcgaaaagtctaagaccacaaaagacagccctcaggccgctagagacggcaagcggggagtcgggtcagcaggctggccagaccgagttacgtttagggggcagtacaccggacatgagtaccacgtactcagccccaaggcggtgcccaagggaaacggaactgtgtcttgtccgcattgccgtcccatccgtactcaggatgctgggggcgctgtaaccggagacccactgggaccgccaccagccgataccctgcaatgtccactctgcggtcaggtaggaagccctcccgaggccgacggtcccggctctgctactagtggggcagaaaaagccacaacacgaagaaaagcaagctctacccctagcccaaagcaaaggagtaaacaggccggctcctccccaaggccaccacccgggctgtggtacctggctacagctccaccagctcctgcgccaccggccttcgcctacatctcttccgtacccattatgccctaccctcccgcagccgtctactacgcacccgcagggcccacgtccgcgcagcccgctgcaaaatggcctcccacagcctctcccccaccagcgagacgacataggcactctatccaattggacctaggagatttagaagaactaaataaagccctgtccagggccgttcaagcagctgagtctgtgcgtagcacgactaggcagatgagaagctccctgtccgccgacctccgccaggctcactctctccggggcagctgcctgttctag

SEQ ID NO: 220022 - DNA, 2496 bp, Artificial Sequence
  derived and/or modified sequence
atggccagcagcgagaccgagatccggtgggccgagcccggcctgggcaagggtccgcagcgtagaaggtgggcttgggccgaagataaacgtgacgttgaccgcagtagttctcagtcctgggaagaggagcgccttttccccaacgccacgagcccagagctcctcgaagactttcgactggctcagcagcatctccctcccctagagtgggacccacatccacagcccgacggacatcaggattccgaatctggtgaaacctctggggaggaggcggaagcggaggacgtggactccccagcctcctcacacgagcccctcgcctggctgccccagcagggtcggcagctcgacatgacagaagaagagcctgacggtacgctggggtcgctggaggtcgaggaggctggagaatccagcagcaggctagggtacgaagccggcttgtccctggaaggtcacggcaacacatcacccatggctctgggtcacggccaagcaagaggctgggtggccagtggggaacaggcctcaggtgataaactgtctgagcatagcgaggtcaatccaagcgttgaactctcacccgctcggtcctggagcagcggcacggttagtctggatcatccctcagactcactagactctacctgggagggcgaaacagatggtccccagcccaccgccctagccgaaacattacccgagggacccagccatcacctcttgtcccctgatgggagaaccggtggaagtgtggcgcgcgctaccccaatggagttccaggatagcagtgcccctcccgcccagtcacctcaacacgccactgaccgctggagacgcgagacaactagatttttctgccctcagcctaaagagcacatttggaaacagacaaagaccagtcccaaacctctcccatctcggtttattggaagtattagcccactgaatcctcagcctcgccccactaggcagggccgcccgctgccacggcaaggggcaactctcgctgggagaagctcttccaacgctcccaagtacggacgcggacagcttaactatccattgccggatttttctaaggtcggacccagagtgcggttccctaaggacgaatcttatcgccctccaaaaagccgaagccataatcgcaagccccaggcacctgccaggcctttgatcttcaagtccccagcagagatagtgcaggaagtcctcctatcatctggggaggccgcgctcgccaaagacacaccacctgcccaccccatcaccagggtcccacaggagttccagaccccggaacaggcgactgagttggtgcatcagctccaggaggactatcacaggctactgactaaatacgcggaggccgaaaacactattgatcagctgcgtctgggcgccaaggtgaacctgttctctgatcctccccagccaaaccactccattcacacgggaatggtaccccaaggaaccaaggtgctctccttcactataccccagcctcgttcggccgaatggtggcctggcccagccgaagatccgcaggccagtgccgcctccggttggccttccgcgaggggagatctgtcccccagctctctaactagtatgccaacacttggctggctaccggagaacagagacatcagcgaagaccagtcaagtgccgaacaaacacaggccctcgcttcccaggcttcacagtttctggctaaggtggaaagtttcgaaaggttgatacaggcagggcgcctgatgcctcaggaccaggtcaaaggcttccagcgacttaaagccgctcacgcagcactggaagaggagtatctcaaggcatgccgtgagcagcaccccgcccagccattagccgggtcaaagggcacccccgggagatttgatccccggagggaattagaagcggagatctaccgccttggctcttgcctagaggagctgaaggagcatattgatcagacccagcaagaacccgagccgcctggcagcgattcagctttagacagtactccagccctgccatgcctgcatcagcccacacatctgcccgctccaagcggccaggcaccaatgcctgccattaaaacctcgtgtcccgagcctgccaccactaccgcagcagcaagcacaggaccttgccccctccatgtaaatgtggaggtctccagtgggaactccgaggtggaggataggcctcaggaccctctggctcgactgagacacaaggagctccagatggagcaggtctaccatgggttgatggaaagataccttagtgtgaagagcctcccagaggccatgcggatggaagaggaggaagagggagaagaggaagaagaagaggaggggggcggtgattctctggaggttgacggcgtggcggccactccgggcaaagcagaggctaccagggtgttaccacgccaatgccctgtccaggccgagaagtcccatggcgccccactggaatag

SEQ ID NO: 220023 - DNA, 4320 bp, Artificial Sequence
  derived and/or modified sequence
atggccagcagcgagaccgagatccggtgggccgagcccggcctggggaaagggccccagcgtagacgctgggcctgggccgaagacaaaagagacgtggacagaagcagttcacaatcatgggaagaagaacgcctgtttccgaatgccacctcgcccgaactgctggaagactttaggctggctcagcagcacttgcctcccctggagtgggaccctcacccgcagcctgatggtcaccaggactccgaaagtggagaaacaagtggcgaagaagctgaagcagaggacgtagactcgcccgcatcgagccacgagcccctcgcatggctcccccagcagggacgtcagctggacatgactgaggaagagcccgacgggaccctggggagcctggaggtggaagaggcgggcgagtccagttctcgacttggctacgaagccggtcttagcctggagggtcatggaaatacaagccctatggcactggggcacggacaggcccgcggctgggtggcctcaggggaacaggcctccggcgacaagttaagcgaacactcggaggtcaatccttccgtggaattgagccctgcccgatcttggtcctccggcaccgtatctctggaccatccaagtgacagtcttgattctacgtgggaaggcgagacggacggcccacagccaacagcactggctgaaaccctccctgaaggccccagccaccacttattgagcccagacggtaggacgggaggctccgttgctcgggcaactccgatggagttccaagactccagcgctccccccgcgcaatcgcctcagcatgcaacagatcgatggcgccgggagaccacccgctttttctgtccacagccgaaggagcatatttggaaacagacaaaaacgagtccaaagccattaccttcaagatttatcggctcaatctcaccactaaacccccaaccccgtcccactcgccagggaaggccactcccgcggcagggcgccactctggccggccgctcctcttcaaacgccccgaagtatggaagggggcagcttaactatcctctccctgatttttccaaggtgggacctagggttcgatttcccaaagatgaatcctacagaccccccaagagcaggtctcacaacaggaagccccaggcaccagcccggcctctgatttttaaaagccccgcggagatcgtgcaagaagtgctgctgtcttctggggaggccgctctggcgaaggacacacctccggcccacccaatcacaagggttcctcaggagttccagaccccagaacaggccaccgaactggtacaccagcttcaagaggattaccacagactgctgaccaaatatgctgaggcggagaacacgattgaccagttacggctcggcgccaaggtgaatctgttctccgatccgccccagcctaatcactccatccacactggaatggtgccccaaggcaccaaggtgctctctttcaccataccacagccacgctctgcagagtggtggccagggccagctgaggatccacaggcaagcgctgcgtctggatggcctagtgccagaggggacctctccccaagctccctcacgtccatgcccaccctggggtggttgcccgagaatagggacattagcgaggatcagagctccgcagaacagacacaagctctggcatcccaggcctcccagtttctggcaaaagtggagagcttcgaaagactgatccaggcgggtcgcctgatgccacaggatcaagtaaagggctttcagagactcaaagcggcccacgcagcgttggaggaggagtaccttaaagcgtgtcgggaacagcatccagcacagcctctggctggctctaaaggaacccctgggagattcgacccgcgcagagaacttgaggccgaaatctatagactcgggtcttgtctggaggagctgaaggaacacatcgaccaaacacaacaggaaccggaacccccaggctctgatagcgcactggacagcactccagccctcccctgcttgcaccagcctacacacctcccagccccatcaggccaggctcccatgccggctattaaaactagttgcccagagcccgctacaacaaccgctgccgcatcaaccgggccctgtccccttcacgtaaacgttgaggtcagcagtggcaattccgaggttgaggaccggccccaggacccactggctcgcctgcgccataaggaactccaaatggagcaagtttatcatggtctgatggagagatacctgtctgtcaaaagccttcccgaagcaatgaggatggaagaagaggaagagggggaggaagaagaagaggaagaaggtgggggcgattcactggaggtggatggggttgcggccacaccaggcaaagccgaggctactcgagtcctcccccgacagtgtcctgtccaggcagaaaagagccacggggcccctttggaggaggctacagagaagatggttagtatgaaaccccctgggttccaggctagcctggcgagagatggtcatatgtccggtctgggaaaagcagaagccgccccgcctgggccaggggttcctccacaccctccagggaccaagagcgccgcaagtcaccagagctctatgacttcactggaggggagcggcatctcagagaggctgccccaaaaacctctgcataggggcgggggcccacatcttgaggagacgtggatggcttctccagagacagacagtggtttcgtagggtcagagacctctcgagtgtcccccctgacacagacgcccgaacaccgcctctctcacatctctaccgctgggaccctcgcacagccattcgctgcaagcgtgccgcgagatggggcaagctacccaaaagcccggggatccctaataccacggcgcgcaactgaaccctccaccccaagaagtcaagcccagagatatctctcgtccccatccggacccctgcggcagagggctcctaatttctcgctagagcgcaccctggctgctgaaatggctgtgccagggagcgaatttgaaggacacaagaggatcagcgagcagccccttccgaacaaaactatctcaccaccaccggcgccggctcccgccgcggcgccccttccctgcggccccactgaaaccattccgagcttccttctgactagagctggacgcgatcaggctatctgtgagctgcaggaagaggtgagccggctgcggttgcgactggaggacagtcttcaccagcccctccaggggtccccgacgcggcctgcctccgcgttcgatcgccctgctagaactcggggccgccccgcagacagtcctgccacatgggggtcccactacggaagcaaaagtacggagcggctgccaggggaaccacggggtgaagagcagattgtgcctccggggcggcagcgagcccggtcatcttcagtgcctcgagaagtgctaagactgtctttgtccagcgaatccgaactcccatcattgccccttttctccgagaaatcaaaaacaacgaaagattccccgcaagcagctcgggacggcaagagaggtgtgggatctgcaggctggccagaccgagtgactttcaggggccagtacaccggccatgagtaccatgttctgagtccgaaagccgtcccaaaggggaacgggactgttagttgcccgcactgccgtcctattagaactcaggatgccggcggtgccgttacgggggatcccctggggccacctcccgccgataccctacagtgtcctctgtgcggacaggtgggttctcccccagaggctgatgggcccgggagcgcaacgagcggcgccgaaaaggctaccactagaaggaaggcttccagcacgccatctccaaagcagcgctccaaacaggccggttcatcgccacgacctccccctggcctctggtaccttgcaaccgccccccctgcacccgcaccacctgccttcgcctatataagtagcgtacctattatgccttatcctcccgcagctgtgtattatgccccggccgggccaacaagtgctcagcctgcagccaaatggcctcccaccgcgtctcctccgcccgctagacggcacaggcactccatacagctcgatctgggagatctggaagaattgaataaggcgttgtccagggccgtccaggcagcagaaagtgtccgcagtacgacccgtcagatgcgaagttcattatctgccgacctccggcaggcccactctctacgcggctcttgtctgttctag

SEQ ID NO: 220024 - DNA, 4320 bp, Artificial Sequence
  derived and/or modified sequence
atggcctcatcggaaactgagatccgatgggccgaacctggtttgggcaagggtccccaacgcaggcggtgggcctgggctgaggacaaacgagacgtcgacagatctagctctcagagttgggaggaagaaaggctcttccccaacgccacaagccccgaactcctggaagatttccgacttgcccagcagcatctgcccccattggaatgggatccgcatcctcaaccagatggtcatcaggactctgagtcaggagaaacctcaggagaggaagctgaagcagaagatgttgactcccctgcctctagtcacgagccgttggcctggctccctcagcagggcaggcagctggatatgaccgaggaggaacccgatggtacgttaggatcgctagaggtggaggaggccggagagagttcctctcggctcggctatgaagctggcttatccctggaaggacatggcaacaccagtcccatggccctggggcacggccaggctaggggctgggtggcttctggagaacaggcctcgggagataagctgtccgaacacagcgaagtgaaccctagcgtcgaactgtcccccgctagaagctggtcgtctggtacagtgtccctggatcacccctcggattcactcgatagcacatgggagggggaaacagatggaccacagcctacggcgctggctgagaccctgccggagggacctagtcatcatctgctaagtccagatggcagaactggaggaagcgtcgctcgggctacaccgatggagtttcaagacagcagcgctccgcctgcccaaagccctcaacatgcgacggacagatggcgtagagagactactagattcttctgtcctcaacctaaagagcacatctggaaacagacaaagacttcccccaagcctcttccatctagattcatcgggagcataagtcctttgaacccacagcctcggccaacaaggcaggggagaccacttccaagacagggcgctacactggccggacgctcatcatccaatgcacccaaatacgggcgaggacagctgaactaccccttacccgacttctctaaagtgggaccccgtgtgagatttccaaaagacgagagttataggcctcctaagtcaagaagtcataatcgaaaaccacaggccccagccagaccgctgatctttaagagccctgctgaaatagtgcaggaagtgctcctgtccagtggcgaggccgcactggccaaggatacaccacccgctcaccctatcactagggttccacaagagtttcaaacaccagaacaggcaaccgaactggtacaccagttacaagaggattaccataggctcctgactaagtatgctgaggccgaaaacaccattgaccaactccggctcggcgctaaggtaaacttgttctccgatccccctcagcctaaccactccatacacacggggatggtcccacagggtactaaggtcctcagttttaccattccccagccccgttcggctgaatggtggccaggcccagccgaggatcctcaagcctctgcagcctcagggtggccttctgcacgaggagatctgtccccctcttccctcacttcaatgccaacacttggatggctgcccgagaaccgcgatatctcagaagatcagtcgtctgccgaacagacacaggcgctggcatctcaggccagccaatttctagcaaaggtggagtcatttgaacggcttatccaggccggacgccttatgccccaggatcaagtgaaaggtttccagcgcctcaaggcagcccacgcagcattggaggaagagtatctgaaagcgtgtagagaacaacaccctgcccagcctctggctggctccaaaggaaccccagggaggttcgaccctcgtcgcgaattagaagcggagatttaccgactcggttcctgcttagaagaactgaaggagcatatcgatcaaacccagcaggagcctgagcctccgggatcagattccgccctggactcaacacctgcgttaccgtgcttgcatcagccaactcatctccccgcaccttcaggccaagcaccaatgcctgccattaagaccagctgtcccgaacctgcaactacgaccgcggcagcatccacaggcccatgtcccctgcacgtgaatgtggaggttagctccggtaactccgaggtggaggataggcctcaggatcctctggcacgactgagacacaaggaattgcagatggagcaagtgtatcacgggctgatggaacggtacctgagtgtaaagtctctgccagaggccatgagaatggaagaggaagaggaaggagaggaagaagaagaggaagaagggggtggtgacagcctggaggtggacggcgtcgcagccacccctgggaaggccgaggcgacaagagtcctgccgaggcagtgccccgtccaggctgagaagagtcacggagcgccactggaggaggccactgaaaagatggtgtcaatgaaacctcccggttttcaggctagcctggcccgtgacggccatatgagcggactgggaaaagcagaagccgctccaccgggaccaggtgttccaccgcaccctcccggaaccaaaagcgctgcctcacaccaatcaagtatgacttcactcgaggggagcgggatcagcgaacggctcccacaaaagcctctgcaccggggtgggggaccccacctggaagaaacctggatggcttcacctgagacggatagtggctttgtaggatctgagacttcccgggtctcccccctgacccagacccctgagcatcgattgtcccacatcagtaccgctgggactctcgcccagcctttcgctgcgtcggttccccgagatggcgcttcatatccaaaggctcgaggctcactgattcctagacgtgctaccgaaccttcaacccccagatcacaagctcaaaggtatctgtctagtccgtctggacctcttagacagagagccccaaacttttcacttgagaggacgttggccgcagagatggctgtgcccggaagtgagtttgaggggcataaacgaatcagtgagcaaccccttcccaataagactatcagtccacccccagctccagctcccgctgccgctccactgccttgtggacccacggagactatcccaagttttctgcttactcgcgcaggacgagatcaagctatctgtgaacttcaggaagaggtgtctcggttgaggctgcgcctagaggacagtctgcaccagcctcttcagggcagtcctacaagacccgcttccgcgtttgacaggcccgcacgcacaaggggtaggcctgctgattctccggcaacttggggatctcactacgggagtaagagtacagaaagactgcccggtgaaccccgtggagaggagcagatagtaccaccaggacggcaacgcgcaaggtccagtagcgtgcctcgcgaggtgctgagattatctctgagttcggagagcgagttgccatcgttacctctctttagcgaaaagagcaagacgaccaaggactccccccaggccgcacgtgacggcaaacgcggtgtaggaagtgctggatggccagatcgggtcactttccgaggacaatacactgggcacgagtaccacgtcttgagccctaaggctgtgcccaagggcaacgggaccgtgtcttgtccacactgtaggcccattagaacacaggatgccggtggcgctgtgacgggtgatccacttggcccaccgccagcagacacgctgcagtgcccactttgtggacaggtgggctctccacctgaggcagatgggccaggctctgctacatctggcgcagaaaaggcgacaaccagaagaaaggccagctccaccccgagcccaaagcagcgatccaaacaggcaggaagttcccctagaccccctcccggactttggtatctcgcaacagctccacccgcacctgcgcctcctgcctttgcttacatttcatccgttcctataatgccttatccacccgcagcagtgtactacgcgccagctggccctacaagcgctcagcccgctgcaaaatggccgcctacggccagtcctccccctgcccgaaggcaccgacactcaattcagctggacctgggggacttggaagaactcaacaaagccctcagtcgagccgtgcaggcagccgaaagcgtgcgatctacaacgcggcagatgcgcagttccctgagtgctgacctccggcaggcccactctctccgcggaagttgtcttttttag

SEQ ID NO: 220025 - DNA, 2496 bp, Artificial Sequence
  derived and/or modified sequence
atggcgtctagtgaaactgagatcaggtgggccgagcccggtctgggtaaggggccacagcgaaggcggtgggcctgggctgaagacaagcgcgacgtcgatcggagcagcagtcagtcgtgggaggaagagcgccttttccccaacgctaccagtcccgagcttctggaagacttcaggctggcacagcagcatctgcctcctctcgaatgggacccccacccacaacccgacgggcatcaggatagcgagtcaggcgagacttctggcgaggaagccgaggccgaagacgtcgactccccagcatcaagtcacgaaccccttgcctggctgccccagcagggacggcagctggatatgacagaggaggaacccgacggcacactgggttcgctcgaggtggaagaagcgggtgagagctcctctcgccttggatatgaggctggactgtccctggaaggtcatggaaacacctctcccatggccttaggccatgggcaggctcggggatgggtggccagcggcgagcaagccagtggtgacaaactatcagaacatagtgaggtaaacccaagtgttgagctgtcgcctgccagatcttggtctagtgggactgtgtcattggatcacccatccgattcactggatagcacttgggaaggagagactgatggtccacagccaactgccttggcagaaacgctacccgaggggccatctcaccacttgctctcacctgatgggaggacaggtggctctgtagctcgagcgaccccaatggagttccaagattcaagcgcgccacccgcacaaagcccccagcatgcaacagatcggtggcggagagaaactacacgatttttctgcccccagcctaaggaacatatttggaagcaaactaaaacctccccgaagccactgcctagcaggtttatcggaagtattagccctctaaacccacagcccaggccgacccggcaggggagacccctgccacggcagggcgcaacccttgcagggaggtccagttcaaatgcaccgaaatatggcagggggcagctcaactaccctctaccagactttagtaaggtaggtccgagggtcagattccccaaagatgagagttacagaccccctaagtcacggtcacacaatagaaagccacaggctccagccaggcccctcattttcaagtcaccagccgaaatcgttcaagaggttctgctgtctagcggtgaggccgctctcgctaaggatacgccgcctgcgcatcccatcaccagggtgcctcaggaattccagacacccgagcaagctaccgaactggtgcaccagctccaagaggactatcataggctgctcacaaaatatgcggaggctgagaatactatcgatcagttacgattaggggctaaagtgaacctcttctcggatcctcctcagcctaaccactcaattcacactgggatggtgcctcagggcaccaaggttctatctttcacgatccctcagccaaggtcagcggagtggtggcccggacccgcagaagacccgcaagctagcgccgcttcaggttggccttccgcaagaggcgatctgagcccatcctctctgaccagcatgccaacgctgggctggctgcccgagaaccgagacatcagcgaggatcagagctccgcagaacagacgcaagcgctcgcctcccaggcctctcagtttctggctaaggttgagtcttttgaaaggctgatccaggctggtcgcctgatgcctcaggaccaagtgaaagggttccaaagactgaaggcagcccacgcagctctggaggaggagtaccttaaagcctgccgggaacagcatcctgctcagcctttagctggttcaaagggtactccaggtaggttcgaccctcgccgagagttagaggctgaaatctacaggctgggctcttgcctggaagaattaaaagagcatatcgatcagacacaacaagagcccgagcctcctggcagcgattcagctctcgattctactccagctttgccatgcttgcaccagcccactcatctccccgcaccttccggtcaggctccaatgcccgcaataaaaacgtcctgccctgagccggctaccaccacagctgccgctagcacggggccttgcccgctgcacgtgaacgttgaggtgagcagtggtaatagtgaagtagaagatcggcctcaagatcccctggctcgcctgcgccataaggagctgcagatggagcaggtgtatcacggattgatggagcgatacctgagtgtaaagtcgttaccagaggctatgagaatggaggaggaggaggaaggcgaggaggaagaggaggaggagggcggaggggatagcttggaagtggacggagtggcggcaacccccggaaaggcggaggctacgagggtattgcctcggcagtgcccagtgcaggcggaaaaaagtcatggcgctccgctggaatag

SEQ ID NO: 220026 - DNA, 1218 bp, Artificial Sequence
  derived and/or modified sequence
ctgaacctatgtctctccatttttctcaccccggcatgttatcaccactgtcgtcgacaacactggccgctccctatcgccaggaaatgcggtgccgttccgggaagtgagttcgaaggacacaaaagaatcagcgagcaaccacttcctaacaagacaattagccctcccccagcgccagcccctgcagccgcacctctgccctgtggtcctactgaaacaatcccttccttcctgttgacgagagcgggtcgggaccaggcaatttgtgaactgcaggaagaggtcagtaggttgagattgagactcgaagacagcctgcatcagccgctgcaggggagcccaactcgccctgcgagtgctttcgaccggccagcacgcacgcgaggcaggcccgctgactcccctgccacgtggggctctcactacggctctaagtcaaccgagaggctgcccggtgaacctcggggagaggaacagatcgttcccccaggcaggcaaagagccagatcttcatctgtgcccagagaagtgttacgcctttcattatcatccgagagtgaacttccctcacttccactcttcagcgagaagagtaaaactaccaaagatagccctcaggctgctcgggacggcaaaagaggagtgggttcggctggatggccagaccgggttaccttccgtggtcagtatacaggacatgagtatcatgtccttctgcgtcggtcacagaaggcaatggcccagagcccagtgcctaccgccggaccactaggtcctcgtatgcgtgtggtgctgtcacaggggacccactgggatcgtctgccccttattccgttctcagtcccttgcgtggttaagctcgggctgccacaaagacagatggtgcaggcccagccccctttgggtcagcggaggccccctagaggcgagaagcacttacagttgcccgctcccagtcgcggtgcctcccgccgtggccgacgtcatgcgcatccgcctgactgcggaatctggcagcagaggccacagcaccaacccttgcagcctttgcccacatccccgagatttccaagttgcctcatccaccttcccctgtgcacaatgcgcctgcaggatctaccgcaaccgaatcagttgccttccggtagaccccagccactcccacatcagccaggagacaccggaacccctagttcgagtacttgggctacatag

SEQ ID NO: 220027 - DNA, 4320 bp, Artificial Sequence
  derived and/or modified sequence
atggcttcctccgaaacagagatacgctgggccgagcctggcctaggcaaaggcccacagcgccgtcgctgggcctgggccgaagacaagcgtgatgtggatcgatctagctcacaatcatgggaggaagagcgactgtttccaaatgccacctcaccggaactgctggaagattttagactggctcagcagcacctgccacctttggaatgggacccccacccccagccggacggacaccaggattccgagagcggggagacttctggggaagaggcagaggccgaagacgttgatagccccgcttcctctcatgagcccctggcatggttgcctcagcaaggacgtcagctggacatgactgaggaagagccagatggaacgttgggaagcctggaagtggaagaggccggagagagtagttcaagactgggctacgaggccggtctctccttggaggggcatggcaacacctcgccgatggcactcggtcatggacaagcgcgtggctgggtggcatctggcgagcaagcctccggagacaaattatcagaacattccgaggttaatccttcagtcgagctgtctcccgctagatcatggtcgtcaggcacagttagtctggatcacccgtctgatagcttggactccacttgggagggagagacggacggacctcagcccaccgcactcgcagaaaccctcccagagggcccttcgcaccacctgctctccccggatggtagaacaggcggatccgtggccagggctacgcccatggagtttcaggactcgagcgccccacctgcccagtcaccccagcatgccactgatcgatggagacgagagactacaagattcttttgcccacagccaaaggagcatatctggaagcagacaaaaacctcacctaagccccttccttccagattcattggtagtatctctccactgaaccctcaaccaagacctactcgacagggacgacctcttcctcggcaaggtgccacgctggcaggacggagcagctcaaatgctccaaagtatggcagagggcagttgaactatcccctccccgacttttctaaagttgggccacgggtgcggtttccaaaggatgaaagctaccgtccacccaagtcacgctcacacaatagaaagcctcaagctccagcccgaccactgatcttcaagtctcctgccgagattgttcaggaagtgctcttgtcgagtggggaggctgccctggcgaaggatacacctcccgcacatccgatcacaagagtgccacaggagttccagacacccgagcaggcaacagaactggtgcaccagctgcaggaggactaccaccgtctgctaacaaaatacgccgaggctgaaaacactatcgaccagttacgccttggggcaaaagttaacctgttttccgaccctccacagcctaatcattcaatacacaccggtatggtcccacaggggaccaaggtgttaagctttacaattccacagcctcgttcagctgaatggtggcctggtcccgcagaggacccacaagctagcgctgcctcgggctggccctcagcgcgtggcgacctaagtccttcgtcattaactagcatgcccacccttggatggctgcccgagaaccgcgacatctctgaagatcagagttccgccgaacagacccaggctttggcgtcccaagccagtcaatttctggctaaggtggaaagctttgagaggctgatacaggctgggagactaatgccacaagatcaggttaaggggttccaacgtttgaaagcggcacacgcggctctggaagaagaatatctgaaagcttgccgagaacagcaccctgcacagcctcttgccggatccaaagggactccaggtaggtttgatccgagaagggagttggaggccgaaatatataggttgggctcctgtctggaggagctgaaagagcacatagatcagacccaacaggaaccagaaccgccaggaagtgacagtgctttagacagcaccccagcattgccttgtcttcatcagccaactcacctgcctgcaccctcaggtcaggcccctatgccggctatcaagacgtcttgccccgagcccgctacaacaacagctgccgcaagcactggtccctgccctttacacgtgaacgttgaggtttctagcggtaactctgaagtggaagacagaccccaggatccacttgcgaggctccgacacaaggaattgcagatggaacaggtttaccacgggcttatggagaggtacctgagcgtcaaatctctgcctgaggctatgcggatggaggaagaagaggaaggagaggaagaggaagaagaagagggaggcggtgattctctggaagtcgacggcgtggccgctacccctggaaaagccgaagcaacaagagttctgcccaggcaatgccctgtgcaggccgagaagtctcatggcgcaccccttgaggaggcgacagagaaaatggtgagtatgaagcccccagggtttcaagcaagcctagctcgagatggacacatgagtggtctcggaaaagctgaagccgctccgcctggacctggagtgccacctcaccctcctggcaccaaatccgcggcttcacaccaaagcagcatgacatcgctggaaggtagcggaattagtgaacgcttaccacaaaaacctctgcaccggggtgggggaccccatctggaggaaacttggatggcgagtccagaaaccgattccggatttgtcggctctgagacgagcagggtcagcccactgacccagactcccgagcatcgactgtcccacatttccacagcaggcactctcgcccagcctttcgccgcaagcgtgcccagagatggtgcatcctaccctaaggccaggggtagccttatcccgaggagagcgaccgagccctcaacccctcgctcccaggcacaacgctatctaagcagcccctcaggtccactgaggcagagagcacctaacttctcacttgagagaaccctggcagccgagatggccgtgcccggaagcgagttcgaaggccacaagcgaatctctgaacaacctttacctaataagaccataagtcctccgccagccccagcccctgctgctgctcccctgccctgcggacccacagaaacaatcccttcattcctgctgacccgggctggccgagatcaggcgatttgtgagttgcaggaggaggtgtcccgcctgagacttcgcctggaggactccctgcatcagcccctgcaggggtcacccacccggccagcctccgcatttgacagaccggcaagaactcgaggcaggcccgctgactcgcctgccacatggggcagccattacggatccaaatcaaccgagcgcctcccaggggagccacgcggagaagagcagatagttccaccgggaagacaaagggcaagaagtagttccgtgccaagggaggtcctaaggctgtccctttcctcagagtctgaactaccctcactgccacttttttctgagaagagcaagaccaccaaagacagcccacaagccgcaagagatggcaagcggggagttggctcagccggatggccagatagagtcactttccggggacagtacaccgggcatgaatatcatgtgctgtcaccaaaagcagtgcccaagggtaacggcactgtgagctgccctcattgccggccaatccgtacccaggatgcgggaggagcagttaccggagatccacttggaccaccaccggcagacacccttcaatgtccgctttgcggccaggttggatccccacccgaagccgacgggcctggctcagcgacatctggcgctgaaaaagcaaccacacgtcggaaggcctcctctaccccatcccccaaacagaggtctaagcaggctgggagctccccaaggccccctcctggcctgtggtaccttgccactgcaccccctgcgcctgcccctcccgcattcgcttatatcagtagcgtgcctataatgccatatccacccgcagccgtctactacgccccagctgggccaaccagtgctcaaccagcagcaaagtggccccctaccgcctcccctccccctgccaggcggcatagacatagcatacagttggatcttggcgacctggaggaactgaacaaagccttgagccgggcagtgcaggcagcagagtcagtgcggagcactacgaggcaaatgaggtcttccctctctgccgacctccggcaggcccacagcttgcggggaagttgtctgttttag

SEQ ID NO: 220028 - DNA, 7380 bp, Artificial Sequence
  derived and/or modified sequence
gcaactgaagacggaggtgcccaaggtcagaaggaagcaccacacagagggcacaggcaggatggccgatgctgacaggaaccagcggtgactctggggcccctggcagcagctctgtctcctgaagatgaagtggcccaggtgaagcccaggccagccccaatggccagctcggagactgagatccgctgggctgagcctggcctggggaagggcccccagcggcggcgctgggcctgggccgaggacaagagggatgtggatagaagtagttcacaaagctgggaagaagagagactctttcccaatgccaccagccccgagctcctagaggacttccgcctggcccagcagcacctgccgcccctggagtgggacccacacccgcagcccgatgggcatcaggattccgagtcaggagagacttcgggagaagaggctgaagcagaggatgtggacagcccagcaagttcccatgagcctcttgcctggctcccccagcagggccgtcagctggacatgactgaagaggagccagatgggaccctcggaagtctggaggttgaggaggctggagagagctcctcaaggttggggtatgaggctggtctcagcttggaaggccatggaaacaccagccccatggctcttgggcatggtcaggccaggggctgggtggcttctggcgaacaagccagtggggacaaactttctgaacattccgaggtcaacccatccgttgaactcagcccggcaaggtcctggagcagtgggacagtgagcctcgaccaccctagtgacagccttgattctacctgggaaggagagaccgatggcccccagcccactgccctggcagaaaccttgccagagggccccagccaccacctcctaagcccagatggcagaactggaggcagtgttgctcgggcaacccccatggaattccaggactcctcagctcccccagcccagagtccgcagcatgccacagatagatggaggagagaaacgaccagattcttctgccctcagcccaaggaacacatctggaagcagacaaagacgtcacctaagccactcccttcccgattcattggctccatcagccccctgaatccccagcccaggccaacgcggcagggcaggccgctgcccagacagggagccactctggctggccgctcctcttctaatgcccccaagtatggccgggggcagttgaactacccactccctgatttctccaaggtagggccccgggtgagattccccaaagatgagagctaccgtccccccaagtccagaagccacaacaggaagcctcaggcccctgccaggcccctcatcttcaagtctccagctgagattgtgcaggaggtgctgttgagcagtggagaagcagccctggcaaaggacacgcctcctgcccaccctatcaccagggtaccccaagaatttcagacgcctgagcaagccactgagctggtccatcagctccaggaagactaccacaggctcctcaccaagtacgctgaggccgagaacaccattgaccagctacgcctcggggccaaggtgaacctgttctctgacccaccccagcccaaccacagcatccacacgggaatggtgccccaggggaccaaggtcttgtccttcaccatcccacagccccgctctgcagagtggtggccgggcccggccgaggacccccaggcctctgcggcctcagggtggccatcagctcgaggagacttgagcccctcctcgcttaccagcatgcccaccctggggtggcttccggagaaccgggacatctctgaggaccagtcctcagcagagcagacccaggcactggcttctcaggccagccagttcctggccaaggtggagtcctttgaaagactgatacaggcaggacgtctcatgccccaggaccaagtcaagggcttccagcggctgaaggctgcccacgcggccctagaggaggagtacctgaaggcttgtcgggagcaacaccctgcccagccgcttgccggctccaaggggacgcctggaagatttgatcctcgcagggagctggaggcagagatataccgtctgggaagctgcctggaagagctgaaggaacacatagaccagacccagcaagagcctgagccgcccgggtcagactcagctctggacagcaccccagccctgccctgcctccatcagccaacgcacctgcctgctccttctggacaagcccccatgccagccatcaagacctcctgccctgagcctgctaccaccactgccgccgccagcactggcccctgcccattgcacgtaaatgtggaggtgagctctggcaacagtgaggtggaggacaggccacaggaccccctggcccgactcaggcacaaggagctgcagatggagcaagtttaccatggcctcatggagcggtacctcagtgtgaagtctctcccagaagccatgagaatggaggaggaggaagaaggagaggaggaggaggaggaagaggggggaggtgactccctggaagttgatggggtggctgcaactccagggaaagcagaggccaccagggtcctcccaaggcagtgcccggtgcaggctgagaaaagtcatggggctcccctggaggaggccacggagaagatggtatctatgaagccaccaggtttccaggcatccctggctagagacgggcacatgtcaggcctgggcaaggctgaggcagcccctccaggccctggcgtgccaccccaccctccaggcaccaagtccgcagcatcccaccaaagtagtatgaccagcctggagggaagcggcatctctgagcgccttccacagaagcctttgcaccgaggcggtgggccccacctggaggagacctggatggcgtccccagagacagacagtggctttgtgggctcagaaacaagcagagtttcacccctcacccagactccagagcaccggctctcccacatcagcacagcaggaacattagcccagccctttgctgcatctgtgcccagggatggagcttcctaccccaaggccaggggttctctgattcccagaagagccacagagcccagcacaccccggagccaagcacagaggtacctctccagcccaagtgggcctctccggcagagggcacccaacttcagcctggagcggacactggcagccgagatggcggttcctggctcagagtttgaggggcacaaacggatttctgaacagccccttcccaacaagacaatcagcccacccccagcccccgcccctgccgctgcgcctctaccctgtggaccaacagagaccatccccagcttcctgctcaccagggcagggcgagaccaggccatctgtgagctgcaagaagaggtgtcccggcttcgtctgcggctggaagacagcctgcaccagccactccagggcagcccgacacgcccagcatctgcctttgaccgccccgcccggacccgcggccggccagcagactccccagccacctggggctcccattatggcagtaaatccacagagagattgcctggtgagcctagaggtgaagagcagattgtccctccaggaaggcagcgagccaggtcttcctcagtgcctcgggaggtgctccgactgtccctgagttcagaatctgagctgccctccctaccactgttctctgagaagagcaagaccaccaaggacagtccacaggcagctcgggatggaaagagaggggtgggcagtgctggatggccagacagggtcaccttccggggccaatacacaggccacgaataccatgttctgtcccctaaggcggtcccaaaaggcaatggcacagtctcctgtccccactgccggcccattaggacccaggatgcgggtggtgctgtcacaggggacccactgggaccgcctcccgctgatacccttcagtgtcccctgtgtggtcaagttgggtctcccccagaggcagatggtccaggctcagccacctctggggcagagaaggccaccacgaggagaaaagcatcttcaactcccagccccaagcagaggagcaagcaggcggggtcgtcgccacgcccaccccccggactgtggtatctggcaacagcgcccccagcaccagcccctccagcctttgcctacatctcctcggttcccatcatgccttatccacctgccgctgtgtactatgcgcctgcaggacctacctcagcccaaccagctgccaagtggccgcccacagcctctcccccaccagcccggagacaccggcactccatccagctcgacctgggcgacctagaggagctcaacaaggccctgagccgggccgtgcaggctgccgagagcgtccgctctaccaccaggcagatgagaagctcgctgtcagccgacctgcgccaggctcacagcctgcggggctcctgcctcttctgacttcactgggggcccagaggcagatgggtgggtgggtgggcaggtggcctgccaggccaggagtgggctggagctgctgaggcccagaaggcccgcatagttcctcaccaggagggtctccctccagcacaggtcccgcctgctcagtccctgtgctttccaagtggagggggtgtcagctcggtcaccaagagaagtgacttcccaggagcaccagtcccctcacagaggtgctgtgagcgaggcctccttcggtccaggcagaacctcaggcagtctctcctggtcctgcatgtgtgcaactccagctaataataggtattttatatacagatggacagatatttttttaaactggggagttttcctgatcttgggtcctctttagggggccagacaagaaaggcctacggtttctggagcaaacctgtcccccacctgtgaccagtcactctggggcaagcatcactgggaagggcatagccggagacctttctcctagtgactggtagtcagtggggcattttaggatgtcagggccccagggtgacatgtgtccagcttttctatggcagcagaggcctttccctcagacaagctacaaagtgcccaggatgccatccaccatggtccccttcagtacctcacgcatggtccccagcttctcctaggatcccagtggcgtttatcagtggccagctacctgccaggcccgggctggggcacggtctgcggccatgaggccaggccgcctcccgcacccctaccccgtggcagcagcatacctctgcatttctggaatgtgtgtgcatcaatgatgtttgtatatttgaggcatttaaaaatctattttcgttacgagggcaaatgaagaatgaatattgatcttaaaaaaagaaaagaagacaaaaaaaatacccaaagccatccgtgtctctgctgtatgtcattaacttttgccttcaatgtcaagtttatggggtggtaggtttgatgcccagccaagccctttcccaggggacctgttgggtgctctgcctgcctccctctggtggcttctgtttctccagttttccccctttgcctatctcagaaccataaatctttcaactgcggagggccttgaggtggggctgcctagccaagtcccttttgactgaggccagagatgtaaatgaggcacacagcaagttgctgtctacaagagtatgcacctggactctccagtgctcctttctttcttttttttttcttttttctttttctttttttttttttttttgagactgagttttgctctggttgcccaggctggggtacagtggtggaatctcggctcactgcaacctccgcctcccgggttcaagtgattctcttgcctcagcctcccgagtagctgggattacaggcatgcaccaccacgtctggctaattttgtatttttagtagagacagggtttctccatgttggtcgggctgatcttgcactcccagcctcaggtgatccacccacctcagcctcccaaattgctgggattacaggcgtgagccatggcgcccagccttccagtactttcagtagcaaacagcacctgccatttagggagcacctgctagaccctgattccggtgctaagcactgggcattgtctgcttcacacagtccatgtgctaaccctcaggaccctcactctgccccccttttactgatgaggagagtggggttccaatgggccatctgcccaaactggtttgggagagaacctggatttaaactcacattggtctgacccaaagtccacattctttgttatgtgtgttttttgcttcctctacctccatgattctttttctcttgacctctggtttcttcctcacgtggctttttcttccatgttccccacttctcgtctcccttgcttctccctgctctgcccatcatgactcatttctgtttcatttttcagcggatcctcctgagtatggttgaaaatggtgtctcactgaaagtaacactgaaatggacaaacttcctgtaggttctgagccttcagttccaggacattgtgggaccccagaggctgtcctgtccacttgccttctgaggacatcagctcggtgtccccagcctccgtgctgtgggcacagctgtggtttgggtgctgagcaaaggatgctgtagtcttggccctgtggagcttggctgttgggacaggaggtacaaaggggagtggtgcctgtggacacaggactagaccccaggacatcagggcctcgggctcatggtcctatcaccctggatggtatacgcagctgcacacgtggaattgctcaaacaattcaggcccaacttttctgccacggaaggggtgctgcttccctcacgtaacaagaggctgtcaatcacgagcacccaggttggggtgaggccggccctttgtggcttgtgccactgagtgggctgtgcctcgggcttggctccacctcagggctccacatttgcaggatgtcagctgatttccagggaccagcctcacccttacgtgttatctccttcttctgggtctcccaggtgagcaccctaagaacacatccatggagacacccagcccctctggcctgggccccaagccctctgcatcaccccagcccttccctgccctgccctgtcctggcccaggcaaccgcctcttgcctagttgcccacagcagccttcactcaggccttcctgcctccagcctggtccccacaacgtgcctcccccgatggccatggtaatactggaataaggtccttgtgataggcaccacatgcctgaactctccccaccccatccaccttgtatttgtctgttctcacattgctataaagaactacctgagactgggtagtttatg

SEQ ID NO: 220029 - DNA, 3334 bp, Artificial Sequence
  derived and/or modified sequence
ggctgggcgcttcctgccgaggcgaggcggcctcaaccacggcaggggcggggagaggtggggagcgatgctggtctgtgagcagcagcttgggctggcagaacggcctggaggtgggccagggcgcaatggagacagggggctccctgggtttggaacaaagaattcacaggcaggtcccctgaaactgggtcggcaggacggtggtggagcccgagagagggcacaggcaggatggccgatgctgacaggaaccagcggtgactctggggcccctggcagcagctctgtctcctgaagatgaagtggcccaggtgaagcccaggccagccccaatggccagctcggagactgagatccgctgggctgagcctggcctggggaagggcccccagcggcggcgctgggcctgggccgaggacaagagggatgtggatagaagtagttcacaaagctgggaagaagagagactctttcccaatgccaccagccccgagctcctagaggacttccgcctggcccagcagcacctgccgcccctggagtgggacccacacccgcagcccgatgggcatcaggattccgagtcaggagagacttcgggagaagaggctgaagcagaggatgtggacagcccagcaagttcccatgagcctcttgcctggctcccccagcagggccgtcagctggacatgactgaagaggagccagatgggaccctcggaagtctggaggttgaggaggctggagagagctcctcaaggttggggtatgaggctggtctcagcttggaaggccatggaaacaccagccccatggctcttgggcatggtcaggccaggggctgggtggcttctggcgaacaagccagtggggacaaactttctgaacattccgaggtcaacccatccgttgaactcagcccggcaaggtcctggagcagtgggacagtgagcctcgaccaccctagtgacagccttgattctacctgggaaggagagaccgatggcccccagcccactgccctggcagaaaccttgccagagggccccagccaccacctcctaagcccagatggcagaactggaggcagtgttgctcgggcaacccccatggaattccaggactcctcagctcccccagcccagagtccgcagcatgccacagatagatggaggagagaaacgaccagattcttctgccctcagcccaaggaacacatctggaagcagacaaagacgtcacctaagccactcccttcccgattcattggctccatcagccccctgaatccccagcccaggccaacgcggcagggcaggccgctgcccagacagggagccactctggctggccgctcctcttctaatgcccccaagtatggccgggggcagttgaactacccactccctgatttctccaaggtagggccccgggtgagattccccaaagatgagagctaccgtccccccaagtccagaagccacaacaggaagcctcaggcccctgccaggcccctcatcttcaagtctccagctgagattgtgcaggaggtgctgttgagcagtggagaagcagccctggcaaaggacacgcctcctgcccaccctatcaccagggtaccccaagaatttcagacgcctgagcaagccactgagctggtccatcagctccaggaagactaccacaggctcctcaccaagtacgctgaggccgagaacaccattgaccagctacgcctcggggccaaggtgaacctgttctctgacccaccccagcccaaccacagcatccacacgggaatggtgccccaggggaccaaggtcttgtccttcaccatcccacagccccgctctgcagagtggtggccgggcccggccgaggacccccaggcctctgcggcctcagggtggccatcagctcgaggagacttgagcccctcctcgcttaccagcatgcccaccctggggtggcttccggagaaccgggacatctctgaggaccagtcctcagcagagcagacccaggcactggcttctcaggccagccagttcctggccaaggtggagtcctttgaaagactgatacaggcaggacgtctcatgccccaggaccaagtcaagggcttccagcggctgaaggctgcccacgcggccctagaggaggagtacctgaaggcttgtcgggagcaacaccctgcccagccgcttgccggctccaaggggacgcctggaagatttgatcctcgcagggagctggaggcagagatataccgtctgggaagctgcctggaagagctgaaggaacacatagaccagacccagcaagagcctgagccgcccgggtcagactcagctctggacagcaccccagccctgccctgcctccatcagccaacgcacctgcctgctccttctggacaagcccccatgccagccatcaagacctcctgccctgagcctgctaccaccactgccgccgccagcactggcccctgcccattgcacgtaaatgtggaggtgagctctggcaacagtgaggtggaggacaggccacaggaccccctggcccgactcaggcacaaggagctgcagatggagcaagtttaccatggcctcatggagcggtacctcagtgtgaagtctctcccagaagccatgagaatggaggaggaggaagaaggagaggaggaggaggaggaagaggggggaggtgactccctggaagttgatggggtggctgcaactccagggaaagcagaggccaccagggtcctcccaaggcagtgcccggtgcaggctgagaaaagtcatggggctcccctggagtaagtcactgagcctttcctgcagaatgtttgtttccaccctaaaaccacagggatgatcactgtcagagtgaataagacagcgcttcacagtttagacatggcttacctgtcctgcctcttcaagtgtggaatgtataccactgatagcccttgaaatgattttgggtagtgtgggacatgattttcagtaggacacatgcagtattaaagaacattattctcagctgggcacagtggctcatgcctgtaatcccagcattgagggaggccaaggcaggtggatcacttgagtccaggagttcaagactagcctgagcaaaacggcaaagccccatctcaacaagaaatacaaaaattagccaggcatggtggtacacgcctatagccctagctatttgggaggctgaagcaggtgaatctcttgagcccaggaggcggaggttgcagtgagctgagatcgggccactgcactccagcctgggtgatagtgtgagaccctgtctc

SEQ ID NO: 220030 - DNA, 5464 bp, Artificial Sequence
  derived and/or modified sequence
ccagggcgcaatggagacagggggctccctgggtttggaacaaagaattcacaggcaggtcccctgaaactgggtcggcaggacggtggtggagcccgagagagggcacaggcaggatggccgatgctgacaggaaccagcggtgactctggggcccctggcagcagctctgtctcctgaagatgaagtggcccaggtgaagcccaggccagccccaatggccagctcggagactgagatccgctgggctgagcctggcctggggaagggcccccagcggcggcgctgggcctgggccgaggacaagagggatgtggatagaagtagttcacaaagctgggaagaagagagactctttcccaatgccaccagccccgagctcctagaggacttccgcctggcccagcagcacctgccgcccctggagtgggacccacacccgcagcccgatgggcatcaggattccgagtcaggagagacttcgggagaagaggctgaagcagaggatgtggacagcccagcaagttcccatgagcctcttgcctggctcccccagcagggccgtcagctggacatgactgaagaggagccagatgggaccctcggaagtctggaggttgaggaggctggagagagctcctcaaggttggggtatgaggctggtctcagcttggaaggccatggaaacaccagccccatggctcttgggcatggtcaggccaggggctgggtggcttctggcgaacaagccagtggggacaaactttctgaacattccgaggtcaacccatccgttgaactcagcccggcaaggtcctggagcagtgggacagtgagcctcgaccaccctagtgacagccttgattctacctgggaaggagagaccgatggcccccagcccactgccctggcagaaaccttgccagagggccccagccaccacctcctaagcccagatggcagaactggaggcagtgttgctcgggcaacccccatggaattccaggactcctcagctcccccagcccagagtccgcagcatgccacagatagatggaggagagaaacgaccagattcttctgccctcagcccaaggaacacatctggaagcagacaaagacgtcacctaagccactcccttcccgattcattggctccatcagccccctgaatccccagcccaggccaacgcggcagggcaggccgctgcccagacagggagccactctggctggccgctcctcttctaatgcccccaagtatggccgggggcagttgaactacccactccctgatttctccaaggtagggccccgggtgagattccccaaagatgagagctaccgtccccccaagtccagaagccacaacaggaagcctcaggcccctgccaggcccctcatcttcaagtctccagctgagattgtgcaggaggtgctgttgagcagtggagaagcagccctggcaaaggacacgcctcctgcccaccctatcaccagggtaccccaagaatttcagacgcctgagcaagccactgagctggtccatcagctccaggaagactaccacaggctcctcaccaagtacgctgaggccgagaacaccattgaccagctacgcctcggggccaaggtgaacctgttctctgacccaccccagcccaaccacagcatccacacgggaatggtgccccaggggaccaaggtcttgtccttcaccatcccacagccccgctctgcagagtggtggccgggcccggccgaggacccccaggcctctgcggcctcagggtggccatcagctcgaggagacttgagcccctcctcgcttaccagcatgcccaccctggggtggcttccggagaaccgggacatctctgaggaccagtcctcagcagagcagacccaggcactggcttctcaggccagccagttcctggccaaggtggagtcctttgaaagactgatacaggcaggacgtctcatgccccaggaccaagtcaagggcttccagcggctgaaggctgcccacgcggccctagaggaggagtacctgaaggcttgtcgggagcaacaccctgcccagccgcttgccggctccaaggggacgcctggaagatttgatcctcgcagggagctggaggcagagatataccgtctgggaagctgcctggaagagctgaaggaacacatagaccagacccagcaagagcctgagccgcccgggtcagactcagctctggacagcaccccagccctgccctgcctccatcagccaacgcacctgcctgctccttctggacaagcccccatgccagccatcaagacctcctgccctgagcctgctaccaccactgccgccgccagcactggcccctgcccattgcacgtaaatgtggaggtgagctctggcaacagtgaggtggaggacaggccacaggaccccctggcccgactcaggcacaaggagctgcagatggagcaagtttaccatggcctcatggagcggtacctcagtgtgaagtctctcccagaagccatgagaatggaggaggaggaagaaggagaggaggaggaggaggaagaggggggaggtgactccctggaagttgatggggtggctgcaactccagggaaagcagaggccaccagggtcctcccaaggcagtgcccggtgcaggctgagaaaagtcatggggctcccctggaggaggccacggagaagatggtatctatgaagccaccaggtttccaggcatccctggctagagacgggcacatgtcaggcctgggcaaggctgaggcagcccctccaggccctggcgtgccaccccaccctccaggcaccaagtccgcagcatcccaccaaagtagtatgaccagcctggagggaagcggcatctctgagcgccttccacagaagcctttgcaccgaggcggtgggccccacctggaggagacctggatggcgtccccagagacagacagtggctttgtgggctcagaaacaagcagagtttcacccctcacccagactccagagcaccggctctcccacatcagcacagcaggaacattagcccagccctttgctgcatctgtgcccagggatggagcttcctaccccaaggccaggggttctctgattcccagaagagccacagagcccagcacaccccggagccaagcacagaggtacctctccagcccaagtgggcctctccggcagagggcacccaacttcagcctggagcggacactggcagccgagatggcggttcctggctcagagtttgaggggcacaaacggatttctgaacagccccttcccaacaagacaatcagcccacccccagcccccgcccctgccgctgcgcctctaccctgtggaccaacagagaccatccccagcttcctgctcaccagggcagggcgagaccaggccatctgtgagctgcaagaagaggtgtcccggcttcgtctgcggctggaagacagcctgcaccagccactccagggcagcccgacacgcccagcatctgcctttgaccgccccgcccggacccgcggccggccagcagactccccagccacctggggctcccattatggcagtaaatccacagagagattgcctggtgagcctagaggtgaagagcagattgtccctccaggaaggcagcgagccaggtcttcctcagtgcctcgggaggtgctccgactgtccctgagttcagaatctgagctgccctccctaccactgttctctgagaagagcaagaccaccaaggacagtccacaggcagctcgggatggaaagagaggggtgggcagtgctggatggccagacagggtcaccttccggggccaatacacaggccacgaataccatgttctgtcccctaaggcggtcccaaaaggcaatggcacagtctcctgtccccactgccggcccattaggacccaggatgcgggtggtgctgtcacaggggacccactgggaccgcctcccgctgatacccttcagtgtcccctgtgtggtcaagttgggtctcccccagaggcagatggtccaggctcagccacctctggggcagagaaggccaccacgaggagaaaagcatcttcaactcccagccccaagcagaggagcaagcaggcggggtcgtcgccacgcccaccccccggactgtggtatctggcaacagcgcccccagcaccagcccctccagcctttgcctacatctcctcggttcccatcatgccttatccacctgccgctgtgtactatgcgcctgcaggacctacctcagcccaaccagctgccaagtggccgcccacagcctctcccccaccagcccggagacaccggcactccatccagctcgacctgggcgacctagaggagctcaacaaggccctgagccgggccgtgcaggctgccgagagcgtccgctctaccaccaggcagatgagaagctcgctgtcagccgacctgcgccaggctcacagcctgcggggctcctgcctcttctgacttcactgggggcccagaggcagatgggtgggtgggtgggcaggtggcctgccaggccaggagtgggctggagctgctgaggcccagaaggcccgcatagttcctcaccaggagggtctccctccagcacaggtcccgcctgctcagtccctgtgctttccaagtggagggggtgtcagctcggtcaccaagagaagtgacttcccaggagcaccagtcccctcacagaggtgctgtgagcgaggcctccttcggtccaggcagaacctcaggcagtctctcctggtcctgcatgtgtgcaactccagctaataataggtattttatatacagatggacagatatttttttaaactggggagttttcctgatcttgggtcctctttagggggccagacaagaaaggcctacggtttctggagcaaacctgtcccccacctgtgaccagtcactctggggcaagcatcactgggaagggcatagccggagacctttctcctagtgactggtagtcagtggggcattttaggatgtcagggccccagggtgacatgtgtccagcttttctatggcagcagaggcctttccctcagacaagctacaaagtgcccaggatgccatccaccatggtccccttcagtacctcacgcatggtccccagcttctcctaggatcccagtggcgtttatcagtggccagctacctgccaggcccgggctggggcacggtctgcggccatgaggccaggccgcctcccgcacccctaccccgtggcagcagcatacctctgcatttctggaatgtgtgtgcatcaatgatgtttgtatatttgaggcatttaaaaatctattttcgttacgagggcaaatgaagaatgaatattgatcttaaaaaaagaaaagaagacaaaaaaaatacccaaagcca

SEQ ID NO: 220031 - DNA, 4320 bp, Artificial Sequence
  derived and/or modified sequence
atggccagcagcgagaccgagatcagatgggccgagcccggcctgggcaagggcccccagagaagaagatgggcctgggccgaggacaagagagacgtggacagaagcagcagccagagctgggaggaggagagactgttccccaacgccaccagccccgagctgctggaggacttcagactggcccagcagcacctgccccccctggagtgggacccccacccccagcccgacggccaccaggacagcgagagcggcgagaccagcggcgaggaggccgaggccgaggacgtggacagccccgccagcagccacgagcccctggcctggctgccccagcagggcagacagctggacatgaccgaggaggagcccgacggcaccctgggcagcctggaggtggaggaggccggcgagagcagcagcagactgggctacgaggccggcctgagcctggagggccacggcaacaccagccccatggccctgggccacggccaggccagaggctgggtggccagcggcgagcaggccagcggcgacaagctgagcgagcacagcgaggtgaaccccagcgtggagctgagccccgccagaagctggagcagcggcaccgtgagcctggaccaccccagcgacagcctggacagcacctgggagggcgagaccgacggcccccagcccaccgccctggccgagaccctgcccgagggccccagccaccacctgctgagccccgacggcagaaccggcggcagcgtggccagagccacccccatggagttccaggacagcagcgccccccccgcccagagcccccagcacgccaccgacagatggagaagagagaccaccagattcttctgcccccagcccaaggagcacatctggaagcagaccaagaccagccccaagcccctgcccagcagattcatcggcagcatcagccccctgaacccccagcccagacccaccagacagggcagacccctgcccagacagggcgccaccctggccggcagaagcagcagcaacgcccccaagtacggcagaggccagctgaactaccccctgcccgacttcagcaaggtgggccccagagtgagattccccaaggacgagagctacagaccccccaagagcagaagccacaacagaaagccccaggcccccgccagacccctgatcttcaagagccccgccgagatcgtgcaggaggtgctgctgagcagcggcgaggccgccctggccaaggacaccccccccgcccaccccatcaccagagtgccccaggagttccagacccccgagcaggccaccgagctggtgcaccagctgcaggaggactaccacagactgctgaccaagtacgccgaggccgagaacaccatcgaccagctgagactgggcgccaaggtgaacctgttcagcgaccccccccagcccaaccacagcatccacaccggcatggtgccccagggcaccaaggtgctgagcttcaccatcccccagcccagaagcgccgagtggtggcccggccccgccgaggacccccaggccagcgccgccagcggctggcccagcgccagaggcgacctgagccccagcagcctgaccagcatgcccaccctgggctggctgcccgagaacagagacatcagcgaggaccagagcagcgccgagcagacccaggccctggccagccaggccagccagttcctggccaaggtggagagcttcgagagactgatccaggccggcagactgatgccccaggaccaggtgaagggcttccagagactgaaggccgcccacgccgccctggaggaggagtacctgaaggcctgcagagagcagcaccccgcccagcccctggccggcagcaagggcacccccggcagattcgaccccagaagagagctggaggccgagatctacagactgggcagctgcctggaggagctgaaggagcacatcgaccagacccagcaggagcccgagccccccggcagcgacagcgccctggacagcacccccgccctgccctgcctgcaccagcccacccacctgcccgcccccagcggccaggcccccatgcccgccatcaagaccagctgccccgagcccgccaccaccaccgccgccgccagcaccggcccctgccccctgcacgtgaacgtggaggtgagcagcggcaacagcgaggtggaggacagaccccaggaccccctggccagactgagacacaaggagctgcagatggagcaggtgtaccacggcctgatggagagatacctgagcgtgaagagcctgcccgaggccatgagaatggaggaggaggaggagggcgaggaggaggaggaggaggagggcggcggcgacagcctggaggtggacggcgtggccgccacccccggcaaggccgaggccaccagagtgctgcccagacagtgccccgtgcaggccgagaagagccacggcgcccccctggaggaggccaccgagaagatggtgagcatgaagccccccggcttccaggccagcctggccagagacggccacatgagcggcctgggcaaggccgaggccgccccccccggccccggcgtgcccccccacccccccggcaccaagagcgccgccagccaccagagcagcatgaccagcctggagggcagcggcatcagcgagagactgccccagaagcccctgcacagaggcggcggcccccacctggaggagacctggatggccagccccgagaccgacagcggcttcgtgggcagcgagaccagcagagtgagccccctgacccagacccccgagcacagactgagccacatcagcaccgccggcaccctggcccagcccttcgccgccagcgtgcccagagacggcgccagctaccccaaggccagaggcagcctgatccccagaagagccaccgagcccagcacccccagaagccaggcccagagatacctgagcagccccagcggccccctgagacagagagcccccaacttcagcctggagagaaccctggccgccgagatggccgtgcccggcagcgagttcgagggccacaagagaatcagcgagcagcccctgcccaacaagaccatcagccccccccccgcccccgcccccgccgccgcccccctgccctgcggccccaccgagaccatccccagcttcctgctgaccagagccggcagagaccaggccatctgcgagctgcaggaggaggtgagcagactgagactgagactggaggacagcctgcaccagcccctgcagggcagccccaccagacccgccagcgccttcgacagacccgccagaaccagaggcagacccgccgacagccccgccacctggggcagccactacggcagcaagagcaccgagagactgcccggcgagcccagaggcgaggagcagatcgtgccccccggcagacagagagccagaagcagcagcgtgcccagagaggtgctgagactgagcctgagcagcgagagcgagctgcccagcctgcccctgttcagcgagaagagcaagaccaccaaggacagcccccaggccgccagagacggcaagagaggcgtgggcagcgccggctggcccgacagagtgaccttcagaggccagtacaccggccacgagtaccacgtgctgagccccaaggccgtgcccaagggcaacggcaccgtgagctgcccccactgcagacccatcagaacccaggacgccggcggcgccgtgaccggcgaccccctgggccccccccccgccgacaccctgcagtgccccctgtgcggccaggtgggcagcccccccgaggccgacggccccggcagcgccaccagcggcgccgagaaggccaccaccagaagaaaggccagcagcacccccagccccaagcagagaagcaagcaggccggcagcagccccagacccccccccggcctgtggtacctggccaccgccccccccgcccccgccccccccgccttcgcctacatcagcagcgtgcccatcatgccctacccccccgccgccgtgtactacgcccccgccggccccaccagcgcccagcccgccgccaagtggccccccaccgccagccccccccccgccagaagacacagacacagcatccagctggacctgggcgacctggaggagctgaacaaggccctgagcagagccgtgcaggccgccgagagcgtgagaagcaccaccagacagatgagaagcagcctgagcgccgacctgagacaggcccacagcctgagaggcagctgcctgttctag

SEQ ID NO: 220032 - DNA, 2496 bp, Artificial Sequence
  derived and/or modified sequence
atggccagcagcgagaccgagatcagatgggccgagcccggcctgggcaagggcccccagagaagaagatgggcctgggccgaggacaagagagacgtggacagaagcagcagccagagctgggaggaggagagactgttccccaacgccaccagccccgagctgctggaggacttcagactggcccagcagcacctgccccccctggagtgggacccccacccccagcccgacggccaccaggacagcgagagcggcgagaccagcggcgaggaggccgaggccgaggacgtggacagccccgccagcagccacgagcccctggcctggctgccccagcagggcagacagctggacatgaccgaggaggagcccgacggcaccctgggcagcctggaggtggaggaggccggcgagagcagcagcagactgggctacgaggccggcctgagcctggagggccacggcaacaccagccccatggccctgggccacggccaggccagaggctgggtggccagcggcgagcaggccagcggcgacaagctgagcgagcacagcgaggtgaaccccagcgtggagctgagccccgccagaagctggagcagcggcaccgtgagcctggaccaccccagcgacagcctggacagcacctgggagggcgagaccgacggcccccagcccaccgccctggccgagaccctgcccgagggccccagccaccacctgctgagccccgacggcagaaccggcggcagcgtggccagagccacccccatggagttccaggacagcagcgccccccccgcccagagcccccagcacgccaccgacagatggagaagagagaccaccagattcttctgcccccagcccaaggagcacatctggaagcagaccaagaccagccccaagcccctgcccagcagattcatcggcagcatcagccccctgaacccccagcccagacccaccagacagggcagacccctgcccagacagggcgccaccctggccggcagaagcagcagcaacgcccccaagtacggcagaggccagctgaactaccccctgcccgacttcagcaaggtgggccccagagtgagattccccaaggacgagagctacagaccccccaagagcagaagccacaacagaaagccccaggcccccgccagacccctgatcttcaagagccccgccgagatcgtgcaggaggtgctgctgagcagcggcgaggccgccctggccaaggacaccccccccgcccaccccatcaccagagtgccccaggagttccagacccccgagcaggccaccgagctggtgcaccagctgcaggaggactaccacagactgctgaccaagtacgccgaggccgagaacaccatcgaccagctgagactgggcgccaaggtgaacctgttcagcgaccccccccagcccaaccacagcatccacaccggcatggtgccccagggcaccaaggtgctgagcttcaccatcccccagcccagaagcgccgagtggtggcccggccccgccgaggacccccaggccagcgccgccagcggctggcccagcgccagaggcgacctgagccccagcagcctgaccagcatgcccaccctgggctggctgcccgagaacagagacatcagcgaggaccagagcagcgccgagcagacccaggccctggccagccaggccagccagttcctggccaaggtggagagcttcgagagactgatccaggccggcagactgatgccccaggaccaggtgaagggcttccagagactgaaggccgcccacgccgccctggaggaggagtacctgaaggcctgcagagagcagcaccccgcccagcccctggccggcagcaagggcacccccggcagattcgaccccagaagagagctggaggccgagatctacagactgggcagctgcctggaggagctgaaggagcacatcgaccagacccagcaggagcccgagccccccggcagcgacagcgccctggacagcacccccgccctgccctgcctgcaccagcccacccacctgcccgcccccagcggccaggcccccatgcccgccatcaagaccagctgccccgagcccgccaccaccaccgccgccgccagcaccggcccctgccccctgcacgtgaacgtggaggtgagcagcggcaacagcgaggtggaggacagaccccaggaccccctggccagactgagacacaaggagctgcagatggagcaggtgtaccacggcctgatggagagatacctgagcgtgaagagcctgcccgaggccatgagaatggaggaggaggaggagggcgaggaggaggaggaggaggagggcggcggcgacagcctggaggtggacggcgtggccgccacccccggcaaggccgaggccaccagagtgctgcccagacagtgccccgtgcaggccgagaagagccacggcgcccccctggagtag

SEQ ID NO: 220033 - protein, 320 aa, Artificial Sequence
  derived and/or modified sequence
MAFPKKKLQGLVAATITPMTENGEINFSVIGQYVDYLVKEQGVKNIFVNGTTGEGLSLSVSERRQVAEEWVTKGKDKLDQVIIHVGALSLKESQELAQHAAEIGADGIAVIAPFFLKPWTKDILINFLKEVAAAAPALPFYYYHIPALTGVKIRAEELLDGILDKIPTFQGLKFSDTDLLDFGQCVDQNRQQQFAFLFGVDEQLLSALVMGATGAVGSTYNYLGKKTNQMLEAFEQKDFSLALNYQFCIQRFINFVVKLGFGVSQTKAIMTLVSGIPMGPPRLPLQKASREFTDSAEAKLKSLDFLSFTDLKDGNLEAGS

SEQ ID NO: 220034 - protein, 109 aa, Artificial Sequence
  derived and/or modified sequence
MAFPKKKLQGLVAATITPMTENGEINFSVIGQYVDYLVKEQGVKNIFVNGTTGEGLSLSVSERRQVAEEWVTKGKDKSNHHKLGTIRTTQSRRSSFRRQLKAWHSGSHL

SEQ ID NO: 220035 - DNA, 963 bp, Artificial Sequence
  derived and/or modified sequence
atggctttccctaagaaaaaactgcagggcttagtggcggccacgatcaccccaatgacagagaacggtgagatcaacttttcagtaatcgggcaatatgtggactacttggtcaaggagcagggcgtcaagaatattttcgtaaacggtactactggagaggggctcagcctgtccgtttctgagcgcaggcaggtcgccgaggagtgggtgacaaagggcaaggataagctcgaccaggtaatcatccatgtcggggcgctgagtctgaaagaatcacaggagctggctcagcatgccgccgaaatcggggccgatggtatcgctgtgattgctcccttttttcttaagccatggaccaaagacatcctgataaatttcctgaaagaagtggccgctgccgcacccgctctgcctttctattactaccacataccggcactcactggtgtcaaaatcagagctgaggagctattagacggcatccttgacaagatccctacatttcaggggttgaaattctcggatactgatcttctcgactttggtcagtgtgtcgatcagaataggcagcagcaattcgcattcctctttggggtggacgaacagctactgagcgccctggtaatgggagctacaggcgccgtggggtccacatataactacctgggcaaaaaaaccaatcaaatgcttgaggcatttgaacagaaagacttttcccttgctctgaattatcagttttgtatccagcggttcatcaatttcgttgtcaaactgggttttggtgtgtcacagaccaaagcaatcatgacactcgtgtctggtatccccatgggccccccccggctcccgctacagaaggccagccgcgaatttactgactctgcagaggcgaaattgaagagtctggatttccttagctttacggacctgaaagatggcaacctggaggcggggtcctag

SEQ ID NO: 220036 - DNA, 963 bp, Artificial Sequence
  derived and/or modified sequence
atggcctttcctaaaaaaaagctgcagggactggtggctgctactattacgcccatgaccgaaaatggggagattaatttcagtgtgatcgggcagtacgtggattacttggttaaagagcagggagtcaagaacatctttgtgaacggcaccacaggagaaggcctgagtctgtcagtgagcgagagacgtcaggtggccgaagaatgggtgaccaagggaaaggataagctggaccaggtgatcattcatgtaggcgccctctctcttaaggaatcccaagaactcgcccagcatgcggccgaaattggcgccgacgggatcgctgttatcgccccattcttcctaaagccatggacaaaagatatactcattaactttctgaaggaggtggccgctgctgcaccagccctccccttttattattaccatataccggcactaaccggcgttaaaatcagagccgaagagctgctggacgggattctagataagatccctactttccagggactgaagttttcagataccgaccttttggattttggacagtgcgtcgatcagaatcggcaacagcagttcgcctttcttttcggagtggacgagcagcttctgtccgcactcgtcatgggcgcaactggcgccgtgggatccacttacaattatctgggaaagaagacaaaccagatgctcgaggcttttgaacaaaaggatttctccctggccttgaattatcagttctgcatccagagatttattaatttcgtggttaaactcgggttcggtgtgagccagactaaagccattatgacactggtatccggaatcccaatggggcccccgagactccctctgcagaaagcgtctcgggaatttacagacagcgctgaggctaagttaaagtctctggactttctcagcttcacagacctgaaagacggcaacctagaagcgggaagttag

SEQ ID NO: 220037 - DNA, 963 bp, Artificial Sequence
  derived and/or modified sequence
atggccttccccaagaagaagctgcagggcctggtggccgccaccatcacccccatgacagaaaatggagagatcaacttcagcgtcatcggccagtatgtggactacctggtgaaggagcagggcgtgaagaacatctttgtgaatggcaccaccggggagggcctgagcctgtctgtgtctgaaagacggcaggtggccgaggagtgggtgaccaagggcaaggacaagctggaccaggtgatcatccacgtgggcgccctgagcctgaaggagagccaggagctggcccagcacgccgctgagattggagcagatggcattgctgtgattgcccccttcttcctgaagccctggaccaaggacatcctgatcaacttcctgaaggaggtggccgccgccgccccagccctgcccttctactactaccacatcccagccctgactggagtgaagatccgggcagaggagctgctggatggcatcctggacaagatccccaccttccagggcctgaagttcagtgacacagacctgctggactttggccagtgtgtggaccagaaccggcagcagcagtttgccttcctgtttggagtggatgagcagctgctgagcgccctggtgatgggcgccactggagctgtgggcagcacctacaactacctgggcaagaagaccaaccagatgctggaggcctttgagcagaaggacttcagcctggccctgaactaccagttctgcatccagcgcttcatcaactttgtggtgaagctgggctttggagtgtcccagaccaaggccatcatgaccctggtgtctggcatccccatgggccccccccggctgcccctgcagaaggccagccgggagttcacagattctgctgaggccaagctgaagagcctggacttcctgtccttcacagacctgaaggatggcaacctggaggccggcagctag

SEQ ID NO: 220038 - DNA, 1530 bp, Artificial Sequence
  derived and/or modified sequence
ttccagacctaccagcagctcaatggccttcccaaagaagaaacttcagggtcttgtggctgcaaccatcacgccaatgactgagaatggagaaatcaacttttcagtaattggtcagtatgtggattatcttgtgaaagaacagggagtgaagaacatttttgtgaatggcacaacaggagaaggcctgtccctgagcgtctcagagcgtcgccaggttgcagaggagtgggtgacaaaagggaaggacaagctggatcaggtgataattcacgtaggagcactgagcttgaaggagtcacaggaactggcccaacatgcagcagaaataggagctgatggcatcgctgtcattgcaccgttcttcctcaagccatggaccaaagatatcctgattaatttcctaaaggaagtggctgctgccgcccctgccctgccattttattactatcacattcctgccttgacaggggtaaagattcgtgctgaggagttgttggatgggattctggataagatccccaccttccaagggctgaaattcagtgatacagatctcttagacttcgggcaatgtgttgatcagaatcgccagcaacagtttgctttcctttttggggtggatgagcaactgttgagtgctctggtgatgggagcaactggagcagtgggcagtacctataactacctgggaaaaaagacaaaccagatgttggaggcttttgaacaaaaggacttctctttagccctgaactatcagttttgtatccagagatttatcaactttgttgtcaaactaggttttggagtgtcacagaccaaagccatcatgactctggtctctgggattccaatgggcccaccccggcttccactgcagaaagcctccagggagtttactgatagtgctgaagctaaactgaagagcctggatttcctttctttcactgatttaaaggatggaaacttggaagctggtagctagtgcctctctatcaaatcagggtttgcaccttgagacataatctaccttaaatagtgcatttttttctcagggaattttagatgaacttgaataaactctcctagcaaatgaaatctcacaataagcattgaggtaccttttgtgagccttaaaaagtcttattttgtgaaggggcaaaaactctaggagtcacaactctcagtcattcatttcacagatttttttgtggagaaatttctgtttatatggatgaaatggaatcaagaggaaaattgtaattgattaattccatctgtctttaggagctctcattatctcggtctctggttcctaatcctattttaaagttgtctaattttaaaccactataatatgtcttcattttaataaatattcatttggaatctaggaaaactctgagctactgcatttaggcaggcactttaataccaaactgtaacatgtctcaactgtatacaactcaaaatacaccagctcatttggctgctcagtctaactctagaatggatgcttttgaattcatt

SEQ ID NO: 220039 - DNA, 2231 bp, Artificial Sequence
  derived and/or modified sequence
acttaatgggctcaaggtcacctacctgacctaccagcagctcaatggccttcccaaagaagaaacttcagggtcttgtggctgcaaccatcacgccaatgactgagaatggagaaatcaacttttcagtaattggtcagtatgtggattatcttgtgaaagaacagggagtgaagaacatttttgtgaatggcacaacaggagaaggcctgtccctgagcgtctcagagcgtcgccaggttgcagaggagtgggtgacaaaagggaaggacaagctggatcaggtgataattcacgtaggagcactgagcttgaaggagtcacaggaactggcccaacatgcagcagaaataggagctgatggcatcgctgtcattgcaccgttcttcctcaagccatggaccaaagatatcctgattaatttcctaaaggaagtggctgctgccgcccctgccctgccattttattactatcacattcctgccttgacaggggtaaagattcgtgctgaggagttgttggatgggattctggataagatccccaccttccaagggctgaaattcagtgatacagatctcttagacttcgggcaatgtgttgatcagaatcgccagcaacagtttgctttcctttttggggtggatgagcaactgttgagtgctctggtgatgggagcaactggagcagtgggcagtacctataactacctgggaaaaaagacaaaccagatgttggaggcttttgaacaaaaggacttctctttagccctgaactatcagttttgtatccagagatttatcaactttgttgtcaaactaggttttggagtgtcacagaccaaagccatcatgactctggtctctgggattccaatgggcccaccccggcttccactgcagaaagcctccagggagtttactgatagtgctgaagctaaactgaagagcctggatttcctttctttcactgatttaaaggatggaaacttggaagctggtagctagtgcctctctatcaaatcagggtttgcaccttgagacataatctaccttaaatagtgcatttttttctcagggaattttagatgaacttgaataaactctcctagcaaatgaaatctcacaataagcattgaggtaccttttgtgagccttaaaaagtcttattttgtgaaggggcaaaaactctaggagtcacaactctcagtcattcatttcacagatttttttgtggagaaatttctgtttatatggatgaaatggaatcaagaggaaaattgtaattgattaattccatctgtctttaggagctctcattatctcggtctctggttcctaatcctattttaaagttgtctaattttaaaccactataatatgtcttcattttaataaatattcatttggaatctaggaaaactctgagctactgcatttaggcaggcactttaataccaaactgtaacatgtctcaactgtatacaactcaaaatacaccagctcatttggctgctcagtctaactctagaatggatgcttttgaattcatttcgatgtcaccacttttcgctctttaaaaacactgggtcaggtgaggacttgtttcagttcctataactaagtaaagggcggctttctcataacaaaggaaaaagtcttccccaaagatgaatttaagtctccacttttttctatacagaaaactcaaaactcaaagtttcaaagaaccaaaggactcttcctctgggcaccacaaacttccccttcctccactgagaagactgtctctcccgcaggaccctgaattattgaaatcgaaggctgacttcctttctgcagtgagcccaggggctaatgttattatcctgtcacacttgcaactagtgacttttgtttagtgatagaagatttggggaggacccaaaggactcagaactttctctccatacctccttttactcttttctttctgtgtaatgtatcaacaactgtttaatctcccttctaacaaaccttgatataagctttctgatatcaaagtatattgacagttaacccttactgattttaaacttgactatccagtctgttaattacctaagattttgttttcatttcatctctaattgttttgatcattggcagagaaagagtatttgaaattcatatcagttttgctccttattttaatctctttgaattaaaaataaaactttttcaaaatggaaa

SEQ ID NO: 220040 - DNA, 963 bp, Artificial Sequence
  derived and/or modified sequence
atggccttccccaagaagaagctgcagggcctggtggccgccaccatcacccctatgaccgagaacggggaaatcaatttctctgttatcggacagtacgtggattacctggtgaaggaacagggggtgaagaatatctttgtgaacggcactaccggagagggcctgtcactgtccgtgtcagagcggcggcaggtggccgaagaatgggtcacaaaaggtaaagataaattggatcaggtgattatacacgtgggggccttgagtcttaaagagagccaggaactggcacagcatgctgccgagattggggccgacggtatagcagtcattgcccccttttttctcaaaccatggacaaaagatattttgattaattttctcaaagaggtggccgcagccgctccagccctccctttctattactatcacatcccagcccttaccggcgtcaagatcagagccgaggagctgttggatgggatcctggacaaaatccctactttccagggactcaaatttagcgacacagatctcttggatttcggtcaatgcgtcgatcagaatagacagcaacagtttgcctttctgttcggtgtggacgaacagctcctcagtgccctagtgatgggtgccaccggcgccgttggcagcacatataactatctggggaagaagacaaatcagatgctcgaagccttcgagcagaaggacttctcactggccctcaactatcagttctgcattcaaagattcatcaacttcgtagtcaagcttggattcggggtctctcaaaccaaagcaatcatgaccctcgtttcaggcatcccaatggggcctcctagacttcctcttcagaaagctagtcgagagttcacagatagcgccgaggccaagctgaagagccttgactttctgagctttactgaccttaaagacggcaacttggaagccggcagctag

SEQ ID NO: 220041 - DNA, 963 bp, Artificial Sequence
  derived and/or modified sequence
atggccttccccaagaagaagctgcagggcctggtggccgccaccatcacccccatgactgagaacggggaaatcaattttagcgttatcggccagtacgttgactacttggtgaaagagcaaggcgtgaaaaatattttcgtgaatggcaccactggggagggcctctcgcttagtgtgtctgaacgtcgtcaggtggctgaagagtgggtcactaaagggaaggacaaactggaccaggtgattatccacgtgggagcactgtctttaaaggagtcacaggagcttgctcagcacgccgcggagataggtgccgatggtatagccgtgatcgctcctttttttttaaagccttggacaaaggacatcctgatcaactttttaaaagaagtcgctgccgccgccccagcacttccgttttattattatcatatccccgctctgacgggcgttaaaatacgagccgaggagctactcgacgggatactcgacaaaataccaacgttccagggtctcaagttctccgacacagatctgctcgatttcgggcagtgcgttgaccagaatcggcagcaacaattcgctttcctgttcggggtggatgagcaactactctcagccctggttatgggagcaactggagccgtcggatccacatacaactacctgggaaagaagacaaaccaaatgttggaggcttttgagcagaaggacttctcactagccctaaattatcagttttgcattcagcggttcatcaattttgttgtgaagctcggatttggagtgagccagaccaaagcgattatgacccttgtttcaggcattccaatgggaccaccacggcttccccttcaaaaggcgtcccgagaattcaccgacagcgctgaggcgaagctgaaatccttggacttcctctccttcacagatctgaaagatggtaatttggaggcaggatcctag

SEQ ID NO: 220042 - DNA, 963 bp, Artificial Sequence
  derived and/or modified sequence
atggcttttccaaagaagaagttacagggcctggtggccgctacaattaccccaatgaccgaaaacggcgagatcaatttctcagtgatcggtcagtatgtggattacctcgttaaagagcagggcgtgaagaatattttcgttaatgggactaccggagagggcctgtctctttccgtgagtgagagacgtcaagttgccgaggaatgggtgacgaagggtaaggacaaactcgatcaagttatcattcacgtcggggcactttccttgaaagaaagccaggaactagcccaacatgcggcagaaatcggagccgacggaattgctgtcattgcgcctttctttctaaagccctggaccaaagacattttgattaacttcctaaaagaggtcgcggctgccgctcccgcattgcctttctattattatcacatacctgcgctgacgggggtgaagattcgggcagaagaactgctcgatgggatattggacaaaattcctaccttccagggcctaaagttttcggacaccgatctgctagactttggtcagtgcgtcgatcagaaccggcagcagcagttcgcctttctgtttggcgtggatgagcagctgttgagtgccctggttatgggagcaactggcgctgtcggtagtacctacaattacctcggaaagaagacaaaccagatgctggaagcatttgagcagaaggatttttccttggcgttaaattatcagttctgcatacagaggttcataaatttcgtcgttaagctcggcttcggggtttcacagaccaaagctattatgacgttggtgtctggcatcccgatggggccacccaggctgcctctgcaaaaagccagccgtgagttcactgactctgcagaggccaaactgaagagccttgattttctgagcttcactgatctaaaggatggaaaccttgaggcaggttcatag

SEQ ID NO: 220043 - DNA, 963 bp, Artificial Sequence
  derived and/or modified sequence
atggcattccccaagaagaagctacagggcttggtggcggctacgataactcccatgaccgaaaatggcgagatcaatttcagcgtcatcggtcagtatgttgactacttggtgaaagagcaaggtgtcaagaacatcttcgtcaacggtacaaccggcgaggggcttagtctttctgtcagcgagagacgccaggtggccgaagagtgggtgaccaaggggaaagacaaattagaccaagtgatcatccatgtgggagccctgagtctcaaggaaagtcaagaattggctcagcatgccgctgagatcggagcggacggcatagctgtaattgccccattttttctgaagccctggacaaaggatattctcattaacttcctcaaagaggttgcagccgctgccccagcgctcccattctactactatcatatccctgccctgacaggcgtgaaaatccgcgctgaggagctcctggatggaatcttggacaagatacctactttccaggggctcaagttttctgatacggatctgttggacttcggacagtgcgtcgaccagaaccgccagcagcagttcgcgtttctgtttggggtggatgaacagctcctgagcgcgcttgttatgggtgctacgggagccgttggttccacttacaattacctgggcaaaaagacaaaccagatgctcgaggccttcgagcaaaaagatttctcattagcgctgaattatcaattttgcatccagagatttatcaactttgttgtcaagctgggatttggcgtctcccagacaaaagccatcatgaccctcgttagtggaatacctatggggcctcctcgtctcccgctgcaaaaagcgtcgagggaatttaccgacagcgctgaggcgaagctgaaatctctggactttctgtcttttaccgatctgaaggatggcaatctcgaggccggatcatag

SEQ ID NO: 220044 - DNA, 963 bp, Artificial Sequence
  derived and/or modified sequence
atggccttccccaagaagaagctgcagggcctggtggccgccaccatcacccccatgaccgagaacggcgagatcaacttcagcgtgatcggccagtacgtggactacctggtgaaggagcagggcgtgaagaacatcttcgtgaacggcaccaccggcgagggcctgagcctgagcgtgagcgagagaagacaggtggccgaggagtgggtgaccaagggcaaggacaagctggaccaggtgatcatccacgtgggcgccctgagcctgaaggagagccaggagctggcccagcacgccgccgagatcggcgccgacggcatcgccgtgatcgcccccttcttcctgaagccctggaccaaggacatcctgatcaacttcctgaaggaggtggccgccgccgcccccgccctgcccttctactactaccacatccccgccctgaccggcgtgaagatcagagccgaggagctgctggacggcatcctggacaagatccccaccttccagggcctgaagttcagcgacaccgacctgctggacttcggccagtgcgtggaccagaacagacagcagcagttcgccttcctgttcggcgtggacgagcagctgctgagcgccctggtgatgggcgccaccggcgccgtgggcagcacctacaactacctgggcaagaagaccaaccagatgctggaggccttcgagcagaaggacttcagcctggccctgaactaccagttctgcatccagagattcatcaacttcgtggtgaagctgggcttcggcgtgagccagaccaaggccatcatgaccctggtgagcggcatccccatgggcccccccagactgcccctgcagaaggccagcagagagttcaccgacagcgccgaggccaagctgaagagcctggacttcctgagcttcaccgacctgaaggacggcaacctggaggccggcagctag

SEQ ID NO: 220045 - protein, 451 aa, Artificial Sequence
  derived and/or modified sequence
MREIVHIQIGQCGNQIGAKFWEMIGEEHGIDLAGSDRGASALQLERISVYYNEAYGRKYVPRAVLVDLEPGTMDSIRSSKLGALFQPDSFVHGNSGAGNNWAKGHYTEGAELIENVLEVVRHESESCDCLQGFQIVHSLGGGTGSGMGTLLMNKIREEYPDRIMNSFSVMPSPKVSDTVVEPYNAVLSIHQLIENADACFCIDNEALYDICFRTLKLTTPTYGDLNHLVSLTMSGITTSLRFPGQLNADLRKLAVNMVPFPRLHFFMPGFAPLTAQGSQQYRALSVAELTQQMFDARNTMAACDLRRGRYLTVACIFRGKMSTKEVDQQLLSVQTRNSSCFVEWIPNNVKVAVCDIPPRGLSMAATFIGNNTAIQEIFNRVSEHFSAMFKRKAFVHWYTSEGMDINEFGEAENNIHDLVSEYQQFQDAKAVLEEDEEVTEEAEMEPEDKGH

SEQ ID NO: 220046 - DNA, 1356 bp, Artificial Sequence
  derived and/or modified sequence
atgagagagatcgtgcacatccagatcggccagtgcggcaaccagatcggcgccaagttctgggagatgatcggcgaggagcacggcatcgacctggccggcagcgacagaggcgccagcgccctgcagctggagagaatcagcgtgtactacaacgaggcctacggcagaaagtacgtgcccagagccgtgctggtggacctggagcccggcaccatggacagcatcagaagcagcaagctgggcgccctgttccagcccgacagcttcgtgcacggcaacagcggcgccggcaacaactgggccaagggccactacaccgagggcgccgagctgatcgagaacgtgctggaggtggtgagacacgagagcgagagctgcgactgcctgcagggcttccagatcgtgcacagcctgggcggcggcaccggcagcggcatgggcaccctgctgatgaacaagatcagagaggagtaccccgacagaatcatgaacagcttcagcgtgatgcccagccccaaggtgagcgacaccgtggtggagccctacaacgccgtgctgagcatccaccagctgatcgagaacgccgacgcctgcttctgcatcgacaacgaggccctgtacgacatctgcttcagaaccctgaagctgaccacccccacctacggcgacctgaaccacctggtgagcctgaccatgagcggcatcaccaccagcctgagattccccggccagctgaacgccgacctgagaaagctggccgtgaacatggtgcccttccccagactgcacttcttcatgcccggcttcgcccccctgaccgcccagggcagccagcagtacagagccctgagcgtggccgagctgacccagcagatgttcgacgccagaaacaccatggccgcctgcgacctgagaagaggcagatacctgaccgtggcctgcatcttcagaggcaagatgagcaccaaggaggtggaccagcagctgctgagcgtgcagaccagaaacagcagctgcttcgtggagtggatccccaacaacgtgaaggtggccgtgtgcgacatcccccccagaggcctgagcatggccgccaccttcatcggcaacaacaccgccatccaggagatcttcaacagagtgagcgagcacttcagcgccatgttcaagagaaaggccttcgtgcactggtacaccagcgagggcatggacatcaacgagttcggcgaggccgagaacaacatccacgacctggtgagcgagtaccagcagttccaggacgccaaggccgtgctggaggaggacgaggaggtgaccgaggaggccgagatggagcccgaggacaagggccactag

SEQ ID NO: 220047 - DNA, 1356 bp, Artificial Sequence
  derived and/or modified sequence
atgagggagatcgtgcacattcagatcggacagtgtggcaatcagattggtgccaagttctgggaaatgatcggggaagaacatggaattgacctcgctggtagcgacagaggagcttccgcactgcagctggaaaggatcagcgtatattataacgaggcttatggtcgaaagtatgtgccgcgcgccgtcttagtcgacttggaaccaggaaccatggatagtataaggagcagcaagttgggagctctctttcaaccggatagttttgtccacggcaactccggggctgggaataactgggccaagggccactataccgagggggctgaattgatcgagaatgttttagaagttgtcaggcatgagagcgagtcctgcgactgcctgcagggtttccagattgtgcatagcctaggcgggggcaccggaagcggaatgggcaccctcctgatgaacaaaatccgagaagaatatcccgatcgcatcatgaacagtttctctgtaatgccctcaccaaaagtttctgatacagtggtcgagccttataacgccgttctttctatccaccaattaatcgagaatgctgacgcatgtttttgcatcgacaacgaggcactttacgacatctgcttcagaaccctgaaactgaccacccccacttatggcgacctgaatcacttagttagtcttacgatgagtggcattacaaccagcctgaggtttccagggcagctgaacgcagatctccggaagctggccgtcaacatggtaccctttcccaggctgcactttttcatgccagggttcgccccattaactgcccagggttctcaacagtaccgggctctgtccgtcgccgaacttacacagcagatgtttgatgcaagaaataccatggcagcctgtgatctcaggagaggccgctatctcacagtggcgtgtatcttccgtggtaagatgtcaacaaaagaggtagaccagcagttgctgtcagtgcagactcgaaacagctcttgcttcgtggagtggattcctaacaacgtgaaggttgccgtctgcgatatcccaccacgcggcctgagcatggccgccacatttatcgggaacaataccgcaatacaagagatctttaaccgagtctcagagcacttttccgctatgttcaaaaggaaggccttcgttcactggtacacttccgagggaatggatataaacgagttcggagaggctgaaaacaatatccatgatctagtgagtgagtaccaacagttccaggatgcaaaagctgtgctggaggaggatgaagaagtgaccgaagaggcagaaatggaaccagaagataaaggccactag

SEQ ID NO: 220048 - DNA, 1356 bp, Artificial Sequence
  derived and/or modified sequence
atgagggagatcgtgcacatccagatcggccagtgtggcaaccagatcggggccaagttctgggagatgattggagaggagcacggcatcgacctggccggcagtgacagaggagccagcgccctgcagctggagcgcatctctgtgtactacaatgaggcctacggcaggaaatatgtgcccagggctgtgctggtggacctggagcccggcaccatggacagcatccgcagcagcaagctgggcgccctcttccagcctgacagctttgtgcacggcaacagcggggccggcaacaactgggccaagggccactacacagaaggagctgagctgattgaaaatgtgctggaggtggtgagacatgagagcgagagctgtgactgcctgcagggcttccagatcgtgcacagcctgggcggcggcactggaagtggcatgggcaccctgctgatgaacaagatccgggaggagtacccagaccgcatcatgaacagcttctctgtgatgcccagccccaaggtgtctgacacagtggtggagccctacaatgctgtgctgagcatccaccagctgattgaaaatgctgatgcctgcttctgcatcgacaatgaggccctgtatgacatctgcttccgcaccctgaagctgaccacccccacctacggggacctgaaccacctggtgtccctgaccatgagcggcatcaccaccagcctgcgcttccctggccagctgaatgctgacctgaggaagctggccgtgaacatggtgcccttcccccggctgcacttcttcatgcctggctttgcccccctgacagcccagggcagccagcagtaccgggccctgtctgtggccgagctgacccagcagatgtttgatgccaggaacaccatggccgcctgtgacctgcggcggggccgctacctgactgtggcctgcatcttccggggcaagatgagcaccaaggaggtggaccagcagctgctgtctgtgcagaccaggaacagcagctgctttgtggagtggatccccaacaacgtgaaggtggccgtgtgtgacatccccccccggggcctgtccatggccgccaccttcatcggcaacaacacagccatccaggagatcttcaacagagtgtctgagcacttcagcgccatgttcaagaggaaggcctttgtgcactggtacaccagcgagggcatggacatcaatgaatttggagaggccgagaacaacatccatgacctggtgtctgagtaccagcagttccaggatgccaaggctgtgctggaggaggatgaggaggtgacagaggaggccgagatggagccagaagataaaggccactag

SEQ ID NO: 220049 - DNA, 1356 bp, Artificial Sequence
  derived and/or modified sequence
atgcgggagatcgtgcacatccagatcggccagtgcggcaaccagattggagccaagttttgggaaatgattggcgaggaacatggtatcgacttggccggttctgaccggggcgcctccgctctacagctggagcgtatctcagtctattataatgaggcctacggccgcaaatatgttccccgcgcggtcctggttgacctggagcccggaaccatggattcgatccggagctcaaagttaggggctctgtttcagcctgacagttttgtgcacggtaattccggcgctggcaataattgggccaaaggtcattatactgagggtgctgagctgatagagaacgttttggaggtcgtgcgacacgagtccgagagctgcgactgtcttcaagggtttcaaatcgttcattccctcggcggcggcactggctcagggatgggaacactccttatgaacaaaattcgcgaggagtacccagatagaattatgaactccttctctgtcatgccctctccaaaggtgtctgacacagtggtggagccttacaacgccgtgctcagcatccaccagctgatagagaacgccgatgcttgcttttgcatcgataacgaggccctctacgacatctgttttaggacgcttaagctcaccacccctacttatggagatctcaatcatcttgttagtttgaccatgtctggcatcaccacttctctccgcttccccgggcagctgaacgctgacctcaggaagttggctgtaaatatggtgccatttccgaggctgcacttcttcatgccaggattcgcccccctcactgcccaaggctcccagcagtacagagctttgtccgtcgcagaactgacccaacaaatgttcgacgctcgaaatacaatggccgcctgcgacctgcgccgcggtagatatctgacagtggcatgtatcttcagaggtaagatgagcactaaggaagtggaccagcagctcctctccgtccagactagaaactcatcttgtttcgtcgagtggatccccaacaacgtcaaggtggccgtctgtgatattcccccacggggcctcagcatggcggcaacattcatagggaacaatacagctatccaggaaatttttaaccgggttagcgagcacttcagcgccatgttcaaacgaaaagcttttgtgcattggtatacctccgaaggcatggatattaatgaatttggcgaggccgagaacaacattcatgaccttgtctccgagtaccagcagttccaggatgctaaggcggtgctggaagaggatgaggaggtgacggaggaggccgaaatggagcccgaggacaaaggccattag

SEQ ID NO: 220050 - DNA, 1356 bp, Artificial Sequence
  derived and/or modified sequence
atgagggagatcgttcatatacagataggccagtgtggcaatcagatcggggctaaattttgggagatgattggagaagaacacggtatcgacctggccggaagcgacaggggagctagcgctctccaactggaacgtataagcgtgtactacaacgaagcgtacggacgtaagtatgtgccacgagctgttctcgtcgatcttgaacccggtaccatggatagtattcgctcgtccaagctgggcgcactgtttcaacctgactcctttgtgcacggaaattctggcgcaggaaataattgggcaaagggccattacactgagggagctgaactgatagagaatgttttggaagtcgtccgacacgaatctgaatcttgcgactgtctccaagggtttcagattgtacattctctgggcggaggaactggatccgggatgggtacactgctgatgaataagattagagaggagtaccccgaccggatcatgaacagttttagcgtcatgcctagccccaaagtttctgacaccgtggtcgaaccctataacgccgttctgagtatccaccaattgatcgaaaacgcggacgcctgcttctgcatcgataacgaggccctgtacgatatttgtttccgtactttgaagcttactacccctacgtatggggaccttaatcacctggtgtctttaactatgtccggcattacaacatctcttagattcccaggacagctgaatgccgaccttaggaaattggctgttaacatggtgcctttcccgagactgcactttttcatgcccggattcgcgccacttactgcacagggaagccagcagtacagggccttgtctgttgcggagctgactcagcagatgtttgatgcccgaaataccatggccgcttgcgacctccgtcggggaagatacctgactgtggcgtgcatcttccggggtaaaatgtccacaaaagaagtcgaccagcagctgctaagcgtacaaactagaaacagctcatgtttcgttgaatggattcctaacaacgtcaaggtagccgtctgcgatattcctccaaggggcttaagcatggctgcgacgttcatcggtaataacactgctatccaagagatattcaatcgcgtgagcgagcatttctcggcaatgtttaagaggaaggcatttgtccattggtacacgtccgagggtatggacattaatgagtttggcgaggctgaaaataacattcatgatttggtcagtgagtaccagcagttccaggatgcgaaggccgtgctggaggaggacgaggaagtaacagaggaggccgaaatggagcctgaggacaagggccactag

SEQ ID NO: 220051 - DNA, 3496 bp, Artificial Sequence
  derived and/or modified sequence
ggggcagtattctgtgttgagggaggaaaaacactcccttccaaaagcatgacaggcagaaagcagagaagggccaggactggctgagggcggggagctgggcctctggggtggacacacccttggtcacattgtgagggtagcttggttggccagtcccaccactgcagtgaccacagttgtgttgggctcacaccagtgaaccgaagctctggattctgagagtctgaggattccgtgaagatctcagacttgggctcagagcaaggatgcgtgaaattgtccatattcagattggccagtgtggcaaccagatcggagccaagttctgggagatgattggtgaggaacacgggatcgacttggctgggagcgaccgcggggcctcggccttgcagctggagagaatcagcgtgtactacaacgaagcctacggtaggaaatatgtgccccgagcagtcttggtggacctagaacctgggacgatggacagcattcgatctagcaaattaggagctctctttcaacccgacagttttgtccatggtaactctggggctggcaacaactgggccaaaggccactacacggagggagccgagctgatcgagaatgtcctagaggtggtgaggcacgagagtgagagctgtgactgcctgcagggcttccagatcgtccactccctgggcgggggcacaggctccgggatgggcactctgctcatgaacaagattagagaggagtacccggaccggatcatgaattccttcagcgtcatgccttctcccaaggtgtcggacactgtggtggagccctacaacgcggttctgtctatccaccagctgattgagaatgcagatgcctgtttctgcattgacaatgaggccctctatgacatctgcttccgtaccctgaagctgacgacacccacctatggggatctcaaccacctagtgtccttgaccatgagcggcataaccacctccctccggttcccgggtcagctcaacgcagacctgcgcaagctggcggtgaacatggtccccttcccccgcctgcacttctttatgcccggctttgccccactcacggcccagggcagccagcagtaccgagccctctccgtggccgagctcacccagcagatgttcgatgcccgcaataccatggctgcctgtgacctccgccgtggccgctacctcacagtggcctgcattttccggggcaagatgtccaccaaggaagtggaccagcaactgctctccgtgcagaccaggaacagcagctgctttgtggagtggattcccaacaacgtcaaggtggctgtctgcgacatcccgccccgggggctgagcatggccgccaccttcattggcaacaacacggccatccaagagatctttaatagggtctctgagcatttctcagccatgttcaaaaggaaagcttttgtgcactggtacaccagcgaagggatggacataaacgaatttggggaagctgaaaataacatccatgatttggtatccgagtaccaacaatttcaagatgccaaagcagttctagaggaagatgaagaggtcacggaggaggcagaaatggagccagaagataagggacattaactgtgagagaagctgtgccgcggagtcgcttacagaacagtttctcattagatgagtgtttctcctgcagcactccaaaacccactctgcactgcagcacagtgaatgatatgcactcaccattagcttcgacacagggactgagggagacaggtggggagcagctgacaggcattagggtctttgctgacatctactaaccttgaagagtttgatgttcagtgcatacttattaacttaaaaaaatagcaaatttattgtaaagtgctccctttgtttcaaagtgtttgccaggcatccagactacacgtgtggatttgcagggagccactggagttggtgttacatttttatactttagcagcactgataggcaccctggaatcctcacttggtatccgagggctactaagactctttccttaggttctttcctctgagcaaacactgactggcatcctgctttccagtgcctgccagcctccagaagagccaggtgcctgactagtacatggggagctacagagccaaggtcaatgtgagtcaacatccactagaaatatccatgttgtgtagacctgtgcatacaacatgctaactggaaaagaggaaaaaagaaaagccacagtcctctccacaaaaatacctggtccaaacaagaaaaacaaaaagacaagcaaaactaaagaactgcagtcttctgatctttatttctgaagagctagcctttaacatatatgtttatatagtttaaatttcttactactgttagatcccaggaattcattaataatcatccttggctttccttttaaaggctattttgaaatggtcttttcactttcattcagtcatcaccccccaaaatgctctgcagcctctctgctctttgagaaagggcacaccatgcgctcggcaaccattcaaatgcaggaattaagcagcaatggctgcagtgtccttctcagttatggaggacatcgtctcattagggaacttttacagttcaaattaatttgcagaagttgccataaatgtttgcataatgacatagctttaagcactacatgattttaatctgctcacattataacaggaccaaatacacaagagcgtaatcaaatcatctgtaacttcttaattacagtttacctatttctgacatgcagcactgccatctcttccagcaccatcagggttttaatggccctctagaattaccactgagatacactatttgatccatggataaccggtaatgggaaaatgctccgaccctcaatgcagtaaatatttacttgcaggcaactgggttctcatctcttgatttgcttttgtaatcagcaataataaaatagcaggtagatggatgacagttgctcattctgagaaacttcactcttttcacttatgcatcacgaggaaataactaaaatacataccaagagaaaaataccttgccatcggatcatcaacaagtcttctatttacaaacttcaaaaaacacaaaacaacattcatgttttaaatgctttctacttgtggttcaagaagcactagatttagtaagaaactctacctatatacttagtttgaagttagtaacttcctgagatgctaaagacttacagcctgcgattatacaaggatttacacatgcttcctctggtgctttacttcccaaacctaaaaaagcaatgaaatagatgtaaggaaggagggatttaaaccttttaaaaaacttttgctgacttatattactgtaaagatttgtttgctcaatagtaatcattaaactacaaagtaattcaattttaaatggcaaaattgctttatttcagactaaataaattccttttcttgaagcctaa

SEQ ID NO: 220052 - protein, 320 aa, Artificial Sequence
  derived and/or modified sequence
MSSCNFTHATFVLIGIPGLEKAHFWVGFPLLSMYVVAMFGNCIVVFIVRTERSLHAPMYLFLCMLAAIDLALSTSTMPKILALFWFDSREISFEACLTQMFFIHALSAIESTILLAMAFDRYVAICHPLRHAAVLNNTVTAQIGIVAVVRGSLFFFPLPLLIKRLAFCHSNVLSHSYCVHQDVMKLAYADTLPNVVYGLTAILLVMGVDVMFISLSYFLIIRTVLQLPSKSERAKAFGTCVSHIGVVLAFYVPLIGLSVVHRFGNSLHPIVRVVMGDIYLLLPPVINPIIYGAKTKQIRTRVLAMFKISCDKDLQAVGGK

SEQ ID NO: 220053 - protein, 83 aa, Artificial Sequence
  derived and/or modified sequence
MSSCNFTHATFVLIGIPGLEKAHFWVGFPLLSMYVVAMFGNCIVVFIVRTERSLHAPMYLFLCMLAAIDLALSTSTMPKILAL

SEQ ID NO: 220054 - DNA, 963 bp, Artificial Sequence
  derived and/or modified sequence
atgagcagctgcaacttcacccacgccaccttcgtgctgatcggcatccccggcctggagaaggcccacttctgggtgggcttccccctgctgagcatgtacgtggtggccatgttcggcaactgcatcgtggtgttcatcgtgagaaccgagagaagcctgcacgcccccatgtacctgttcctgtgcatgctggccgccatcgacctggccctgagcaccagcaccatgcccaagatcctggccctgttctggttcgacagcagagagatcagcttcgaggcctgcctgacccagatgttcttcatccacgccctgagcgccatcgagagcaccatcctgctggccatggccttcgacagatacgtggccatctgccaccccctgagacacgccgccgtgctgaacaacaccgtgaccgcccagatcggcatcgtggccgtggtgagaggcagcctgttcttcttccccctgcccctgctgatcaagagactggccttctgccacagcaacgtgctgagccacagctactgcgtgcaccaggacgtgatgaagctggcctacgccgacaccctgcccaacgtggtgtacggcctgaccgccatcctgctggtgatgggcgtggacgtgatgttcatcagcctgagctacttcctgatcatcagaaccgtgctgcagctgcccagcaagagcgagagagccaaggccttcggcacctgcgtgagccacatcggcgtggtgctggccttctacgtgcccctgatcggcctgagcgtggtgcacagattcggcaacagcctgcaccccatcgtgagagtggtgatgggcgacatctacctgctgctgccccccgtgatcaaccccatcatctacggcgccaagaccaagcagatcagaaccagagtgctggccatgttcaagatcagctgcgacaaggacctgcaggccgtgggcggcaagtag

SEQ ID NO: 220055 - DNA, 252 bp, Artificial Sequence
  derived and/or modified sequence
atgagcagctgcaacttcacccacgccaccttcgtgctgatcggcatccccggcctggagaaggcccacttctgggtgggcttccccctgctgagcatgtacgtggtggccatgttcggcaactgcatcgtggtgttcatcgtgagaaccgagagaagcctgcacgcccccatgtacctgttcctgtgcatgctggccgccatcgacctggccctgagcaccagcaccatgcccaagatcctggccctgtag

SEQ ID NO: 220056 - DNA, 963 bp, Artificial Sequence
  derived and/or modified sequence
atgagtagttgtaacttcacacatgcaacctttgtgctgataggcattcccggcctcgaaaaagctcacttctgggtcggtttccctctgctgagtatgtatgtggttgcgatgttcggtaattgcatagtggtttttatcgtgagaaccgagcggagcctacatgcccctatgtatttatttttatgtatgctggcggccatcgatctcgccctgagtaccagcaccatgcctaagattctggcattattctggtttgactctagagagatttccttcgaggcgtgcctgacacaaatgtttttcatccacgcattgagtgccatcgaatcaacgattcttctggccatggcctttgatcgctatgttgcaatttgtcaccccctgagacatgcggcagttctgaataataccgttacagcacaaatcggcatcgtcgcagtggtgagaggttctctttttttttttcccttaccgctgttgatcaaaaggttagctttctgccacagcaacgttttaagccatagttactgtgtgcaccaggatgtgatgaagctcgcgtatgcagacaccctgcctaacgtggtgtacggcctgactgcaattctgcttgtgatgggagtggatgtgatgtttatcagcttatcctactttctgattatacgcacagtcctgcaactgccttccaagtccgagcgggctaaggcattcgggacgtgtgtctctcatattggggtcgttctggcgttctatgtgccactcatcggactctcagttgtgcatcgcttcggtaacagtctgcatccgatcgtgagagtagttatgggagacatttacctcctgcttccccccgttataaatccaataatctacggggccaaaaccaaacagatacggactcgcgtgttagctatgtttaaaatcagctgcgacaaggacctgcaagccgtgggcggtaagtag

SEQ ID NO: 220057 - DNA, 252 bp, Artificial Sequence
  derived and/or modified sequence
atgagctcctgtaattttacccacgcaactttcgttttgatcgggattccaggtctcgaaaaggcacacttctgggttggattccctcttctaagtatgtacgtcgtcgccatgttcggcaattgtatcgttgtttttatcgtgagaacggaaaggtcactgcacgcgccgatgtatctgttcctctgcatgttggcagccatcgatctggctctgagtacaagcaccatgcccaaaatacttgccctttag

SEQ ID NO: 220058 - DNA, 963 bp, Artificial Sequence
  derived and/or modified sequence
atgagcagctgcaacttcacccacgccacctttgtgctgattggcatccctggcctggagaaggcccacttctgggtgggcttccccctgctgtccatgtatgtggtggccatgtttggaaactgcatcgtggtgttcatcgtgaggacagagaggagcctgcacgcccccatgtacctgttcctgtgcatgctggccgccatcgacctggccctgagcaccagcaccatgcccaagatcctggccctcttctggtttgacagccgggagatcagctttgaggcctgcctgacccagatgttcttcatccacgccctgagcgccatcgagagcaccatcctgctggccatggcctttgaccgctacgtggccatctgccaccccctgcggcatgctgctgtgctgaacaacacagtgacagcccagattggaattgtggccgtggtgcggggcagcctcttcttcttccccctgcccctgctgatcaagaggctggccttctgccacagcaatgtgctgagccacagctactgtgtgcaccaggatgtgatgaagctggcctatgctgacaccctgcccaacgtggtgtatggcctgacagccatcctgctggtgatgggcgtggatgtgatgttcatcagcctgagctacttcctgatcatcagaacagtgctgcagctgcccagcaagtctgagcgggccaaggccttcggcacctgtgtgagccacatcggcgtggtgctggccttctacgtgcccctgattggcctgtctgtggtgcacagatttggaaacagcctgcaccccatcgtgcgggtggtgatgggagacatctacctgctgctgccccctgtgatcaaccccatcatctatggagccaagaccaagcagatccgcaccagggtgctggccatgttcaagatcagctgtgacaaggacctgcaggccgtgggcggcaagtag

SEQ ID NO: 220059 - DNA, 252 bp, Artificial Sequence
  derived and/or modified sequence
atgagcagctgcaacttcacccacgccacctttgtgctgattggcatccctggcctggagaaggcccacttctgggtgggcttccccctgctgtccatgtatgtggtggccatgtttggaaactgcatcgtggtgttcatcgtgaggacagagaggagcctgcacgcccccatgtacctgttcctgtgcatgctggccgccatcgacctggccctgagcaccagcaccatgcccaagatcctggccctgtag

SEQ ID NO: 220060 - DNA, 963 bp, Artificial Sequence
  derived and/or modified sequence
atgagcagctgcaacttcacccacgccaccttcgtgctgatcggcatccctgggctcgagaaagcccatttctgggtgggctttccacttttgtcaatgtatgttgttgcgatgtttggaaattgtatcgtcgtcttcatagtgcgaaccgaaagatccttgcacgcccccatgtacctattcttatgtatgctcgccgccattgatctggccctctcgacttctactatgccaaaaatactggccctattctggtttgacagccgggagatttcgttcgaggcttgtctcacccaaatgtttttcatccacgccttgtcggcaatagaatctaccattctgcttgcaatggcgtttgaccgatacgttgcgatctgtcatcctcttcgtcacgcagctgtcctgaacaatacagtgactgctcagattggcattgtagccgtggtgcgggggagcctgttcttcttccccctgcccctgctcataaagcgcctcgctttttgccactcaaatgtgctgtcccattcctactgcgtccatcaagacgtgatgaagctagcctatgcagataccctccccaacgtggtatacggattaaccgcaatactcttggtcatgggggtggatgttatgttcattagtctttcttactttctcataatcaggactgtgttgcagctgcctagcaaaagcgagcgagccaaggcttttgggacatgcgtatcccatatcggagttgtgctggcattttacgtccccttgattggactgagtgtggtgcataggttcgggaactctctccaccctatcgtcagagtggtcatgggcgatatctacctcctattgcctccagtgataaaccctatcatctatggcgcaaagactaagcaaatcagaacgagggtcttagccatgtttaagatctcatgcgataaggatctgcaggccgtcggcggcaaatag

SEQ ID NO: 220061 - DNA, 252 bp, Artificial Sequence
  derived and/or modified sequence
atgagcagctgcaacttcacccacgccaccttcgtgctgatcggcatccctggtcttgagaaagcccatttctgggttggctttccactgctgagcatgtacgttgtggccatgtttggcaactgcattgtagtgtttatcgttaggactgaacggtccctgcatgcccccatgtacttgtttctgtgcatgctagcggctatcgacctcgctttaagcacttctaccatgcccaaaatcctcgccctgtag

SEQ ID NO: 220062 - DNA, 2781 bp, Artificial Sequence
  derived and/or modified sequence
ctccacaccctgaagacacagtgagttagcaccaccaccaggaattggcctttcagctctgtgcctgtctccagtcaggctggaataagtctcctcatatttgcaagctcggccctcccctggaatctaaagcctcctcagccttctgagtcagcctgaaaggaacaggccgaactgctgtatgggctctactgccagtgtgacctcaccctctccagtcacccctcctcagttccagctatgagttcctgcaacttcacacatgccacctttgtgcttattggtatcccaggattagagaaagcccatttctgggttggcttccccctcctttccatgtatgtagtggcaatgtttggaaactgcatcgtggtcttcatcgtaaggacggaacgcagcctgcacgctccgatgtacctctttctctgcatgcttgcagccattgacctggccttatccacatccaccatgcctaagatccttgcccttttctggtttgattcccgagagattagctttgaggcctgtcttacccagatgttctttattcatgccctctcagccattgaatccaccatcctgctggccatggcctttgaccgttatgtggccatctgccacccactgcgccatgctgcagtgctcaacaatacagtaacagcccagattggcatcgtggctgtggtccgcggatccctcttttttttcccactgcctctgctgatcaagcggctggccttctgccactccaatgtcctctcgcactcctattgtgtccaccaggatgtaatgaagttggcctatgcagacactttgcccaatgtggtatatggtcttactgccattctgctggtcatgggcgtggacgtaatgttcatctccttgtcctattttctgataatacgaacggttctgcaactgccttccaagtcagagcgggccaaggcctttggaacctgtgtgtcacacattggtgtggtactcgccttctatgtgccacttattggcctctcagtggtacaccgctttggaaacagccttcatcccattgtgcgtgttgtcatgggtgacatctacctgctgctgcctcctgtcatcaatcccatcatctatggtgccaaaaccaaacagatcagaacacgggtgctggctatgttcaagatcagctgtgacaaggacttgcaggctgtgggaggcaagtgacccttaacactacacttctccttatctttattggcttgataaacataattatttctaacactagcttatttccagttgcccataagcacatcagtacttttctctggctggaatagtaaactaaagtatggtacatctacctaaaggactattatgtggaataatacatactaatgaagtattacatgatttaaagactacaataaaaccaaacatgcttataacattaagaaaaacaataaagatacatgattgaaaccaagttgaaaaatagcatatgccttggaggaaatgtgctcaaattactaatgatttagtgttgtccctactttctctctcttttttctttcttttttttttattatggttagctgtcacatacaactttttttttttttgagatggggtctcgctctgtcaccaggctggagtgcagtggcgcgatctcggctcactgcaacctccacatcccatgttgaagtaattcttctgcctcagcctcccgagtagctgggactagaggaacgtgccaccatgactggctaattttctgtattttttagtagagacagagtttcaccatgttggccaggatggtctcgatctcctgaccttgtgatccacccgcctcagcctcccaaagtgttgggattacaggtgtgaaccactgtgcccggcctgtgtacaactttttaaatagggaatatgatagcttcgcatggtggtgtgcacctatagcccccactgcctggaaagctgaggtgggagaatcgcttgagtccaggagtttgaggttacagtgatccacgatcgtaccactacactccagcctgggcaacagagcaagaccctgtctcaaagcataaaatggaataacatatcaaatgaaacagggaaaatgaagctgacaatttatggaagccagggcttgtcacagtctctactgttattatgcattacctgggaatttatataagcccttaataataatgccaatgaacatctcatgtgtgctcacaatgttctggcactattataagtgcttcacaggttttatgtgttcttcgtaactttatggagtaggtaccatttgtgtctctttattataagtgagagaaatgaagtttatattatcaaggggactaaagtcacacggcttgtgggcactgtgccaagatttaaaattaaatttgatggttgaatacagttacttaatgaccatgttatattgcttcctgtgtaacatctgccatttatttcctcagctgtacaaatcctctgttttctctctgttacacactaacatcaatggctttgtacttgtgatgagagataaccttgccctagttgtgggcaacacatgcagaataatcctgttttacagctgcctttcgtgatcttattgcttgcttttttccagattcagggagaatgttgttgtctatttgtctcttacatctccttgatcatgtcttcattttttaatgtgctctgtacctgtcaaaaattttgaatgtacaccacatgctattgtctgaacttgagtataagataaaataaaattttattttaaatttt

SEQ ID NO: 220063 - DNA, 582 bp, Artificial Sequence
  derived and/or modified sequence
tcttctgggaatctccacaccctgaagacacagtgagttagcaccaccaccaggaattggcctttcagctctgtgcctgtctccagtcaggctggaataagtctcctcatatttgcaagctcggccctcccctggaatctaaagcctcctcagccttctgagtcagcctgaaaggaacaggccgaactgctgtatgggctctgggacacgtcactggaagacagccatcaagcatcatgaggtactgaggatacctcaatatcctggagaaggtagttgggactgccagtgtgacctcaccctctccagtcacccctcctcagttccagctatgagttcctgcaacttcacacatgccacctttgtgcttattggtatcccaggattagagaaagcccatttctgggttggcttccccctcctttccatgtatgtagtggcaatgtttggaaactgcatcgtggtcttcatcgtaaggacggaacgcagcctgcacgctccgatgtacctctttctctgcatgcttgcagccattgacctggccttatccacatccaccatgcctaagatccttgccctttt

SEQ ID NO: 220064 - DNA, 963 bp, Artificial Sequence
  derived and/or modified sequence
atgtcaagctgcaactttacgcatgccacgttcgtgctcatcggaatcccaggcctggagaaggcccatttctgggttggtttccccctgctttcaatgtacgtagtggccatgttcgggaattgcattgttgtgttcatagtgagaaccgaacggagcttgcacgcccctatgtacctttttctgtgcatgctggctgctattgacctcgctctgtcaacgagtacgatgccaaagatactggccctcttctggttcgactctagggagatcagcttcgaggcctgcctcacacagatgttttttatacacgcgctgtccgccatagagtccactatactgcttgcaatggcgtttgatcgctatgttgccatctgccacccacttcgccacgctgcggtcctgaacaatacagttactgcccaaatcggtatcgtagccgtggtacggggatccctcttcttcttcccacttcctctgcttattaagcggctggctttctgccacagtaatgttctaagccactcttactgcgtccatcaggatgtgatgaagcttgcctacgccgataccctgcccaacgtagtgtacggcctgacagctatattgctcgttatgggagtagacgtcatgttcatctcattgtcatacttccttattatacgcacagtgttgcagctaccctctaagtccgagcgcgctaaggcttttggtacatgtgtgagtcatatcggcgtcgtcctggcattttatgtgccgttaataggcctgagcgtcgtgcataggttcgggaattcactgcaccctatcgtccgcgtggtaatgggcgatatatatctgttgctgccaccagtgattaacccgataatttatggtgcaaaaacgaaacaaattcggactcgggttctggctatgttcaagatcagttgcgacaaggaccttcaggcagtcggaggaaagtag

SEQ ID NO: 220065 - DNA, 252 bp, Artificial Sequence
  derived and/or modified sequence
atgagttcatgcaactttactcacgcaacgtttgtgctaattggtattcctggcttggaaaaggcccacttttgggtgggcttccccttactttctatgtacgtagtagccatgtttggaaactgcatcgtcgtattcatcgtacggacagagaggtctctacacgccccaatgtacctttttttgtgcatgctggccgcaattgacctagcactctcaacaagcacaatgcctaaaattctggcactgtag

SEQ ID NO: 220066 - protein, 359 aa, Artificial Sequence
  derived and/or modified sequence
MPSLLLLFTAALLSSWAQLLTDANSWWSLALNPVQRPEMFIIGAQPVCSQLPGLSPGQRKLCQLYQEHMAYIGEGAKTGIKECQHQFRQRRWNCSTADNASVFGRVMQIGSRETAFTHAVSAAGVVNAISRACREGELSTCGCSRTARPKDLPRDWLWGGCGDNVEYGYRFAKEFVDAREREKNFAKGSEEQGRVLMNLQNNEAGRRAVYKMADVACKCHGVSGSCSLKTCWLQLAEFRKVGDRLKEKYDSAAAMRVTRKGRLELVNSRFTQPTPEDLVYVDPSPDYCLRNESTGSLGTQGRLCNKTSEGMDGCELMCCGRGYNQFKSVQVERCHCKFHWCCFVRCKKCTEIVDQYICK

SEQ ID NO: 220067 - DNA, 1080 bp, Artificial Sequence
  derived and/or modified sequence
atgcccagcctgctgctgctgttcaccgccgccctgctgagcagctgggcccagctgctgaccgacgccaacagctggtggagcctggccctgaaccccgtgcagagacccgagatgttcatcatcggcgcccagcccgtgtgcagccagctgcccggcctgagccccggccagagaaagctgtgccagctgtaccaggagcacatggcctacatcggcgagggcgccaagaccggcatcaaggagtgccagcaccagttcagacagagaagatggaactgcagcaccgccgacaacgccagcgtgttcggcagagtgatgcagatcggcagcagagagaccgccttcacccacgccgtgagcgccgccggcgtggtgaacgccatcagcagagcctgcagagagggcgagctgagcacctgcggctgcagcagaaccgccagacccaaggacctgcccagagactggctgtggggcggctgcggcgacaacgtggagtacggctacagattcgccaaggagttcgtggacgccagagagagagagaagaacttcgccaagggcagcgaggagcagggcagagtgctgatgaacctgcagaacaacgaggccggcagaagagccgtgtacaagatggccgacgtggcctgcaagtgccacggcgtgagcggcagctgcagcctgaagacctgctggctgcagctggccgagttcagaaaggtgggcgacagactgaaggagaagtacgacagcgccgccgccatgagagtgaccagaaagggcagactggagctggtgaacagcagattcacccagcccacccccgaggacctggtgtacgtggaccccagccccgactactgcctgagaaacgagagcaccggcagcctgggcacccagggcagactgtgcaacaagaccagcgagggcatggacggctgcgagctgatgtgctgcggcagaggctacaaccagttcaagagcgtgcaggtggagagatgccactgcaagttccactggtgctgcttcgtgagatgcaagaagtgcaccgagatcgtggaccagtacatctgcaagtag

SEQ ID NO: 220068 - DNA, 1080 bp, Artificial Sequence
  derived and/or modified sequence
atgccgagcctgctattgctcttcaccgccgcattactctccagctgggcgcaattactgacggatgcaaacagctggtggtctctagcactgaatccagtgcagcgacccgagatgtttattatcggggcacagcctgtgtgttcccagctgcccggccttagcccaggtcagcgtaagctatgccaactgtaccaggagcacatggcttatattggagagggcgccaagaccggaatcaaggaatgtcagcatcagttcaggcagcgtcgctggaactgctcgactgctgataacgccagcgttttcggccgagtgatgcagataggctcacgcgagactgccttcacgcacgcagtgtctgccgccggggtggtcaatgccattagtcgggcgtgccgggaaggggagctgagcacctgtggttgctcacggaccgctcgtcctaaagatctgcctcgcgactggctatggggcggttgcggtgacaacgtggagtatggctatcggttcgccaaggagtttgtggatgcccgggaacgtgaaaagaacttcgcgaaagggtcagaagaacagggcagggtactcatgaacttgcaaaataacgaggcaggacggcgtgcagtgtacaagatggcagacgtagcttgcaagtgtcacggggtgtcagggagctgctccctgaaaacatgttggttgcaactggccgaattccgcaaggtgggagaccgcctgaaggagaagtacgatagtgcggccgccatgagggtgacccgaaaaggccgccttgagctggttaattccaggtttactcaaccaacccccgaggacctcgtgtacgtcgatccgagcccagactattgtctcaggaacgagtctacaggttccctggggacccagggcagactatgcaacaagacttctgaaggcatggatggttgcgagctcatgtgctgtgggagaggctataatcagtttaaaagtgtgcaagtggagagatgtcactgcaagtttcactggtgctgcttcgtgagatgcaagaagtgcacagagatagtggaccagtatatctgtaagtag

SEQ ID NO: 220069 - DNA, 1080 bp, Artificial Sequence
  derived and/or modified sequence
atgccaagtctgctgctcttatttaccgcggccctcctgtcatcatgggcccagctgctaactgacgctaattcttggtggtctttagcattgaacccagtccagcggccagagatgttcatcattggcgcacaacccgtgtgcagtcaattgcccggtctttctcctggccagcggaagctgtgtcagctgtatcaggagcatatggcatacatcggcgaaggtgccaaaactggaatcaaagaatgtcagcaccagtttcgacagagaagatggaactgctccacagctgacaacgcatctgtgttcggtagggtcatgcaaatcggctcccgagagacggccttcacccatgctgtgtctgccgcaggggtggtgaacgcaatctccagggcctgtagagaaggcgagttaagtacctgtggttgcagccgtacagcacgtcccaaggacttgcctagggactggctctggggcggatgcggggataacgtagaatatgggtacaggtttgctaaggagttcgtggacgctagggaacgagagaagaacttcgccaaaggcagcgaggagcagggccgcgtgttaatgaacctgcaaaataacgaagcgggccggcgcgcggtgtacaaaatggccgatgtggcctgcaaatgccacggcgtgtccggatcttgtagtctgaagacctgttggctgcaacttgccgagtttagaaaggtcggcgataggctcaaagagaagtatgactcggcagcagccatgcgcgtgacaaggaaagggagactcgaactggtgaacagtcgatttacccagcccacacctgaggacctcgtctacgtggacccttcccccgactattgtctcagaaacgagagtactggtagtcttgggacacaagggcggctgtgtaataaaacttctgagggtatggacggctgtgagctcatgtgctgcggtaggggctataaccaatttaaaagtgtccaggtcgaaagatgtcactgtaaattccactggtgttgcttcgtgcggtgtaagaaatgtacggagattgtcgatcagtacatctgcaagtag

SEQ ID NO: 220070 - DNA, 1080 bp, Artificial Sequence
  derived and/or modified sequence
atgcctagtctccttcttttgtttaccgcagccctcttgtcctcttgggcccaactgctgactgatgcaaacagttggtggtcacttgcactgaatcccgtgcagcggccagaaatgttcattatcggcgcccagcctgtgtgttcccaattgcctggcctgagccccggtcagaggaaactctgccagctctatcaagaacatatggcttatattggggaaggagccaaaacagggattaaggaatgccagcatcagttcaggcagcgccgttggaattgcagcaccgctgataacgcctctgttttcgggagggtgatgcaaattgggtcaagggagaccgcgttcacacatgcagtcagtgctgccggtgtagtcaatgccatttcgagagcttgccgagagggcgagctgtccacctgcggatgcagtaggaccgcgcggcctaaagaccttccccgggactggctgtggggaggctgcggagataacgtggagtatggttaccggtttgcaaaggagttcgtcgatgcccgcgagcgtgaaaaaaactttgccaaaggtagtgaagaacagggtcgggtgttgatgaacctacagaacaacgaagccggccggcgcgccgtgtacaaaatggccgatgttgcatgtaaatgtcacggtgtgagcggcagttgtagcttaaaaacatgttggctgcagctagcagaattcagaaaagtgggggatcgacttaaagagaaatatgattctgcagcggcaatgcgagtgacccgaaagggtaggctcgagcttgttaattccagatttacgcagcccacgcctgaggatttagtctatgtcgatccaagccccgactactgcctgcgaaatgaatcaactgggagtcttggcacgcagggtagactctgtaacaaaacctcagaaggaatggacggttgcgaattaatgtgttgcggacggggctataatcaattcaaaagcgttcaggtcgagcgttgccactgtaagtttcactggtgctgcttcgtacgttgtaagaaatgcaccgaaatcgtggaccaatatatctgcaagtag

SEQ ID NO: 220071 - DNA, 1080 bp, Artificial Sequence
  derived and/or modified sequence
atgcccagcctgctgctgctcttcaccgctgccctgctgagctcctgggcccagctgctgacagatgccaacagctggtggagcctggccctgaaccctgtgcagaggcctgagatgttcatcatcggggcccagcctgtgtgcagccagctgcccggcctgagccctggccagaggaagctgtgccagctgtaccaggagcacatggcctacatcggggagggcgccaagacaggcatcaaggagtgccagcaccagttccggcagaggcgctggaactgcagcacagctgacaatgcctctgtgtttggccgggtgatgcagatcggcagccgggagacagccttcacccatgctgtgtctgctgctggggtggtgaatgccatcagccgggcctgccgggagggggagctgagcacctgtggctgcagcaggacagcccggcccaaggacctgccccgggactggctgtggggcggctgtggggacaacgtggagtatggctacagatttgccaaggagtttgtggatgcccgggagcgggagaagaactttgccaagggcagcgaggagcagggccgggtgctgatgaacctgcagaacaatgaggccggccggcgggctgtgtacaagatggctgatgtggcctgcaagtgccacggcgtgtctggcagctgcagcctgaagacctgctggctgcagctggccgagttcaggaaggtgggggaccggctgaaggagaagtatgattctgctgctgccatgagggtgaccaggaagggccgcctggagctggtgaacagccgcttcacccagcccaccccagaggacctggtgtatgtggaccccagcccagactactgcctgagaaatgaaagcacaggcagcctgggcacccagggccgcctgtgcaacaagaccagcgagggcatggatggctgtgagctgatgtgctgcggccggggctacaaccagttcaagtctgtgcaggtggagcgctgccactgcaagttccactggtgctgctttgtgcgctgcaagaagtgcacagagatcgtggaccagtacatctgcaagtag

SEQ ID NO: 220072 - DNA, 1080 bp, Artificial Sequence
  derived and/or modified sequence
atgcccagcctgctgctgctgttcaccgccgccctgctgagcagctgggcccaactcctgaccgatgcaaactcatggtggtcactggctctgaatcccgtccagcgtcccgagatgttcatcatcggcgcccaacctgtgtgcagccagctgccaggcctcagtcccgggcaacgcaaactgtgccagttatatcaggaacatatggcttacatcggtgagggcgccaagacgggtattaaagagtgccaacatcaatttaggcaaagaaggtggaactgtagcacagctgacaacgctagcgtgtttggtagagtaatgcagattggatcacgtgagacagccttcacgcatgccgtctccgcagctggagtggtgaacgcaatttcccgagcatgccgcgaaggggaactgtcaacttgcggatgtagcaggacggcccggcctaaggacctccctcgggactggctgtggggcgggtgtggtgacaatgtagagtacggataccgtttcgctaaagagttcgtggacgccagggaacgtgagaaaaactttgcaaagggctccgaggagcaggggagagtactgatgaatctgcagaacaatgaagccggtaggcgcgcagtctataaaatggctgacgtagcatgcaaatgtcacggcgtgagcggcagctgctctctcaagacatgctggctgcagttggccgagtttcggaaagtgggagacaggctaaaggaaaaatacgattccgctgctgctatgagggtaactaggaaaggacggcttgagctggtcaattcaagatttacccagcccactcctgaggacttagtatatgttgatccctctcctgattactgccttcggaatgagagcactggctcgcttggtacccaaggccgattatgcaataagacgtctgaagggatggacggatgtgaacttatgtgctgcggaagggggtacaatcaattcaagtctgtgcaagtggagcggtgtcattgtaagttccattggtgttgctttgtgcgttgcaaaaagtgcacggagatcgtcgatcaatacatctgcaaatag

SEQ ID NO: 220073 - DNA, 1080 bp, Artificial Sequence
  derived and/or modified sequence
atgcccagcctgctgctgctgttcaccgccgccctgctgagcagctgggcccaactgctgaccgacgcaaactcatggtggtctctggctcttaatcctgtgcagcggcccgaaatgttcatcatcggggcccagcccgtatgctcgcagctcccaggcttgtcccccggacaaaggaaactgtgccaactgtaccaagaacacatggcatacattggcgaaggtgccaaaacaggaatcaaagaatgccaacaccagtttcgccagcgtcgttggaactgttcaactgctgacaatgcgtctgttttcggacgcgtgatgcaaatagggtctcgtgagacagccttcacccacgcagttagcgccgctggcgtagtgaatgcaatttctcgggcctgtcgcgaaggagagctctcaacctgcggttgtagccggaccgccagacccaaagacctgccaagagattggttatgggggggctgtggggacaacgtggagtacgggtatcgttttgcgaaggaattcgtggacgctcgcgagcgcgaaaaaaattttgccaaaggctccgaggagcaggggcgcgtccttatgaatttacagaacaacgaggccggccggagagctgtctacaaaatggccgacgtggcatgtaagtgtcacggcgtatcaggctcctgtagtctgaaaacgtgctggttacagctggccgagttccgcaaggtgggggatcgcttaaaagagaagtacgatagcgctgctgctatgcgagtcactagaaaaggaaggttagagctagtgaactcacgtttcacccaacctacgcctgaagacttagtgtacgttgaccccagtcctgactactgcctgcggaatgaaagcactggctctctcggcacgcaaggccgtctgtgtaacaagacttcagaaggcatggatggttgcgagctgatgtgttgcggacggggatacaaccagttcaagagcgtccaggtggagaggtgccactgcaagtttcactggtgttgcttcgtacgatgcaaaaagtgtacagaaattgtcgaccagtatatttgcaagtag

SEQ ID NO: 220074 - DNA, 1080 bp, Artificial Sequence
  derived and/or modified sequence
atgcccagcctgctgctgctgttcaccgccgccctgctgagcagctgggcccagttgctcaccgacgctaacagctggtggtctttggccttaaaccctgtccagagacctgaaatgtttataattggagctcaaccggtctgttcccagcttcccggactctctcctgggcaacgcaaactttgccagttgtatcaggagcacatggcctacattggagaaggagcaaaaaccgggataaaggagtgtcagcatcagttccggcaaagaaggtggaactgcagtacggcagataatgcttcagtgttcggaagggtgatgcaaattggctccagggagaccgccttcacccatgccgttagcgccgctggtgtggtcaatgccatatcccgcgcttgtcgcgagggcgaactgtcaacctgcggatgctcacgaacagctagaccaaaagacctgccacgcgactggctgtggggcggctgcggcgacaatgtggaatacggatatcggtttgccaaagaattcgtggacgcaagggagcgtgagaagaactttgcgaagggcagcgaagaacagggacgggttttaatgaatctgcagaacaatgaagcagggcgccgagccgtttacaagatggctgatgttgcatgcaagtgccatggcgtgagtggctcatgctcacttaagacatgctggctgcaattggccgagttcaggaaggttggagaccgtcttaaggaaaaatacgatagcgctgcagctatgcgggtgactcgaaaagggcgcctggaactggttaattccaggttcacccaaccaaccccggaggatctggtctacgtcgacccaagtcccgactactgcctcagaaatgagtccacggggagcctggggactcagggcagactctgcaataagaccagtgaagggatggacggatgtgagctaatgtgctgtggacgggggtataaccaatttaaatctgtgcaggtggagaggtgccattgtaagtttcattggtgttgcttcgtgcgatgcaagaaatgcactgagatcgtggatcaatacatctgcaagtag

SEQ ID NO: 220075 - DNA, 1080 bp, Artificial Sequence
  derived and/or modified sequence
atgcctagccttttgctactattcaccgcagcccttctctcctcgtgggcacagctactaacagacgccaattcatggtggtcactggccctgaatccagtccaaaggcctgaaatgttcatcatcggcgctcaacctgtgtgctctcagcttcctgggctgagccccggtcagcgcaagctgtgccagttgtaccaggaacacatggcttatatcggcgagggggcaaaaacaggcatcaaagagtgccagcatcagtttcggcagcgtaggtggaattgctctacagctgacaacgcaagcgttttcggacgcgttatgcaaatcggatctcgagaaacagcgttcacacacgccgtgagcgccgcaggagtcgtgaacgcaattagtcgtgcctgccgtgagggggagctctcgacttgcgggtgttcacggactgcgaggcctaaagatctacctcgggattggctgtggggcggttgcggggataatgtggagtacggttacagattcgctaaggaattcgtcgatgcccgagaaagggagaagaactttgctaaggggagtgaagagcagggacgagtgctgatgaacctgcagaataacgaggccggacgaagagctgtgtataaaatggctgatgtggcgtgcaaatgtcatggagtcagtggcagctgttccttgaagacttgctggctacagctggctgaatttagaaaggtgggcgaccgccttaaagagaaatatgacagtgccgcagctatgcgagtgacccgtaagggaaggctggagcttgtaaacagtcgattcactcagcccacccccgaagacctggtctacgtagacccaagccctgattattgtctacgaaacgaatcaacaggatcccttggcacccaaggcagactgtgcaataaaacgtccgaaggcatggatggttgtgagctcatgtgttgcggcagggggtataaccagtttaagtctgtccaggttgaacgctgtcactgcaaatttcactggtgctgctttgtgcgctgtaaaaaatgtacagaaatcgtggaccagtacatatgcaagtag

SEQ ID NO: 220076 - DNA, 1080 bp, Artificial Sequence
  derived and/or modified sequence
atgccaagtttgctcctgttgtttacagccgctctgctcagcagttgggcccagttgctgacagatgcaaacagttggtggagccttgcccttaatcccgttcagagacctgaaatgtttatcatcggcgcacagcctgtctgctcccaactcccaggtctttctccgggtcagagaaaactctgtcaattgtaccaggaacacatggcttatattggtgaaggggctaagacaggcattaaagaatgtcaacaccaattcagacaaaggcgctggaactgttcaaccgctgataacgccagcgtgttcggtcgggtgatgcagatcggatcccgcgagaccgctttcactcacgcagtgtctgccgcaggcgtcgtaaacgcaatctcacgcgcatgcagggaaggagaacttagcacctgtggatgctcaaggaccgctcggccaaaagatctgcccagggactggctctggggtggatgcggtgacaacgtggagtacggatatcggtttgcaaaggagtttgttgatgctagagagcgggaaaagaactttgctaaaggctcggaagagcaaggccgtgtgcttatgaatcttcaaaataacgaagcaggaaggagagctgtgtataagatggccgatgtcgcctgcaagtgtcacggcgtgtccggtagctgcagcttgaaaacttgttggctccaactggctgaattccgtaaggtaggtgaccgactcaaggaaaagtacgactccgcagccgcaatgagggtgactagaaaaggtagactggagttggtcaacagcagatttactcagcccacaccagaggatctcgtgtatgtagatccaagccccgattactgcctaaggaatgagagcacagggagcctcgggacccaaggacggctgtgtaacaagacctctgaaggaatggatggatgtgagctcatgtgttgtggcagaggctacaaccagtttaagagtgtacaggtggagcgctgtcactgtaaattccattggtgctgctttgtgcgttgtaagaagtgcaccgagatagtagatcagtacatctgcaagtag

SEQ ID NO: 220077 - DNA, 1080 bp, Artificial Sequence
  derived and/or modified sequence
atgccatctcttttgttgctttttaccgccgctttactcagctcgtgggctcaactacttaccgacgcaaattcttggtggtccctcgcacttaaccctgttcagagacccgaaatgttcatcatcggggcacagccagtgtgttcacagctgcctggcctgtctcctggccagcgaaagctgtgccaattgtaccaggaacatatggcctacattggcgaaggggctaaaactggtattaaggaatgccagcatcagtttcgccagagaaggtggaactgttctaccgcagataatgcatccgtctttggaagggtaatgcagatcggctcgagggagactgctttcacccacgccgtctctgcagctggtgtcgtaaatgcaatctcccgggcatgtagagagggagaactttccacctgcggctgttcacggaccgcccgtcccaaggatttgcccagggattggttatggggcggatgcggggacaatgttgagtatgggtatcgtttcgccaaggaattcgtcgatgccagagaaagggagaaaaacttcgccaaagggtcggaggagcagggtagggtattaatgaacctccaaaataacgaggccggtcggagggccgtctacaaaatggcagacgttgcatgcaagtgtcatggcgtaagtgggtcttgctctctgaagacctgttggctgcagctcgccgaatttcggaaagttggcgataggctgaaagaaaaatacgacagcgcagccgctatgagagttacacgcaagggcagactggaactggtcaattcaaggttcacccagccaaccccggaagacttggtttacgtggaccctagccctgattactgcctcaggaatgaaagcacgggcagcctgggaacccagggacgactgtgcaataagacatcagaaggcatggacggctgcgagctgatgtgctgcgggaggggctataaccagtttaagtctgtccaggtggagaggtgtcactgcaagtttcattggtgttgttttgtgcgttgcaagaagtgtacagaaattgtcgaccaatacatatgcaaatag

SEQ ID NO: 220078 - DNA, 2184 bp, Artificial Sequence
  derived and/or modified sequence
tattcttccaaatggaaactgctaatttttgaagcagaaggttgacagcttcagtaagatctcaagagagcgagaagactggaatcagggaaccctactctggaaactgtcagtcccagggcactggggagggctgaggccgaccatgcccagcctgctgctgctgttcacggctgctctgctgtccagctgggctcagcttctgacagacgccaactcctggtggtcattagctttgaacccggtgcagagacccgagatgtttatcatcggtgcccagcccgtgtgcagtcagcttcccgggctctcccctggccagaggaagctgtgccaattgtaccaggagcacatggcctacataggggagggagccaagactggcatcaaggaatgccagcaccagttccggcagcggcggtggaattgcagcacagcggacaacgcatctgtctttgggagagtcatgcagataggcagccgagagaccgccttcacccacgcggtgagcgccgcgggcgtggtcaacgccatcagccgggcctgccgcgagggcgagctctccacctgcggctgcagccggacggcgcggcccaaggacctgccccgggactggctgtggggcggctgtggggacaacgtggagtacggctaccgcttcgccaaggagtttgtggatgcccgggagcgagagaagaactttgccaaaggatcagaggagcagggccgggtgctcatgaacctgcaaaacaacgaggccggtcgcagggctgtgtataagatggcagacgtagcctgcaaatgccacggcgtctcggggtcctgcagcctcaagacctgctggctgcagctggccgagttccgcaaggtcggggaccggctgaaggagaagtacgacagcgcggccgccatgcgcgtcacccgcaagggccggctggagctggtcaacagccgcttcacccagcccaccccggaggacctggtctatgtggaccccagccccgactactgcctgcgcaacgagagcacgggctccctgggcacgcagggccgcctctgcaacaagacctcggagggcatggatggctgtgagctcatgtgctgcgggcgtggctacaaccagttcaagagcgtgcaggtggagcgctgccactgcaagttccactggtgctgcttcgtcaggtgtaagaagtgcacggagatcgtggaccagtacatctgtaaatagcccggagggcctgctcccggcccccctgcactctgcctcacaaaggtctatattatataaatctatataaatctattttatatttgtataagtaaatgggtgggtgctatacaatggaaagatgaaaatggaaaggaagagcttatttaagagacgctggagatctctgaggagtggactttgctggttctctcctcttggtgggtgggagacagggctttttctctccctctggcgaggactctcaggatgtagggacttggaaatatttactgtctgtccaccacggcctggaggagggaggttgtggttggatggaggagatgatcttgtctggaagtctagagtctttgttggttagaggactgcctgtgatcctggccactaggccaagaggccctatgaaggtggcgggaactcagcttcaacctcgatgtcttcagggtcttgtccagaatgtagatgggttccgtaagaggcctggtgctctcttactctttcatccacgtgcacttgtgcggcatctgcagtttacaggaacggctccttccctaaaatgagaagtccaaggtcatctctggcccagtgaccacagagagatctgcacctcccggacttcaggcctgcctttccagcgagaattcttcatcctccacggttcactagctcctacctgaagaggaaagggggccatttgacctgacatgtcaggaaagccctaaactgaatgtttgcgcctgggctgcagaagccagggtgcatgaccaggctgcgtggacgttatactgtcttcccccacccccggggaggggaagcttgagctgctgctgtcactcctccaccgagggaggcctcacaaaccacaggacgctgcaacgggtcaggctggcgggcccggcgtgctcatcatctctgccccaggtgtacggtttctctctgacattaaatgcccttcatgg

SEQ ID NO: 220079 - DNA, 2303 bp, Artificial Sequence
  derived and/or modified sequence
ggctctagttaccgtgtcagcctgtcctgggggcagtcacagccacagtgaccattagcaggcacccaggcctgtctttggctcggaaacggtggcccccaatgtagcctagtttgaacctaggaactgcaggaccagagagattccactggagcctgatggacgggtgacagagggaaccctactctggaaactgtcagtcccagggcactggggagggctgaggccgaccatgcccagcctgctgctgctgttcacggctgctctgctgtccagctgggctcagcttctgacagacgccaactcctggtggtcattagctttgaacccggtgcagagacccgagatgtttatcatcggtgcccagcccgtgtgcagtcagcttcccgggctctcccctggccagaggaagctgtgccaattgtaccaggagcacatggcctacataggggagggagccaagactggcatcaaggaatgccagcaccagttccggcagcggcggtggaattgcagcacagcggacaacgcatctgtctttgggagagtcatgcagataggcagccgagagaccgccttcacccacgcggtgagcgccgcgggcgtggtcaacgccatcagccgggcctgccgcgagggcgagctctccacctgcggctgcagccggacggcgcggcccaaggacctgccccgggactggctgtggggcggctgtggggacaacgtggagtacggctaccgcttcgccaaggagtttgtggatgcccgggagcgagagaagaactttgccaaaggatcagaggagcagggccgggtgctcatgaacctgcaaaacaacgaggccggtcgcagggctgtgtataagatggcagacgtagcctgcaaatgccacggcgtctcggggtcctgcagcctcaagacctgctggctgcagctggccgagttccgcaaggtcggggaccggctgaaggagaagtacgacagcgcggccgccatgcgcgtcacccgcaagggccggctggagctggtcaacagccgcttcacccagcccaccccggaggacctggtctatgtggaccccagccccgactactgcctgcgcaacgagagcacgggctccctgggcacgcagggccgcctctgcaacaagacctcggagggcatggatggctgtgagctcatgtgctgcgggcgtggctacaaccagttcaagagcgtgcaggtggagcgctgccactgcaagttccactggtgctgcttcgtcaggtgtaagaagtgcacggagatcgtggaccagtacatctgtaaatagcccggagggcctgctcccggcccccctgcactctgcctcacaaaggtctatattatataaatctatataaatctattttatatttgtataagtaaatgggtgggtgctatacaatggaaagatgaaaatggaaaggaagagcttatttaagagacgctggagatctctgaggagtggactttgctggttctctcctcttggtgggtgggagacagggctttttctctccctctggcgaggactctcaggatgtagggacttggaaatatttactgtctgtccaccacggcctggaggagggaggttgtggttggatggaggagatgatcttgtctggaagtctagagtctttgttggttagaggactgcctgtgatcctggccactaggccaagaggccctatgaaggtggcgggaactcagcttcaacctcgatgtcttcagggtcttgtccagaatgtagatgggttccgtaagaggcctggtgctctcttactctttcatccacgtgcacttgtgcggcatctgcagtttacaggaacggctccttccctaaaatgagaagtccaaggtcatctctggcccagtgaccacagagagatctgcacctcccggacttcaggcctgcctttccagcgagaattcttcatcctccacggttcactagctcctacctgaagaggaaagggggccatttgacctgacatgtcaggaaagccctaaactgaatgtttgcgcctgggctgcagaagccagggtgcatgaccaggctgcgtggacgttatactgtcttcccccacccccggggaggggaagcttgagctgctgctgtcactcctccaccgagggaggcctcacaaaccacaggacgctgcaacgggtcaggctggcgggcccggcgtgctcatcatctctgccccaggtgtacggtttctctctgacattaaatgcccttcatggaggttttgctccctttccttatttggacccac

SEQ ID NO: 220080 - DNA, 1437 bp, Artificial Sequence
  derived and/or modified sequence
aaatgctccagatcctcagtgttcaagaacctcaggaagcttcgcagtcctgcctcgtgcctgcttgaacagctggatgtgggcaggaggctgtgggagcgggccatgccagcagaatcccgccttactctggggacttactcttgtcacagcccctggtgtcctgagggtcatttcagtgtcatggaaccctactctggaaactgtcagtcccagggcactggggagggctgaggccgaccatgcccagcctgctgctgctgttcacggctgctctgctgtccagctgggctcagcttctgacagacgccaactcctggtggtcattagctttgaacccggtgcagagacccgagatgtttatcatcggtgcccagcccgtgtgcagtcagcttcccgggctctcccctggccagaggaagctgtgccaattgtaccaggagcacatggcctacataggggagggagccaagactggcatcaaggaatgccagcaccagttccggcagcggcggtggaattgcagcacagcggacaacgcatctgtctttgggagagtcatgcagataggcagccgagagaccgccttcacccacgcggtgagcgccgcgggcgtggtcaacgccatcagccgggcctgccgcgagggcgagctctccacctgcggctgcagccggacggcgcggcccaaggacctgccccgggactggctgtggggcggctgtggggacaacgtggagtacggctaccgcttcgccaaggagtttgtggatgcccgggagcgagagaagaactttgccaaaggatcagaggagcagggccgggtgctcatgaacctgcaaaacaacgaggccggtcgcagggctgtgtataagatggcagacgtagcctgcaaatgccacggcgtctcggggtcctgcagcctcaagacctgctggctgcagctggccgagttccgcaaggtcggggaccggctgaaggagaagtacgacagcgcggccgccatgcgcgtcacccgcaagggccggctggagctggtcaacagccgcttcacccagcccaccccggaggacctggtctatgtggaccccagccccgactactgcctgcgcaacgagagcacgggctccctgggcacgcagggccgcctctgcaacaagacctcggagggcatggatggctgtgagctcatgtgctgcgggcgtggctacaaccagttcaagagcgtgcaggtggagcgctgccactgcaagttccactggtgctgcttcgtcaggtgtaagaagtgcacggagatcgtggaccagtacatctgtaaatagcccggagggcctgctcccggcccccctgcactctgcctcacaaaggtctatattatataaatctatataaatctattttatatttgtataagtaaatgggtgggtgctatacaat

SEQ ID NO: 220081 - protein, 406 aa, Artificial Sequence
  derived and/or modified sequence
MAQAPADPGREGHLEQRILQVLTEAGSPVKLAQLVKECQAPKRELNQVLYRMKKELKVSLTSPATWCLGGTDPEGEGPAELALSSPEEDIYRFLKDNGPQRALVIAQALGMRTAKDVNRDLYRMKSRHLLDMDEQSKAWTIYRPEDSGRRAKSASIIYQHNPINMICQNGPNSWISIANSEAIQIGHGNIITRQTVSREDGSAGPRHLPSMAPGDSSTWGTLVDPWGPQDIHMEQSILRRVQLGHSNEMRLHGVPSEGPAHIPPGSPPVSATAAGPEASFEARIPSPGTHPEGEAAQRIHMKSCFLEDATIGNSNKMSISPGVAGPGGVAGSGEGEPGEDAGRRPADTQSRSHFPRDIGQPITPSHSKLTPKLETMTLGNRSHKAAEGSHYVDEASHEGSWWGGGI

SEQ ID NO: 220082 - protein, 380 aa, Artificial Sequence
  derived and/or modified sequence
MAQAPADPGREGHLEQRILQVLTEAGSPVKLAQLVKECQAPKRELNQVLYRMKKELKVSLTSPATWCLGGTDPEGEGPAELALSSPAERPQQHAATIPETPGPQFSQQREEDIYRFLKDNGPQRALVIAQALGMRTAKDVNRDLYRMKSRHLLDMDEQSKAWTIYRPEDSGRRAKSASIIYQHNPINMICQNGPNSWISIANSEAIQIGHGNIITRQTVSREDGSAGPRHLPSMAPGDSSTWGTLVDPWGPQDIHMEQSILRRVQLGHSNEMRLHGVPSEGPAHIPPGSPPVSATAAGPEASFEARIPSPGTHPEGEAAQRIHMKSCFLEDATIGNSNKMSISPGVAGPGGVAGSGEGEPGEDAGRRPADTQARSFDGQE

SEQ ID NO: 220083 - protein, 429 aa, Artificial Sequence
  derived and/or modified sequence
MAQAPADPGREGHLEQRILQVLTEAGSPVKLAQLVKECQAPKRELNQVLYRMKKELKVSLTSPATWCLGGTDPEGEGPAELALSSPAERPQQHAATIPETPGPQFSQQREEDIYRFLKDNGPQRALVIAQALGMRTAKDVNRDLYRMKSRHLLDMDEQSKAWTIYRPEDSGRRAKSASIIYQHNPINMICQNGPNSWISIANSEAIQIGHGNIITRQTVSREDGSAGPRHLPSMAPGDSSTWGTLVDPWGPQDIHMEQSILRRVQLGHSNEMRLHGVPSEGPAHIPPGSPPVSATAAGPEASFEARIPSPGTHPEGEAAQRIHMKSCFLEDATIGNSNKMSISPGVAGPGGVAGSGEGEPGEDAGRRPADTQSRSHFPRDIGQPITPSHSKLTPKLETMTLGNRSHKAAEGSHYVDEASHEGSWWGGGI

SEQ ID NO: 220084 - DNA, 1221 bp, Artificial Sequence
  derived and/or modified sequence
atggcccaggcccccgccgaccccggcagagagggccacctggagcagagaatcctgcaggtgctgaccgaggccggcagccccgtgaagctggcccagctggtgaaggagtgccaggcccccaagagagagctgaaccaggtgctgtacagaatgaagaaggagctgaaggtgagcctgaccagccccgccacctggtgcctgggcggcaccgaccccgagggcgagggccccgccgagctggccctgagcagccccgaggaggacatctacagattcctgaaggacaacggcccccagagagccctggtgatcgcccaggccctgggcatgagaaccgccaaggacgtgaacagagacctgtacagaatgaagagcagacacctgctggacatggacgagcagagcaaggcctggaccatctacagacccgaggacagcggcagaagagccaagagcgccagcatcatctaccagcacaaccccatcaacatgatctgccagaacggccccaacagctggatcagcatcgccaacagcgaggccatccagatcggccacggcaacatcatcaccagacagaccgtgagcagagaggacggcagcgccggccccagacacctgcccagcatggcccccggcgacagcagcacctggggcaccctggtggacccctggggcccccaggacatccacatggagcagagcatcctgagaagagtgcagctgggccacagcaacgagatgagactgcacggcgtgcccagcgagggccccgcccacatcccccccggcagcccccccgtgagcgccaccgccgccggccccgaggccagcttcgaggccagaatccccagccccggcacccaccccgagggcgaggccgcccagagaatccacatgaagagctgcttcctggaggacgccaccatcggcaacagcaacaagatgagcatcagccccggcgtggccggccccggcggcgtggccggcagcggcgagggcgagcccggcgaggacgccggcagaagacccgccgacacccagagcagaagccacttccccagagacatcggccagcccatcacccccagccacagcaagctgacccccaagctggagaccatgaccctgggcaacagaagccacaaggccgccgagggcagccactacgtggacgaggccagccacgagggcagctggtggggcggcggcatctag

SEQ ID NO: 220085 - DNA, 1143 bp, Artificial Sequence
  derived and/or modified sequence
atggcccaggcccccgccgaccccggcagagagggccacctggagcagagaatcctgcaggtgctgaccgaggccggcagccccgtgaagctggcccagctggtgaaggagtgccaggcccccaagagagagctgaaccaggtgctgtacagaatgaagaaggagctgaaggtgagcctgaccagccccgccacctggtgcctgggcggcaccgaccccgagggcgagggccccgccgagctggccctgagcagccccgccgagagaccccagcagcacgccgccaccatccccgagacccccggcccccagttcagccagcagagagaggaggacatctacagattcctgaaggacaacggcccccagagagccctggtgatcgcccaggccctgggcatgagaaccgccaaggacgtgaacagagacctgtacagaatgaagagcagacacctgctggacatggacgagcagagcaaggcctggaccatctacagacccgaggacagcggcagaagagccaagagcgccagcatcatctaccagcacaaccccatcaacatgatctgccagaacggccccaacagctggatcagcatcgccaacagcgaggccatccagatcggccacggcaacatcatcaccagacagaccgtgagcagagaggacggcagcgccggccccagacacctgcccagcatggcccccggcgacagcagcacctggggcaccctggtggacccctggggcccccaggacatccacatggagcagagcatcctgagaagagtgcagctgggccacagcaacgagatgagactgcacggcgtgcccagcgagggccccgcccacatcccccccggcagcccccccgtgagcgccaccgccgccggccccgaggccagcttcgaggccagaatccccagccccggcacccaccccgagggcgaggccgcccagagaatccacatgaagagctgcttcctggaggacgccaccatcggcaacagcaacaagatgagcatcagccccggcgtggccggccccggcggcgtggccggcagcggcgagggcgagcccggcgaggacgccggcagaagacccgccgacacccaggccagaagcttcgacggccaggagtag

SEQ ID NO: 220086 - DNA, 1290 bp, Artificial Sequence
  derived and/or modified sequence
atggcccaggcccccgccgaccccggcagagagggccacctggagcagagaatcctgcaggtgctgaccgaggccggcagccccgtgaagctggcccagctggtgaaggagtgccaggcccccaagagagagctgaaccaggtgctgtacagaatgaagaaggagctgaaggtgagcctgaccagccccgccacctggtgcctgggcggcaccgaccccgagggcgagggccccgccgagctggccctgagcagccccgccgagagaccccagcagcacgccgccaccatccccgagacccccggcccccagttcagccagcagagagaggaggacatctacagattcctgaaggacaacggcccccagagagccctggtgatcgcccaggccctgggcatgagaaccgccaaggacgtgaacagagacctgtacagaatgaagagcagacacctgctggacatggacgagcagagcaaggcctggaccatctacagacccgaggacagcggcagaagagccaagagcgccagcatcatctaccagcacaaccccatcaacatgatctgccagaacggccccaacagctggatcagcatcgccaacagcgaggccatccagatcggccacggcaacatcatcaccagacagaccgtgagcagagaggacggcagcgccggccccagacacctgcccagcatggcccccggcgacagcagcacctggggcaccctggtggacccctggggcccccaggacatccacatggagcagagcatcctgagaagagtgcagctgggccacagcaacgagatgagactgcacggcgtgcccagcgagggccccgcccacatcccccccggcagcccccccgtgagcgccaccgccgccggccccgaggccagcttcgaggccagaatccccagccccggcacccaccccgagggcgaggccgcccagagaatccacatgaagagctgcttcctggaggacgccaccatcggcaacagcaacaagatgagcatcagccccggcgtggccggccccggcggcgtggccggcagcggcgagggcgagcccggcgaggacgccggcagaagacccgccgacacccagagcagaagccacttccccagagacatcggccagcccatcacccccagccacagcaagctgacccccaagctggagaccatgaccctgggcaacagaagccacaaggccgccgagggcagccactacgtggacgaggccagccacgagggcagctggtggggcggcggcatctag

SEQ ID NO: 220087 - DNA, 1221 bp, Artificial Sequence
  derived and/or modified sequence
atggcccaggcccctgccgaccccggcagggagggacatctggaacagaggatcctgcaggtgttgaccgaggcagggtcccccgtgaagctagcacagctggtgaaagagtgccaggctcccaagcgagagctgaatcaggtgttgtaccgcatgaagaaggaactcaaagtgagcctgacgtcaccagccacatggtgtcttgggggcacagatcccgaaggcgaagggccagctgaattagcccttagctccccggaggaggacatctatcgcttcctcaaagataacgggccgcagagagcgttggtgatcgcgcaggcccttggcatgaggaccgcaaaagatgtcaatagggacttatatagaatgaagtcgcgccatctgcttgacatggatgaacagtctaaggcatggaccatctatcgaccagaggatagtgggcgccgggctaagagcgcatcaattatttaccagcataatccaataaacatgatatgtcagaatggacctaactcttggattagcatcgccaatagtgaagccatccaaataggacacggcaacattatcactagacagacagtgagtcgagaggacggatcagctgggcccagacacctgccttcaatggcccctggagacagctccacatggggaacattggtagacccttgggggcctcaggatattcacatggagcagtctatcctacgccgggttcagctgggccacagcaatgagatgcggttgcacggcgtgccttccgagggtccggcgcacatcccgccaggcagccctccagtcagcgctaccgcagccggcccagaagccagctttgaggcgcgcattccctccccagggacccacccagagggcgaggcagcccagcgtattcacatgaagtcttgttttcttgaagatgcaaccataggaaattcaaacaagatgtcgatctccccaggagtggccggcccgggcggggtggccggatctggagaaggcgagcccggtgaggacgccggacggagacccgccgatactcagagccgcagccactttccaagagatattggacagcccatcacgccgtcccacagcaaactcacccccaaactggagaccatgaccctaggcaacagatcccacaaggccgccgaaggctcccactatgtggatgaggccagccatgagggttcctggtggggaggcggtatctag

SEQ ID NO: 220088 - DNA, 1143 bp, Artificial Sequence
  derived and/or modified sequence
atggcacaggctcccgcagatccaggccgggaggggcacctggagcagcgtattctccaggttttgaccgaagctggtagccccgtgaaacttgcccaattggtcaaagagtgtcaggcccccaagcgggagctgaaccaggtgctataccggatgaagaaagaactgaaagtgtctttgacaagtcccgccacatggtgcctgggcgggaccgatcccgaaggtgaagggccagcagaactggctctgtcgagccccgcagaaaggccacaacagcacgctgcgaccataccagagactccgggccctcaattcagccagcagcgggaggaggatatctacaggtttctgaaggacaacggccctcagcgagctttggtgattgcccaggcactgggcatgcggaccgcaaaggacgttaaccgggacctgtaccgcatgaaatcccgccatctgttagatatggatgaacagtccaaggcctggacaatatatcgtccagaggattccggccggcgagctaagagcgcttccattatttaccagcataatccaatcaacatgatctgccagaatggaccaaatagctggatcagcattgccaattcggaagcaatccagatcggccacggaaacattatcaccagacaaacagtgtcccgcgaggatgggtccgcgggtcctcgccacttaccctccatggccccaggtgattcctccacttggggcacgctcgtggatccatgggggccacaggacattcatatggagcagagcatcttgaggcgggtgcagctgggacatagcaatgagatgagattgcacggcgtgccctccgaggggcctgcacatataccacccggctccccacctgtctctgctactgcagccgggccggaagcctccttcgaagcccggataccatccccaggcacgcatcctgaaggggaggctgcccaacggatccatatgaagtcctgctttcttgaggacgcgaccatcgggaattctaacaaaatgtccattagccccggcgtcgcaggaccaggtggagtggccggtagtggtgaaggagaacctggggaggacgccggtcgaaggcccgccgacacccaggctcggtcctttgacggtcaggaatag

SEQ ID NO: 220089 - DNA, 1290 bp, Artificial Sequence
  derived and/or modified sequence
atggctcaggcccccgccgaccctggacgggagggacacctggaacagagaatcctacaggttctgactgaggcaggtagtcccgtcaaacttgctcaactcgtgaaagaatgtcaggcccccaagcgggagctgaatcaggtgctgtatagaatgaagaaggagttgaaagtgtctctcaccagtccggcaacatggtgcttaggcgggaccgatccagagggggagggacctgccgagctcgccctgtctagtcctgccgagcgacctcagcagcacgccgctactattcccgagacacctggaccgcaattttcacaacagcgggaagaagatatctaccgctttctgaaagacaatgggcctcagcgggccctggtgatcgctcaggctctgggcatgcgaacagccaaagacgttaatcgcgacttatatcgcatgaaaagtaggcacctgctggatatggacgaacagagcaaagcctggacgatctacaggcccgaggattcggggcggcgtgctaaaagtgcttccatcatataccagcacaaccctataaacatgatctgtcagaacggccccaacagctggatatcaattgcaaacagcgaagctattcaaatcggtcatggaaatatcataacaagacagacggtgagtcgagaggacggatctgcaggaccccgtcacctgccctctatggcaccgggcgatagcagtacatggggtaccctggtcgacccctggggtccccaagacattcacatggagcagtctatactgagacgagtgcagctgggccacagcaacgagatgcggcttcacggagttccttctgagggtccagcgcatatccccccagggagccctcccgtgagtgccacagcagccggtcctgaggctagcttcgaagcacgtattcctagccctgggactcatcccgagggcgaggccgcccaacggatccacatgaagagctgcttcttagaggatgccacaatcggtaatagtaataagatgtctatttcgccgggcgtggcgggccccggcggcgtcgccggcagcggggagggggagcctggagaggacgctgggcgtagacccgctgatacccagtccagaagccactttcccagagatatcgggcaacctattacaccgtctcattcaaaactgactccaaaactggaaacaatgaccttaggaaacagatcgcacaaggcagcggaggggtcgcattatgtggacgaggcatcacacgagggaagctggtggggtgggggcatctag

SEQ ID NO: 220090 - DNA, 1221 bp, Artificial Sequence
  derived and/or modified sequence
atggcccaggccccagctgaccccggccgggagggccacctggagcagaggatcctgcaggtgctgacagaagctggcagccctgtgaagctggcccagctggtgaaggagtgccaggcccccaagcgggagctgaaccaggtgctgtacaggatgaagaaggagctgaaggtgtccctgaccagccctgccacctggtgcctgggcggcacagatcctgagggggagggccctgctgagctggccctgagcagccctgaggaggacatctaccgcttcctgaaggacaatggcccccagagggccctggtgattgcccaggccctgggcatgaggacagccaaggatgtgaacagagacctgtacaggatgaagagccgccacctgctggacatggatgagcagagcaaggcctggaccatctacagaccagaagattctggaagaagagccaagagcgccagcatcatctaccagcacaaccccatcaacatgatctgccagaatggccccaacagctggatcagcatcgccaacagcgaggccatccagattggacatggcaacatcatcacccggcagacagtgtccagagaagatggcagcgctggccccaggcacctgcccagcatggcccctggggacagcagcacctggggcaccctggtggacccctggggcccccaggacatccacatggagcagagcatcctgcggcgggtgcagctgggccacagcaatgagatgaggctgcacggcgtgcccagcgagggccctgcccacatccccccaggcagcccccctgtgtctgccacagctgctggccctgaggccagctttgaggcccgcatccccagccctggcacccaccctgagggggaggccgcccagaggatccacatgaagagctgcttcctggaggatgccaccatcggcaacagcaacaagatgagcatcagccctggggtggccggccctgggggcgtggccggcagcggggagggggagcctggagaagatgctggaagaagacctgctgacacccagagccgcagccacttcccccgggacatcggccagcccatcacccccagccacagcaagctgacccccaagctggagaccatgaccctgggcaacagaagccacaaggctgctgagggcagccactacgtggatgaggccagccatgagggctcctggtggggcggcggcatctag

SEQ ID NO: 220091 - DNA, 1143 bp, Artificial Sequence
  derived and/or modified sequence
atggcccaggccccagctgaccccggccgggagggccacctggagcagaggatcctgcaggtgctgacagaagctggcagccctgtgaagctggcccagctggtgaaggagtgccaggcccccaagcgggagctgaaccaggtgctgtacaggatgaagaaggagctgaaggtgtccctgaccagccctgccacctggtgcctgggcggcacagatcctgagggggagggccctgctgagctggccctgagcagccctgctgagcggccccagcagcacgccgccaccatccctgagaccccaggcccccagttcagccagcagcgggaggaggacatctaccgcttcctgaaggacaatggcccccagagggccctggtgattgcccaggccctgggcatgaggacagccaaggatgtgaacagagacctgtacaggatgaagagccgccacctgctggacatggatgagcagagcaaggcctggaccatctacagacctgaggacagcggccggcgggccaagagcgccagcatcatctaccagcacaaccccatcaacatgatctgccagaatggccccaacagctggatcagcatcgccaacagcgaggccatccagatcggccacggcaacatcatcacccggcagacagtgtcccgggaggatggcagcgctggccccaggcacctgcccagcatggcccctggggacagcagcacctggggcaccctggtggacccctggggcccccaggacatccacatggagcagagcatcctgcggcgggtgcagctgggccacagcaatgagatgaggctgcatggagtgcccagcgagggccctgcccacatccccccaggcagcccccctgtgtctgccacagctgctggccctgaggccagctttgaggcccgcatccccagccctggcacccaccctgagggggaggccgcccagaggatccacatgaagagctgcttcctggaggatgccaccatcggcaacagcaacaagatgagcatcagccctggggtggccggccctggaggagtggccggcagcggggagggggagcccggggaggatgctggccggcggcctgctgacacccaggcccggagctttgatggccaggagtag

SEQ ID NO: 220092 - DNA, 1290 bp, Artificial Sequence
  derived and/or modified sequence
atggcccaggccccagctgaccccggccgggagggccacctggagcagaggatcctgcaggtgctgacagaagctggcagccctgtgaagctggcccagctggtgaaggagtgccaggcccccaagcgggagctgaaccaggtgctgtacaggatgaagaaggagctgaaggtgtccctgaccagccctgccacctggtgcctgggcggcacagatcctgagggggagggccctgctgagctggccctgagcagccctgctgagcggccccagcagcacgccgccaccatccctgagaccccaggcccccagttcagccagcagcgggaggaggacatctaccgcttcctgaaggacaatggcccccagagggccctggtgattgcccaggccctgggcatgaggacagccaaggatgtgaacagagacctgtacaggatgaagagccgccacctgctggacatggatgagcagagcaaggcctggaccatctacagacctgaggacagcggccggcgggccaagagcgccagcatcatctaccagcacaaccccatcaacatgatctgccagaatggccccaacagctggatcagcatcgccaacagcgaggccatccagatcggccacggcaacatcatcacccggcagacagtgtcccgggaggatggcagcgctggccccaggcacctgcccagcatggcccctggggacagcagcacctggggcaccctggtggacccctggggcccccaggacatccacatggagcagagcatcctgcggcgggtgcagctgggccacagcaatgagatgaggctgcatggagtgcccagcgagggccctgcccacatccccccaggcagcccccctgtgtctgccacagctgctggccctgaggccagctttgaggcccgcatccccagccctggcacccaccctgagggggaggccgcccagaggatccacatgaagagctgcttcctggaggatgccaccatcggcaacagcaacaagatgagcatcagccctggggtggccggccctggaggagtggccggcagcggggagggggagcccggggaggatgctggccggcggcctgctgacacccagagccgcagccacttcccccgggacatcggccagcccatcacccccagccacagcaagctgacccccaagctggagaccatgaccctgggcaacagaagccacaaggctgctgagggcagccactacgtggatgaggccagccatgagggctcctggtggggcggcggcatctag

SEQ ID NO: 220093 - DNA, 1221 bp, Artificial Sequence
  derived and/or modified sequence
atggcccaggcccccgccgaccccggccgggagggccacctggagcagaggatcttacaggtacttacagaagcaggatcccctgttaagttggcccaactggtaaaggaatgtcaggcccctaagagggaattgaaccaggtcctgtaccgaatgaagaaggagcttaaggtgtctttgaccagccccgcaacttggtgtttgggcggcaccgatccagagggtgagggccccgcagagctggcgcttagctccccagaggaagacatctataggtttttaaaagataacggcccacagcgggcgttagtgattgcccaggcattggggatgcgcacagcaaaagatgtcaatcgggatctgtatagaatgaagtctcgtcacctccttgacatggacgaacagtccaaagcttggactatctataggcccgaagactcaggccggcgcgcaaagagcgcctccatcatctaccagcacaaccctataaacatgatctgccagaacggtcctaacagttggataagcatcgcaaactccgaggcaatccagatcggccacggcaacatcatcacacgccagactgtgagccgagaggacgggtcagcgggccctcgccacctgccctccatggcaccaggcgattcatccacctgggggaccctggttgatccctggggtccacaggatattcacatggaacagtcaattttacggcgggtgcagcttggccattctaacgagatgcgactgcacggtgtgccaagtgagggtccggcccacattccccctgggagcccccccgtctcagcaactgctgccgggccagaagcatctttcgaagctcgcataccaagccccgggacgcacccggagggcgaggccgcccaacgcattcatatgaaatcatgtttcctggaagatgccaccattggaaattctaataagatgtccatttcccctggggtcgcaggccccggcggggtggccgggtcgggggagggggagcctggggaagacgccggacggcggccagctgacactcagtctcggtcacacttcccaagggacatcggccagccaataacaccctcacatagcaaactgacacccaagctggaaacaatgacactgggtaatagatcgcataaggccgccgaaggctcccactacgtggacgaagctagtcacgaagggtcttggtggggaggcgggatttag

SEQ ID NO: 220094 - DNA, 1143 bp, Artificial Sequence
  derived and/or modified sequence
atggcccaggcccccgccgaccccggccgggagggccacctggagcagcggatcttgcaagttcttactgaggccggttcccccgtgaaacttgcccagcttgtaaaagaatgtcaggcccctaaaagagaactcaaccaggttctttatagaatgaagaaagagctgaaggtgtccctaacaagcccggccacctggtgcctgggggggacagatcccgaaggggaaggaccggcggagctggctctaagttctcccgccgaacgaccccagcagcacgctgctaccatccccgagactccaggcccacagtttagtcaacaacgcgaagaagatatttaccgctttttaaaggataatgggccacagcgggcgcttgttatcgcacaggccttgggtatgaggaccgctaaagacgtaaacagagacctttatcggatgaaaagtcgtcacctcctggacatggacgagcagagcaaagcgtggacgatttaccggccggaagattccggtcgaagggctaagtctgccagcattatctatcagcataatccaatcaacatgatctgccagaatgggccaaacagctggataagtattgccaactcagaggccattcagataggacacggcaatatcattaccaggcagacggtgtctcgggaagacggcagcgctgggccaagacatctgccttcaatggcccccggcgactcttcaacatggggcaccctcgtggacccctgggggccacaagacattcacatggagcagagtattcttaggcgggtccagcttggtcattccaacgaaatgaggctccacggtgtgccatctgagggcccggcccatattccacccgggagcccaccggtctctgctactgcagccggacctgaggcctctttcgaggccaggatacctagccccgggacccatcccgagggggaggctgcacagagaatccacatgaagtcctgttttcttgaagatgctacgatagggaacagcaataagatgtcaataagtcctggcgtggccgggccaggaggcgtggccggcagtggtgaaggtgagccaggtgaggatgctggcagaaggccggccgatactcaggctaggagcttcgatggacaggagtag

SEQ ID NO: 220095 - DNA, 1290 bp, Artificial Sequence
  derived and/or modified sequence
atggcccaggcccccgccgaccccggccgggagggccacctggagcagagaattttacaggtcctgactgaagccggaagtccagtgaagctagcacagcttgtaaaagaatgtcaagcacccaagagagagctaaaccaggtgttgtatcggatgaagaaggaactgaaggtgagcctcacgagccctgccacatggtgcttaggcggcacggaccccgagggagaaggcccagccgagctggccctgtccagtcccgctgaaaggcctcagcagcacgctgctaccatcccagagacccccggcccacaattcagccaacagagggaagaagacatctacagattcctgaaggacaacgggcctcaaagagctcttgtgattgcacaggcgttagggatgcgtaccgccaaggacgtcaatagagatctttacagaatgaagtctcgccacttactggatatggatgaacaaagcaaggcttggaccatttaccgccccgaggactcaggtagaagagccaaatctgccagtattatttatcagcataacccaatcaacatgatctgtcaaaatggcccaaatagttggatttcaatagcaaacagtgaggcaattcagattgggcatggaaatataatcactcgccagacagtttctagggaagacggttctgcagggccacggcatttaccttctatggcccccggggacagctcgacttggggaacactggtggatccctggggcccccaggacatccatatggaacagagtatcctccgccgtgtccagctagggcattctaacgaaatgagattgcacggggtgccttcagaaggccctgcgcacataccccccggctcacctccagttagcgccactgcggcaggacccgaagcgtcatttgaagctcgcatcccctctccaggaactcaccccgaaggagaggccgcgcaaagaattcatatgaaaagttgctttctggaggacgctaccataggtaactccaacaaaatgagcatttccccgggggtcgcggggcctggcggcgtagcggggagcggcgaaggcgagcctggggaggacgctgggcgccgcccggccgacactcagtcgaggagtcatttcccacgggacatcggacaaccaattactcctagccattctaagctcacccccaagttggagaccatgaccttgggcaaccgaagccacaaggcagccgaaggcagccattatgtggatgaggcttcgcacgaagggtcatggtggggtggcggaatatag

SEQ ID NO: 220096 - DNA, 1221 bp, Artificial Sequence
  derived and/or modified sequence
atggctcaggcgccagccgacccagggagggaaggacacctcgagcagcggatccttcaggtgcttacagaagcaggaagccctgtgaagctcgctcagcttgtgaaggaatgccaagcccctaaacgggagctaaaccaagtcctgtatagaatgaagaaggagctcaaagtctctttgacctctcccgcaacatggtgtctcgggggaactgatcctgagggggaagggccagccgaactcgccctgagcagtcctgaagaggatatctacagattcctgaaggacaacggcccacaacgagctctcgtgatcgcacaggccctgggaatgagaaccgcgaaggacgtgaatagggacctttatcgcatgaagagtaggcacctgctcgacatggacgagcagtccaaggcttggacaatatacaggccagaggactcagggagaagggcgaagtctgcctcaatcatctatcaacataacccaattaatatgatctgtcaaaatggtcctaattcctggatcagcatcgccaatagtgaggccattcaaattggacacggcaatattatcactaggcagaccgtctctcgggaagacggatccgccggtcctagacatctaccctcgatggctccgggagatagctccacctggggcacccttgtggacccatggggaccccaggatatacatatggaacagtcaattctgagacgggttcagttgggacattctaacgaaatgaggcttcatggtgtcccctctgagggacccgcacacatcccccctggttctccaccggtatctgccaccgccgctgggccagaggcttctttcgaagctagaatcccgagcccaggcacccatcccgaaggtgaggccgctcaacgcatccatatgaaatcatgcttcctggaggatgcaacgattggaaattccaacaaaatgagtatcagtcccggagtcgctggacctggcggagtcgccggaagtggagagggagaaccaggtgaggacgctggcagaaggcctgccgatacccagagccgatcccatttccccagagacatcggccagcctatcacaccgagtcacagcaagctaacgcccaagctggagacaatgacgctcggcaataggagtcataaagctgcagagggctcccattacgtcgatgaggcatcgcacgaaggcagctggtggggcggaggtatttag

SEQ ID NO: 220097 - DNA, 1143 bp, Artificial Sequence
  derived and/or modified sequence
atggcccaggcaccagctgaccccggacgggaggggcatttggagcaaaggattctgcaagtactcactgaggcgggatccccagtcaaacttgcgcagctggtaaaggagtgtcaggccccaaagagagaattaaatcaggtgctttatcggatgaaaaaagagcttaaagtgagcttgacatcaccagccacttggtgcctgggcggaaccgaccctgaaggggagggtccagcagagctagccctcagcagccccgcagagcgccctcagcagcatgcagccactattccagaaacccctggccctcagttctcccaacagagagaggaggacatataccgctttttgaaggacaacgggccacagagggccctggtcatcgctcaggctctcgggatgcgcaccgctaaggatgtaaacagagatctgtataggatgaagtcacgtcatctgttggatatggacgagcagtccaaagcctggacaatttatcgacctgaagactctgggaggcgggctaaatctgcatccataatctaccagcataacccaataaacatgatctgccagaatggcccaaattcttggattagtattgcgaattctgaggccatccaaatagggcacggaaacataattacccgccaaacagttagtagagaagatggttccgcaggccctagacacctgccttcaatggctcctggcgactcaagcacttggggaaccctcgtcgacccgtggggcccacaggacatccacatggagcaatctattctgcgcagggtgcagctaggacactcaaacgaaatgagactgcatggggttcctagcgagggaccagctcatatcccccctggaagcccacccgtcagtgctacagcagcaggacccgaggccagcttcgaggcaaggatcccctcacctggtactcaccccgagggcgaagcagcccagcgtatccacatgaaaagctgctttttggaggacgccaccatcggcaactcgaataaaatgtccatctctcctggtgtcgcgggtccgggaggggtggccggatccggagagggagaaccgggtgaggacgcaggaaggagacccgcagacacgcaggccagatcttttgacgggcaggaatag

SEQ ID NO: 220098 - DNA, 1290 bp, Artificial Sequence
  derived and/or modified sequence
atggcacaggctccggctgatcccggacgagagggccatctggaacagcgcatcctgcaggtgctgaccgaggcgggatcaccagtcaaattggctcaactagtgaaggagtgccaagctcccaagcgggaactcaaccaggtcctctataggatgaagaaagagttaaaagtgagtctgacctcgcccgctacgtggtgcctggggggtactgaccccgagggtgaaggacctgccgagctggccctcagctccccggctgagaggccacagcagcatgcggctactatccccgagacacctggaccacagttttcacaacagcgcgaggaggacatctaccggtttctgaaggacaacggaccccaacgggctctggtcattgctcaggctttgggcatgcggacagctaaggacgtcaatagggacctgtataggatgaagtcacgtcacctcttggacatggatgaacaaagcaaagcctggacgatctacaggcccgaagattctggccgacgagcaaaatccgcatctattatctaccagcacaacccaattaatatgatctgccaaaatgggcctaattcttggatcagtatagctaatagcgaagctatccagatagggcatggaaatatcatcacacgacagacagtgagcagagaggacggtagcgctggccctagacacctgcctagtatggccccaggggacagctctacgtggggtactctggtggacccgtggggtccccaggacattcacatggaacagagcatcttgcgcagagtgcagcttggccatagtaacgagatgcgccttcatggtgtgccgagcgagggacccgcacatattccccctggttctccccctgtcagcgccaccgccgcaggccctgaggcctcttttgaggccagaattccatccccaggaacccaccccgagggggaggctgctcagagaatccatatgaaaagctgtttcctggaggacgcaacaattgggaactccaataaaatgtctatttcaccaggcgtggccggaccgggaggcgtggccggttcaggcgagggagagccgggtgaagacgcaggccgaagacctgcggatacacagagccgctcccattttccacgggacattggccaacccatcacaccctctcactctaagttaacaccgaagctggagacgatgacacttggcaatcggtctcataaggccgctgaaggatcccattatgttgacgaagctagccatgagggatcatggtggggagggggtatatag

SEQ ID NO: 220099 - DNA, 2225 bp, Artificial Sequence
  derived and/or modified sequence
tttttttttctttcaaaagacgaacagagaagtttcattttctttttctcctgaaaccgaatctggccggcctggctaggcatctatttccgggctgtaagcagctgacacctgcccagtggaagctggcatccctccccttgtgggttcagagctgcaagaagcaccaggctcggccacttcagaagccccagcctcgacctagcccaccctctcagggccacagtgcagaagcctgcacacctgccaagtctctccgactccttgcagctgctgtcagcatggcccaggctcctgctgacccgggcagagaaggccaccttgaacaaagaatcctgcaggtgctgacagaggctggctccccggtgaaacttgcccagctggtgaaggaatgccaagcacccaagagggagctcaaccaagtcctctaccgaatgaaaaaggagttgaaagtctccctcacatcccctgccacctggtgcttgggcgggactgatcctgaaggcgagggtcctgcagagctggccttgtccagccctgaggaagacatctacaggtttctcaaagacaatggtccccagagggccctggtcatcgcccaagcactgggaatgaggacagcaaaagatgtgaaccgagacttgtacaggatgaagagcaggcaccttctggacatggatgagcagtccaaagcatggacgatttaccgcccagaagattctggaagaagagcaaagtcagcctcaattatttaccagcacaatccaatcaacatgatctgccagaatggacccaacagctggatttccattgcaaactccgaagccatccagattggacacgggaacatcattacaagacagacagtctccagggaggacggttccgccggtccacgccacctcccttcaatggcaccaggtgattcctcaacttgggggaccctagttgatccctgggggccccaggacatccacatggagcagtccatactgagacgggtgcagctgggacacagcaatgagatgaggctccacggcgtcccgtccgagggccctgcccacatcccccctggcagccccccagtctctgccactgctgccggcccagaagcttcgtttgaagcaagaattcccagtccaggaactcaccctgagggggaagccgcccagagaatccacatgaaatcgtgctttctcgaggacgccaccatcggcaacagcaacaaaatgtctatcagcccaggggtggctggcccaggaggagtcgcagggtctggagagggggagccaggggaggacgcaggtcgtcgtcccgcagacacacaatccagaagtcactttcctcgagacattggtcagcccatcactcccagccactcgaagctcacccccaagctggaaactatgactcttggaaacaggagtcacaaagctgcagaaggcagccactatgtggatgaagcctcacacgaggggagctggtggggaggtgggatttagtgcacagcctcacgtggggcttggacacaggctgggggtgggcgcatgctagggagactagcctgctgctctctgcattccttagcgtcttgtttgacctgcttgcttccagacataacctgcatgaatcagttttgggggaatggacctggcatggggatgggttcaggccaggtcttttgatggccaggagtagatgacagggagttgccttggggaacctttggtgtgccaagaggaggtgggtagatgggagtggggctcggtcccccaggcccaggggactctctccactctttcctgggctcggggcatctgcctggagttaccttccatcatggctacctgctgtggtttgaatgtttgagtcccaacaaaattcatatcaaaacataatcccaactgggtgcagtggctcacgcctgtaatcccagcactttgggaggccgaggcgggcggatcaataggtcaggaaatccagaccgtcctggctaacatggtgaaaccccgtctctactaaaaaaaaaaatacaaaaaattagccgggcgttgtggcgggcacctggagtcccagctactccggaggctgagggaggagaatggtgtgaacccgggaggtggagcttccagtgagccgagatcgcgccactgcactccaggctgggcgacagagcgagactccgtctcaaaaaaataaatacataaataaaaaataaaccaacc

SEQ ID NO: 220100 - DNA, 1424 bp, Artificial Sequence
  derived and/or modified sequence
tttttttttctttcaaaagacgaacagagaagtttcattttctttttctcctgaaaccgaatctggccggcctggctaggcatctatttccgggctgtaagcagctgacacctgcccagtggaagctggcatccctccccttgtgggttcagagctgcaagaagcaccaggctcggccacttcagaagccccagcctcgacctagcccaccctctcagggccacagtgcagaagcctgcacacctgccaagtctctccgactccttgcagctgctgtcagcatggcccaggctcctgctgacccgggcagagaaggccaccttgaacaaagaatcctgcaggtgctgacagaggctggctccccggtgaaacttgcccagctggtgaaggaatgccaagcacccaagagggagctcaaccaagtcctctaccgaatgaaaaaggagttgaaagtctccctcacatcccctgccacctggtgcttgggcgggactgatcctgaaggcgagggtcctgcagagctggccttgtccagccctgccgagaggccccagcaacatgcagctacaattccagagacccctggccctcagttcagccaacaacgggaggaagacatctacaggtttctcaaagacaatggtccccagagggccctggtcatcgcccaagcactgggaatgaggacagcaaaagatgtgaaccgagacttgtacaggatgaagagcaggcaccttctggacatggatgagcagtccaaagcatggacgatttaccgcccagaagattctggaagaagagcaaagtcagcctcaattatttaccagcacaatccaatcaacatgatctgccagaatggacccaacagctggatttccattgcaaactccgaagccatccagattggacacgggaacatcattacaagacagacagtctccagggaggacggttccgccggtccacgccacctcccttcaatggcaccaggtgattcctcaacttgggggaccctagttgatccctgggggccccaggacatccacatggagcagtccatactgagacgggtgcagctgggacacagcaatgagatgaggctccacggcgtcccgtccgagggccctgcccacatcccccctggcagccccccagtctctgccactgctgccggcccagaagcttcgtttgaagcaagaattcccagtccaggaactcaccctgagggggaagccgcccagagaatccacatgaaatcgtgctttctcgaggacgccaccatcggcaacagcaacaaaatgtctatcagcccaggggtggctggcccaggaggagtcgcagggtctggagagggggagccaggggaggacgcaggtcgtcgtcccgcagacacacaagccaggtcttttgatggccaggagtag

SEQ ID NO: 220101 - DNA, 2195 bp, Artificial Sequence
  derived and/or modified sequence
gctgacacctgcccagtggaagctggcatccctccccttgtgggttcagagctgcaagaagcaccaggctcggccacttcagaagccccagcctcgacctagcccaccctctcagggccacagtgcagaagcctgcacacctgccaagtctctccgactccttgcagctgctgtcagcatggcccaggctcctgctgacccgggcagagaaggccaccttgaacaaagaatcctgcaggtgctgacagaggctggctccccggtgaaacttgcccagctggtgaaggaatgccaagcacccaagagggagctcaaccaagtcctctaccgaatgaaaaaggagttgaaagtctccctcacatcccctgccacctggtgcttgggcgggactgatcctgaaggcgagggtcctgcagagctggccttgtccagccctgccgagaggccccagcaacatgcagctacaattccagagacccctggccctcagttcagccaacaacgggaggaagacatctacaggtttctcaaagacaatggtccccagagggccctggtcatcgcccaagcactgggaatgaggacagcaaaagatgtgaaccgagacttgtacaggatgaagagcaggcaccttctggacatggatgagcagtccaaagcatggacgatttaccgcccagaagattctggaagaagagcaaagtcagcctcaattatttaccagcacaatccaatcaacatgatctgccagaatggacccaacagctggatttccattgcaaactccgaagccatccagattggacacgggaacatcattacaagacagacagtctccagggaggacggttccgccggtccacgccacctcccttcaatggcaccaggtgattcctcaacttgggggaccctagttgatccctgggggccccaggacatccacatggagcagtccatactgagacgggtgcagctgggacacagcaatgagatgaggctccacggcgtcccgtccgagggccctgcccacatcccccctggcagccccccagtctctgccactgctgccggcccagaagcttcgtttgaagcaagaattcccagtccaggaactcaccctgagggggaagccgcccagagaatccacatgaaatcgtgctttctcgaggacgccaccatcggcaacagcaacaaaatgtctatcagcccaggggtggctggcccaggaggagtcgcagggtctggagagggggagccaggggaggacgcaggtcgtcgtcccgcagacacacaatccagaagtcactttcctcgagacattggtcagcccatcactcccagccactcgaagctcacccccaagctggaaactatgactcttggaaacaggagtcacaaagctgcagaaggcagccactatgtggatgaagcctcacacgaggggagctggtggggaggtgggatttagtgcacagcctcacgtggggcttggacacaggctgggggtgggcgcatgctagggagactagcctgctgctctctgcattccttagcgtcttgtttgacctgcttgcttccagacataacctgcatgaatcagttttgggggaatggacctggcatggggatgggttcaggccaggtcttttgatggccaggagtagatgacagggagttgccttggggaacctttggtgtgccaagaggaggtgggtagatgggagtggggctcggtcccccaggcccaggggactctctccactctttcctgggctcggggcatctgcctggagttaccttccatcatggctacctgctgtggtttgaatgtttgagtcccaacaaaattcatatcaaaacataatcccaactgggtgcagtggctcacgcctgtaatcccagcactttgggaggccgaggcgggcggatcaataggtcaggaaatccagaccgtcctggctaacatggtgaaaccccgtctctactaaaaaaaaaaatacaaaaaattagccgggcgttgtggcgggcacctggagtcccagctactccggaggctgagggaggagaatggtgtgaacccgggaggtggagcttccagtgagccgagatcgcgccactgcactccaggctgggcgacagagcgagactccgtctcaaaaaaataaatacataaataaaaaataaaccaaccataa

SEQ ID NO: 220102 - protein, 541 aa, Artificial Sequence
  derived and/or modified sequence
MGHSPPVLPLCASVSLLGGLTFGYELAVISGALLPLQLDFGLSCLEQEFLVGSLLLGALLASLVGGFLIDCYGRKQAILGSNLVLLAGSLTLGLAGSLAWLVLGRAVVGFAISLSSMACCIYVSELVGPRQRGVLVSLYEAGITVGILLSYALNYALAGTPWGWRHMFGWATAPAVLQSLSLLFLPAGTDETATHKDLIPLQGGEAPKLGPGRPRYSFLDLFRARDNMRGRTTVGLGLVLFQQLTGQPNVLCYASTIFSSVGFHGGSSAVLASVGLGAVKVAATLTAMGLVDRAGRRALLLAGCALMALSVSGIGLVSFAVPMDSGPSCLAVPNATGQTGLPGDSGLLQDSSLPPIPRTNEDQREPILSTAKKTKPHPRSGDPSAPPRLALSSALPGPPLPARGHALLRWTALLCLMVFVSAFSFGFGPVTWLVLSEIYPVEIRGRAFAFCNSFNWAANLFISLSFLDLIGTIGLSWTFLLYGLTAVLGLGFIYLFVPETKGQSLAEIDQQFQKRRFTLSFGHRQNSTGIPYSRIEISAAS

SEQ ID NO: 220103 - DNA, 1626 bp, Artificial Sequence
  derived and/or modified sequence
atgggacattcacctcctgtgctgcctctctgcgcttctgtcagcctactgggcggactgacgtttggttacgagctggctgtgatcagtggagcgctcctgcctttgcagttggacttcggcctgagctgcctcgagcaggaatttctagtggggagtctcttactcggcgctctgttggctagtctggtgggcggcttcctgatcgactgttatgggagaaaacaagcaatactggggtcaaacttggtcttgctggcgggcagccttacactgggtcttgcgggctctctggcgtggctggtgcttggtcgggcggtggtgggcttcgctatttctctcagtagcatggcatgttgcatctacgtctcagaactcgtcgggcctcggcagaggggagttcttgtcagtctgtacgaggcagggataactgtcggtatcctgttatcctacgccctaaattacgcacttgctggaactccttggggctggcgacatatgtttggctgggctaccgcgcctgctgtgctacagtcccttagcctgctgttccttcctgcggggacagacgagacagctacccacaaagatctgatacccctgcagggaggagaggccccgaagctgggccccgggaggccacggtacagctttctggacctgttccgggcccgagacaatatgagggggcgtactacagttggtctgggactcgttctgttccagcaactgactggccaacccaatgtcctgtgttacgcctctacgatattctctagtgtgggcttccatggaggtagctccgctgtgttggctagtgtgggtttaggcgcagttaaagtcgccgcaactttaacagccatgggcctggtggacagggcagggcgacgtgccctgctgcttgcgggctgcgcacttatggctttgagtgttagcgggatcggcttggtgtccttcgccgtgccgatggattccgggccctcctgcctggcagtgccaaatgccaccggtcagactggcctacctggcgacagtggtctcctacaggatagttccctgcctcccattcctcgcacaaacgaggaccaaagagagcccattttgtcaacagcaaagaaaacaaaaccccacccgaggtctggagatccaagcgccccccccaggctcgctctgagcagcgcattacctgggccaccactgcccgcgcgcggccatgctctcctgcgatggactgccctcctgtgtctcatggttttcgtctccgccttttcttttggctttggtcctgttacctggcttgtcctctcagaaatttatcctgttgagatcaggggaagggcctttgctttctgtaacagcttcaactgggctgctaacctctttatttccctttctttcctcgatcttatcgggacgatcggattgtcatggacattcttgctgtacgggcttacagccgttctcggtctgggcttcatatacctcttcgtaccagaaacaaagggccagtctcttgcagagatcgaccagcagttccagaaacggcgctttacactcagctttggtcaccgtcaaaattctactggaatcccctatagccgaatcgaaatctcagcggcctcatag

SEQ ID NO: 220104 - DNA, 1626 bp, Artificial Sequence
  derived and/or modified sequence
atgggccacagcccccctgtgctgcccctgtgtgcctctgtgtccctgctgggcggcctgaccttcggctatgagctggccgtcatcagcggggccctgctgcccctgcagctggactttggcctgagctgcctggagcaggagttcctggtgggcagcctgctgctgggcgccctgctggccagcctggtgggcggcttcctgattgactgctacggcaggaagcaggccatcctgggcagcaacctggtgctgctggccggcagcctgaccctgggcctggccggcagcctggcctggctggtgctgggccgggctgtggtgggctttgccatcagcctgagctccatggcctgctgcatctacgtgtctgagctggtgggcccccggcagaggggcgtgctggtgtccctgtatgaagctggcatcaccgtgggcatcctgctgtcctatgccctgaactatgccctggccggcaccccctggggctggaggcacatgtttggctgggccacagccccagctgtgctgcagagcctgagcctgctcttcctgcctgctggaacagatgaaacagccacccacaaggacctgatccccctgcagggcggggaggcccccaagctgggccctggccggccccgctacagcttcctggacctcttccgggcccgggacaacatgaggggccgcaccaccgtgggcctgggcctggtgctcttccagcagctgaccggccagcccaacgtgctgtgctacgccagcaccatcttcagctctgtgggcttccacggcggcagcagcgctgtgctggcctctgtgggcctgggcgctgtgaaggtggccgccaccctgacagccatgggcctggtggaccgggccggccggcgggccctgctgctggccggctgtgccctgatggccctgtctgtgtctggcatcggcctggtgtcctttgctgtgcccatggattctggccccagctgcctggccgtgcccaatgccaccggccagacaggcctgcccggggacagcggcctgctgcaggacagcagcctgccccccatccccaggaccaatgaagaccagcgggagcccatcctgagcacagccaagaagaccaagccccaccccaggtctggggaccccagcgccccaccccggctggccctgagcagcgccctgcccggcccccccctgcctgcccggggccacgccctgctgcgctggacagccctgctgtgcctgatggtgtttgtgtctgccttctcctttggatttggacctgtgacctggctggtgctgtctgagatctaccctgtggagatccggggccgggcctttgccttctgcaacagcttcaactgggccgccaacctcttcatcagcctgtccttcctggacctgattggcaccatcggcctgtcctggaccttcctgctgtatggcctgacagctgtgctgggcctgggcttcatctacctgtttgtgcctgagaccaagggccagagcctggccgagattgaccagcagttccagaagaggcgcttcaccctgagctttggccaccggcagaacagcacaggcatcccctacagcagaattgagatctctgctgccagctag

SEQ ID NO: 220105 - DNA, 1626 bp, Artificial Sequence
  derived and/or modified sequence
atgggccacagcccccccgtgctgcccctgtgcgccagcgtgagcctgcttggcggcctcacattcggctacgagttagctgtgattagcggtgcgcttcttcccctgcagctcgactttggtttatcctgcttggagcaggaattcctcgtcgggagcctgttgctgggagccctgctcgcttctttggtgggggggttcctcatagactgttacggaagaaaacaagcaatcttggggtccaacctcgtgctgttagccggcagcctgacactgggtctggcagggtccctggcgtggcttgtgttgggaagagctgtggtggggttcgcgattagtcttagcagtatggcttgttgtatctatgtgtcggagctcgtgggtcctagacagaggggggttctcgtctccctctatgaagccgggatcactgttggcattctgctgtcctatgcactgaattacgctttagcaggcactccatggggttggagacacatgttcggttgggctacagctcccgccgtgttgcagtcattgtctcttctgttccttcctgccgggactgatgagactgccacacacaaagacctgatacctttacagggaggagaggctcccaaactggggcccggtagaccccgatacagctttctggatctatttcgcgctagggataacatgcgcgggcgcacaacagtcgggctcggcctggttctttttcagcagctcacaggccaacctaacgtgctctgctacgctagcaccatcttttccagcgtgggctttcatggcggcagcagcgccgttcttgcttctgtcggactgggcgcggtgaaagtggctgcaaccttgacagctatggggctggtggaccgcgccggccgaagggcactgctcttggccgggtgtgccctgatggcccttagtgtcagcggcatcggattggtgtcctttgcggtccctatggatagtggaccttcttgcttggcagtacccaatgccacaggacaaactggcttgcccggagattccggcttactccaggacagttctttacctcccatacctcgaaccaatgaagatcaacgagaaccaatattatctactgccaagaaaactaaaccacatccgaggagcggcgacccatccgccccgcccagattggctttatcaagcgcccttccgggaccccctctcccagcccgcggccacgccctgctccgctggactgcattgctatgcttgatggtgtttgtctccgcattcagcttcgggttcggccccgtcacatggttggtccttagcgaaatctacccagttgagatcagaggaagagcatttgctttttgtaattcattcaactgggcagcaaatctgttcatttctctctcctttctggatcttatcgggacgattggccttagttggacctttcttctatacgggctgaccgctgtgctgggtctaggttttatctacctcttcgtgccggaaacgaaggggcagagcttagccgagatagatcagcagttccagaaaaggcgttttacattgtcctttggtcaccgccaaaactcaaccggaattccttactctaggatcgagatttccgccgctagttag

SEQ ID NO: 220106 - DNA, 1626 bp, Artificial Sequence
  derived and/or modified sequence
atggggcacagccctcctgttctgccattgtgcgcatctgtgagtctgcttggaggactcacatttggctacgagttagccgtaatatctggggcactgctccccctccagctggacttcggccttagctgcctagagcaggaatttctagtgggatctctgctgctcggagccctgctcgccagcctggtagggggatttctgatcgactgctacggcaggaaacaggcgatactgggtagcaatctcgtgctgctagctggcagtctcacgctgggcctggcaggatcccttgcctggttggtactcggcagggcagtggtggggttcgcaatcagtctgagcagtatggcctgttgcatttacgtgtcagaactggtaggacccagacaaagaggcgtactggtctcactgtatgaggcaggtataaccgtaggcatcctgctctcttatgccctaaactacgccctggccggaacgccatggggttggcgccatatgttcggatgggctaccgcacccgcagtattacagagtctgagtttgctgttcttacccgcaggcacggacgagactgcaacacataaagacttgattcctctgcaaggtggtgaggccccaaagctcggccctggaagaccaagatatagcttcctggacttgtttagagccagagacaatatgaggggacgcaccacggtcggcctaggcctcgtactcttccaacagcttactggtcagcctaatgtgctgtgctacgcctctaccattttttcatccgttgggtttcatgggggttcatccgccgtcctggcctccgttggattgggcgcagtgaaagtcgccgctaccttgaccgccatgggattggtcgatagagccggacgaagggcgcttctgctggccggatgtgcactaatggcactgagcgtgtctggaattggtcttgtcagtttcgccgttcccatggacagcgggcctagctgtctggcagtgccaaacgcaacaggtcagacagggttaccgggagacagtggactgctgcaggattcatcccttcctcccataccacggaccaacgaggaccaacgggaacctatcttaagtacagccaagaaaaccaagccacaccctagatcaggcgatccttccgctccccctagactggccttaagctcagcattaccaggaccaccgctccctgcgagaggccatgccttattgcgctggactgctctactgtgcttaatggtctttgtaagcgctttctctttcggatttggacctgtaacttggctggtcctctctgaaatctacccggtcgaaataagaggacgcgcatttgctttctgcaactcgttcaactgggccgcaaatctcttcatctccctctcctttctcgatctcatcggaacaatcggtctgagctggacttttctgttatatggactgaccgccgtcttaggcttgggttttatttacctgttcgtacctgaaaccaaggggcagagcttagcagagatagatcagcaattccagaagcgcagattcacactgtccttcggacacaggcagaacagcacaggcattccctactcgcgcattgagatatctgccgcaagctag

SEQ ID NO: 220107 - DNA, 4368 bp, Artificial Sequence
  derived and/or modified sequence
ggagggggtccttgccaggcctggggcggccgggggcggtcctgggctcccctccgtcccgcctccaggcctcggggcctggctggccgacgtggcgttggcggcgctgcgcgcgggagggcagggcaggagggacagaggcgggggcgggccggaaagtttgtccggcggcagcggcgttggggactccggcgggggatgcgcgcccggcccctcagcgcccccagcacgccgccgagtcccgctcgccatgggccactccccacctgtcctgcctttgtgtgcctctgtgtctttgctgggtggcctgacctttggttatgaactggcagtcatatcaggtgccctgctgccactgcagcttgactttgggctaagctgcttggagcaggagttcctggtgggcagcctgctcctgggggctctcctcgcctccctggttggtggcttcctcattgactgctatggcaggaagcaagccatcctcgggagcaacttggtgctgctggcaggcagcctgaccctgggcctggctggttccctggcctggctggtcctgggccgcgctgtggttggcttcgccatttccctctcctccatggcttgctgtatctacgtgtcagagctggtggggccacggcagcggggagtgctggtgtccctctatgaggcaggcatcaccgtgggcatcctgctctcctatgccctcaactatgcactggctggtaccccctggggatggaggcacatgttcggctgggccactgcacctgctgtcctgcaatccctcagcctcctcttcctccctgctggtacagatgagactgcaacacacaaggacctcatcccactccagggaggtgaggcccccaagctgggcccggggaggccacggtactcctttctggacctcttcagggcacgcgataacatgcgaggccggaccacagtgggcctggggctggtgctcttccagcaactaacagggcagcccaacgtgctgtgctatgcctccaccatcttcagctccgttggtttccatgggggatcctcagccgtgctggcctctgtggggcttggcgcagtgaaggtggcagctaccctgaccgccatggggctggtggaccgtgcaggccgcagggctctgttgctagctggctgtgccctcatggccctgtccgtcagtggcataggcctcgtcagctttgccgtgcccatggactcaggcccaagctgtctggctgtgcccaatgccaccgggcagacaggcctccctggagactctggcctgctgcaggactcctctctacctcccattccaaggaccaatgaggaccaaagggagccaatcttgtccactgctaagaaaaccaagccccatcccagatctggagacccctcagcccctcctcggctggccctgagctctgccctccctgggccccctctgcccgctcgggggcatgcactgctgcgctggaccgcactgctgtgcctgatggtctttgtcagtgccttctcctttgggtttgggccagtgacctggcttgtcctcagcgagatctaccctgtggagatacgaggaagagccttcgccttctgcaacagcttcaactgggcggccaacctcttcatcagcctctccttcctcgatctcattggcaccatcggcttgtcctggaccttcctgctctacggactgaccgctgtcctcggcctgggcttcatctatttatttgttcctgaaacaaaaggccagtcgttggcagagatagaccagcagttccagaagagacggttcaccctgagctttggccacaggcagaactccactggcatcccgtacagccgcatcgagatctctgcggcctcctgaggaatccgtctgcctggaaattctggaactgtggctttggcagaccatctccagcatcctgcttcctaggccccagagcacaagttccagctggtcttttgggagtggcccctgcccccaaaggtggtctgcttttgctggggtaaaaaggatgaaagtctgagaatgcccaactcttcattttgagtctcaggccctgaaggttcctgaggatctagcttcatgcctcagtttccccattgacttgcacatctctgcagtatttataagaagaatattctatgaagtctttgttgcaccatggacttttctcaaagaatctcaagggtaccaatcctggcaggaagtctctcccgatatcacccctaaatccaaatgaggatatcatcttttctaatctcttttttcaactggctgggacattttcggaagggggaagtctctttttttactcttatcattttttttttttgaggtggagtctcattctgttgcccaggctggcctgatcttggctcactgcaacctccacctcctgagttcaagcgattcttgtgcctcagcctcctaagcagctgggactacaggcgcatgcaaccatacccagctaatttatttttagcagagatggggtttcactgtgttggccaggctggtcgtgaactcctgagctcaagtgatccacccacctcagcctcccagagtgctaggattacaggccttttgactcttttatctgagttttattgacccctctaattctcttacccagaatatttatccttcaccagcaactctgactctttgacgggaggcctcagttctagtccttggtctgctggtgtcattgctgtaggaatgaccacgggcctcagtttccccatttgtataatgggaagcctgtaccaggtcattcttaagatttctcctgactccagtgagctggaattctaaatgctggtctaggagctgtctccaggatggtgcaggatggctttgcggaaaggagatgggtttggaggccaacaaacctgcttgtcaatattgcctttgcctcttggcagcccttgaacttgagtaaataacaactccctgaacctcagtttcctcatctgcagaatggggataattatgtcccaggggtatatttagaccctgtttcctttcaggagggtccccagctggtccagggcctgggaaatttctacttatcctcattacccaggtccctcctttggaccctgtaaagggtcagggtgaatcagatgggggactgagcaagtagctatgactgcagatcatgtaaggaagggactgacaagaagctcccagatgctggggagaatgaagagctaaaatagatcctaggtgctggatgctttgtcatccatgcgtgcacatatgggtgctggcagagcccccaaggactctggcctctcgagttctcctatcttctccattctagatgcttcccttgtatccagtgatgtgctggagctggctttgccaagcttgtgagagctggttgctacattttcaggatttttacaagttggtaaacacagccattataaaaaattaaatgatttaaatttataattaagtaaattacattaaaacaaaaaaattatactcaaaattcattacttaattttactacctgttactattatctgtgcttttgaggctatttctacatagtaactcttatggagacctaggggagacaccgcgcatctcttcctgattccccactcaatgacatcatgttagtctttggttgcttaactggctgtggggagtgtttttgtatcacaaagattagagaggactacacatcagggcttgatttattgtttgttgattttctagacttcagaacatgctggataaaatgtcagtaatgcaaattaaactttaaagtatgtcttgtttgtagccaatacatggtgtatagcaccaaaaaatggagggattattcttccagtagttgaacactgtcatccgtttcagctgacagctgctcaaatcatttaagaaggagttctgacattcattttcattgttttacttttgtcttcctcactagtgtaaacaaaaatttcaaccagcattcatgccgaacctatacccattcttcagtgcctagctgtacagttatcagggatttttatttgtagtctaattttgtcaaatcatggccaaatcgcagtgatagttgactttggatacaaggtttggcaaaaaaaaaaatattaacaaaatattctgtaagaatcaattgtctatatggaatttaggataaagaatatttacaataaagaatatttacaataaagagtttattattatttgtaagttgtgtgcaacaaacataccctttatctctgtaaaatttatacacacaaaaattaacaaaagattctgtaagaattaattggctatatggaatttaggatagaatatttacaataaagagtatttacaataaa

SEQ ID NO: 220108 - DNA, 1626 bp, Artificial Sequence
  derived and/or modified sequence
atgggccacagcccccccgtgctgcccctgtgcgccagcgtgagcctgctgggcggcctgaccttcggctacgagctggccgtgatcagcggcgccctgctgcccctgcagctggacttcggcctgagctgcctggagcaggagttcctggtgggcagcctgctgctgggcgccctgctggccagcctggtgggcggcttcctgatcgactgctacggcagaaagcaggccatcctgggcagcaacctggtgctgctggccggcagcctgaccctgggcctggccggcagcctggcctggctggtgctgggcagagccgtggtgggcttcgccatcagcctgagcagcatggcctgctgcatctacgtgagcgagctggtgggccccagacagagaggcgtgctggtgagcctgtacgaggccggcatcaccgtgggcatcctgctgagctacgccctgaactacgccctggccggcaccccctggggctggagacacatgttcggctgggccaccgcccccgccgtgctgcagagcctgagcctgctgttcctgcccgccggcaccgacgagaccgccacccacaaggacctgatccccctgcagggcggcgaggcccccaagctgggccccggcagacccagatacagcttcctggacctgttcagagccagagacaacatgagaggcagaaccaccgtgggcctgggcctggtgctgttccagcagctgaccggccagcccaacgtgctgtgctacgccagcaccatcttcagcagcgtgggcttccacggcggcagcagcgccgtgctggccagcgtgggcctgggcgccgtgaaggtggccgccaccctgaccgccatgggcctggtggacagagccggcagaagagccctgctgctggccggctgcgccctgatggccctgagcgtgagcggcatcggcctggtgagcttcgccgtgcccatggacagcggccccagctgcctggccgtgcccaacgccaccggccagaccggcctgcccggcgacagcggcctgctgcaggacagcagcctgccccccatccccagaaccaacgaggaccagagagagcccatcctgagcaccgccaagaagaccaagccccaccccagaagcggcgaccccagcgccccccccagactggccctgagcagcgccctgcccggcccccccctgcccgccagaggccacgccctgctgagatggaccgccctgctgtgcctgatggtgttcgtgagcgccttcagcttcggcttcggccccgtgacctggctggtgctgagcgagatctaccccgtggagatcagaggcagagccttcgccttctgcaacagcttcaactgggccgccaacctgttcatcagcctgagcttcctggacctgatcggcaccatcggcctgagctggaccttcctgctgtacggcctgaccgccgtgctgggcctgggcttcatctacctgttcgtgcccgagaccaagggccagagcctggccgagatcgaccagcagttccagaagagaagattcaccctgagcttcggccacagacagaacagcaccggcatcccctacagcagaatcgagatcagcgccgccagctag

SEQ ID NO: 220109 - protein, 994 aa, Artificial Sequence
  derived and/or modified sequence
MPVRRGHVAPQNTYLDTIIRKFEGQSRKFLIANAQMENCAIIYCNDGFCELFGYSRVEVMQQPCTCDFLTGPNTPSSAVSRLAQALLGAEECKVDILYYRKDASSFRCLVDVVPVKNEDGAVIMFILNFEDLAQLLAKCSSRSLSQRLLSQSFLGSEGSHGRPGGPGPGTGRGKYRTISQIPQFTLNFVEFNLEKHRSSSTTEIEIIAPHKVVERTQNVTEKVTQVLSLGADVLPEYKLQAPRIHRWTILHYSPFKAVWDWLILLLVIYTAVFTPYSAAFLLSDQDESRRGACSYTCSPLTVVDLIVDIMFVVDIVINFRTTYVNTNDEVVSHPRRIAVHYFKGWFLIDMVAAIPFDLLIFRTGSDETTTLIGLLKTARLLRLVRVARKLDRYSEYGAAVLFLLMCTFALIAHWLACIWYAIGNVERPYLEHKIGWLDSLGVQLGKRYNGSDPASGPSVQDKYVTALYFTFSSLTSVGFGNVSPNTNSEKVFSICVMLIGSLMYASIFGNVSAIIQRLYSGTARYHTQMLRVKEFIRFHQIPNPLRQRLEEYFQHAWSYTNGIDMNAVLKGFPECLQADICLHLHRALLQHCPAFSGAGKGCLRALAVKFKTTHAPPGDTLVHLGDVLSTLYFISRGSIEILRDDVVVAILGKNDIFGEPVSLHAQPGKSSADVRALTYCDLHKIQRADLLEVLDMYPAFAESFWSKLEVTFNLRDAAGGLHSSPRQAPGSQDHQGFFLSDNQSGSPHELGPQFPSKGYSLLGPGSQNSMGAGPCAPGHPDAAPPLSISDASGLWPELLQEMPPRHSPQSPQEDPDCWPLKLGSRLEQLQAQMNRLESRVSSDLSRILQLLQKPMPQGHASYILEAPASNDLALVPIASETTSPGPRLPQGFLPPAQTPSYGDLDDCSPKHRNSSPRMPHLAVATDKTLAPSSEQEQPEGLWPPLASPLHPLEVQGLICGPCFSSLPEHLGSVPKQLDFQRHGSDPGFAGSWGH

SEQ ID NO: 220110 - DNA, 2985 bp, Artificial Sequence
  derived and/or modified sequence
atgcccgtgagaagaggccacgtggccccccagaacacctacctggacaccatcatcagaaagttcgagggccagagcagaaagttcctgatcgccaacgcccagatggagaactgcgccatcatctactgcaacgacggcttctgcgagctgttcggctacagcagagtggaggtgatgcagcagccctgcacctgcgacttcctgaccggccccaacacccccagcagcgccgtgagcagactggcccaggccctgctgggcgccgaggagtgcaaggtggacatcctgtactacagaaaggacgccagcagcttcagatgcctggtggacgtggtgcccgtgaagaacgaggacggcgccgtgatcatgttcatcctgaacttcgaggacctggcccagctgctggccaagtgcagcagcagaagcctgagccagagactgctgagccagagcttcctgggcagcgagggcagccacggcagacccggcggccccggccccggcaccggcagaggcaagtacagaaccatcagccagatcccccagttcaccctgaacttcgtggagttcaacctggagaagcacagaagcagcagcaccaccgagatcgagatcatcgccccccacaaggtggtggagagaacccagaacgtgaccgagaaggtgacccaggtgctgagcctgggcgccgacgtgctgcccgagtacaagctgcaggcccccagaatccacagatggaccatcctgcactacagccccttcaaggccgtgtgggactggctgatcctgctgctggtgatctacaccgccgtgttcaccccctacagcgccgccttcctgctgagcgaccaggacgagagcagaagaggcgcctgcagctacacctgcagccccctgaccgtggtggacctgatcgtggacatcatgttcgtggtggacatcgtgatcaacttcagaaccacctacgtgaacaccaacgacgaggtggtgagccaccccagaagaatcgccgtgcactacttcaagggctggttcctgatcgacatggtggccgccatccccttcgacctgctgatcttcagaaccggcagcgacgagaccaccaccctgatcggcctgctgaagaccgccagactgctgagactggtgagagtggccagaaagctggacagatacagcgagtacggcgccgccgtgctgttcctgctgatgtgcaccttcgccctgatcgcccactggctggcctgcatctggtacgccatcggcaacgtggagagaccctacctggagcacaagatcggctggctggacagcctgggcgtgcagctgggcaagagatacaacggcagcgaccccgccagcggccccagcgtgcaggacaagtacgtgaccgccctgtacttcaccttcagcagcctgaccagcgtgggcttcggcaacgtgagccccaacaccaacagcgagaaggtgttcagcatctgcgtgatgctgatcggcagcctgatgtacgccagcatcttcggcaacgtgagcgccatcatccagagactgtacagcggcaccgccagataccacacccagatgctgagagtgaaggagttcatcagattccaccagatccccaaccccctgagacagagactggaggagtacttccagcacgcctggagctacaccaacggcatcgacatgaacgccgtgctgaagggcttccccgagtgcctgcaggccgacatctgcctgcacctgcacagagccctgctgcagcactgccccgccttcagcggcgccggcaagggctgcctgagagccctggccgtgaagttcaagaccacccacgccccccccggcgacaccctggtgcacctgggcgacgtgctgagcaccctgtacttcatcagcagaggcagcatcgagatcctgagagacgacgtggtggtggccatcctgggcaagaacgacatcttcggcgagcccgtgagcctgcacgcccagcccggcaagagcagcgccgacgtgagagccctgacctactgcgacctgcacaagatccagagagccgacctgctggaggtgctggacatgtaccccgccttcgccgagagcttctggagcaagctggaggtgaccttcaacctgagagacgccgccggcggcctgcacagcagccccagacaggcccccggcagccaggaccaccagggcttcttcctgagcgacaaccagagcggcagcccccacgagctgggcccccagttccccagcaagggctacagcctgctgggccccggcagccagaacagcatgggcgccggcccctgcgcccccggccaccccgacgccgccccccccctgagcatcagcgacgccagcggcctgtggcccgagctgctgcaggagatgccccccagacacagcccccagagcccccaggaggaccccgactgctggcccctgaagctgggcagcagactggagcagctgcaggcccagatgaacagactggagagcagagtgagcagcgacctgagcagaatcctgcagctgctgcagaagcccatgccccagggccacgccagctacatcctggaggcccccgccagcaacgacctggccctggtgcccatcgccagcgagaccaccagccccggccccagactgccccagggcttcctgccccccgcccagacccccagctacggcgacctggacgactgcagccccaagcacagaaacagcagccccagaatgccccacctggccgtggccaccgacaagaccctggcccccagcagcgagcaggagcagcccgagggcctgtggccccccctggccagccccctgcaccccctggaggtgcagggcctgatctgcggcccctgcttcagcagcctgcccgagcacctgggcagcgtgcccaagcagctggacttccagagacacggcagcgaccccggcttcgccggcagctggggccactag

SEQ ID NO: 220111 - DNA, 2985 bp, Artificial Sequence
  derived and/or modified sequence
atgccggttagaaggggtcatgtggcaccccaaaatacatacctggacaccataattcgaaaatttgagggacagtcacgcaaatttttgattgctaatgctcagatggaaaactgtgctatcatttactgtaatgatggcttttgtgaactgttcggatactctagggttgaggtcatgcagcagccctgtacctgtgactttctcacaggaccaaacacccctagctccgctgtttcccgcttggcacaagccttattaggggctgaggaatgtaaggtggacattctgtactataggaaggacgcttcctccttccggtgtctggtggacgtggtgcccgtaaaaaatgaagatggcgcagttatcatgtttatattaaacttcgaagaccttgcccagttactggccaagtgttcttccagatctctgagtcagcgccttttgtcgcagtcctttctgggtagtgagggatcccatgggaggcctggaggccccggccctggaacagggcgcggcaagtataggaccatcagccaaataccccaattcaccctgaatttcgtcgagtttaatctcgagaaacaccggtcttcatcaaccaccgagatagagatcatcgcgccacataaagtcgtggaacgaactcagaacgtcaccgagaaagtaactcaggttttgagtctgggcgccgacgtcctcccggagtataagctacaggcaccaagaattcataggtggacaatattgcactattcacctttcaaggccgtatgggactggctgattctgctcctcgtgatatacactgccgttttcacgccatattctgcagccttcctcctctcagaccaggacgagagcagaagaggcgcctgctcatatacctgctctccgctgacagtggtcgatctaattgtagacattatgttcgtagtggacatcgtgatcaacttcagaactacttacgtcaacacaaatgatgaggtggtgtcacaccctcggaggatcgccgtgcattattttaaagggtggttcttaattgacatggtggccgccattccgtttgatctgttgatattcagaacggggagcgatgaaaccaccactcttattggccttctgaagacagccagactcctgagactcgtgcgtgttgcgaggaaattagatcgctactctgagtacggtgccgcggtgctcttcctgcttatgtgtacattcgcactaattgctcattggctggcctgcatctggtatgcaatcggaaacgttgagcgcccatacctggagcacaagattggatggttggactccctcggtgttcagctgggcaagcggtataacggctctgacccagcatcaggtccatcggtacaagacaagtatgttactgcactatacttcacgtttagttctttgaccagcgtgggttttggcaacgtcagcccaaacacaaactccgaaaaggtgttcagcatttgcgtgatgttgatcgggagtctgatgtatgcttcaattttcggaaacgtctctgccatcatacagagactttattctgggacagcacgctaccatacgcagatgctgagggtcaaggaattcattcggtttcatcagatccctaacccactaaggcagagactggaggaatatttccagcatgcgtggtcctatacgaacggcatcgatatgaatgcggtgctgaagggattccctgaatgcctccaggcggatatctgtctgcatttgcatcgcgccttactgcaacattgccctgccttctcgggcgctggcaaaggatgcctaagagcactggccgttaaatttaagaccacccatgcccctcctggggacacactggtgcacttaggcgacgtgctcagcacattgtacttcatttcacgcggctccatcgaaattctccgtgatgacgtggtggtggctattttgggtaagaacgatattttcggcgagcctgtgtccttgcacgcccagccggggaaaagtagtgctgatgtgagagcgctaacctattgcgatctccataaaatccagagagcagatcttctggaagtactcgacatgtatccagcctttgcagagagtttctggtcaaaactcgaggtgaccttcaacctcagagacgcggccgggggcctgcattccagcccccgtcaggcccccggcagccaggaccatcaggggttctttctgtccgataaccagagcggttccccgcatgagctcggacctcagttcccaagcaaaggttactcactgctcggacctgggtcccaaaactctatgggagcaggaccttgcgcacccggtcacccagacgctgcgcccccactgtcaatctcggatgcctctggactttggcctgaactcttgcaagagatgcctccccggcatagtccccagagccctcaggaagaccctgactgctggccactgaaactgggtagtcgactagaacagctccaagcccagatgaaccggttagaatcccgcgttagctcggacctgagcaggatcctgcagttactccagaaaccgatgccccaggggcacgccagctacatcctggaagcccctgcctccaatgacctggctttggtcccaattgcctctgagaccacttcccccggaccacgcctcccacagggcttcctcccacctgcacagacccccagctatggggatttagacgattgcagccccaaacatcgcaactcctctcctaggatgcctcacctggccgtagcaacagacaaaactctggcaccgagcagcgaacaggagcagccggaaggtctatggccgccgctcgctagccccctacatcccttggaggtgcaaggattaatttgcggcccatgcttctcaagcctcccagaacacctaggcagcgttcccaagcagctagatttccaacgacatgggagcgaccccgggttcgcgggctcttggggacactag

SEQ ID NO: 220112 - DNA, 2985 bp, Artificial Sequence
  derived and/or modified sequence
atgccagtgcggcggggacatgtagctccccagaacacctacctcgataccatcatcaggaaattcgaggggcagagtagaaagtttctcattgccaacgctcaaatggaaaactgtgctattatctactgtaacgatggtttctgcgaactgttcggatactctcgggtcgaggtgatgcaacagccatgcacatgcgacttcctaactggcccaaacaccccatcgagcgctgtcagccgtctcgcacaggcgctgctgggtgcagaggagtgcaaggtcgacatcctctactacagaaaggatgcttcctcatttagatgtctggtggatgtcgtgccagtgaagaacgaagacggtgcggtcatcatgtttatactgaactttgaggatttggcacagttactggccaaatgtagttctcgctctctgtcccaaagattactcagccagagcttcctgggctccgaaggctcacacggccgacccgggggcccaggcccagggacagggcggggcaaatatcgtacaatcagtcagatcccacagtttactctaaacttcgtggaatttaacttagagaagcaccggagcagttcaacaactgagattgaaataatcgctccacacaaggtggtcgaacggacacagaatgtgacagagaaagtgacgcaggtattgtccctgggcgctgacgtgctgcccgagtacaagttgcaggcacctagaatacaccggtggaccattctacactacagccccttcaaggccgtttgggattggctcatcctgctcctggtgatatatactgcagtttttacgccctactcagccgcctttttgctgtctgaccaggatgaatcacggcggggcgcctgcagttatacttgctcgccactgaccgtggtggacttaatcgttgatatcatgttcgtggtggatatcgtcattaatttcaggactacatacgtcaatacaaatgacgaagttgtgtctcaccccaggagaatagcagtccactatttcaagggctggttcttgatcgacatggtggctgccatcccgttcgacctgttaatttttaggactggatctgatgagacaactacgcttatcggcctgcttaaaactgcacgtcttctccgtctagtccgcgttgctaggaagctagaccggtattctgaatatggcgccgcagtacttttcctgctcatgtgcacgttcgcactgatcgctcattggcttgcgtgcatctggtatgccatcggtaacgtggaaagaccctatctggaacacaagattgggtggcttgatagcctcggggtgcagctggggaaaagatacaatggctctgatcctgcatccggcccatctgtccaagacaaatacgtgacagcactgtactttacattttcttccttgacctcagtgggcttcgggaacgtttccccgaataccaactcggaaaaagtcttctctatctgcgtgatgctcatcggttcgttaatgtacgcctctatcttcgggaacgtgtcagccattattcaacggttgtattccggtactgcacgctatcacactcagatgctcagagtaaaagagttcatccgtttccatcagatccctaatcctttgaggcagagactggaggaatatttccagcatgcctggagctatacaaacggcatagatatgaacgcagtcttgaaggggttcccagagtgcctgcaggctgatatttgtctacacttacaccgagcacttctgcagcactgccctgcatttagcggggcgggcaagggctgcctacgggccttggctgttaagttcaagaccacccatgcaccccctggtgacacactggttcatctcggcgacgtcctttccacactgtacttcatttcccgcgggtctatcgagattttacgagacgacgtggtagtggctattctgggcaagaatgacatattcggggaacctgtctctctgcacgcccagcccgggaaatcatccgccgatgtgagggccctcacttattgcgatctgcataagattcagagggctgacctgcttgaggtgctggatatgtatcctgccttcgcggagagtttttggtcgaaactggaggtgactttcaacctgcgcgacgctgctggtggtttgcacagttcaccccgtcaagcgcccggatcacaagaccatcagggcttttttctttcagacaatcagtccggatctccccacgaattagggccccagtttccgtccaaaggttacagcctgttaggacctggttcccagaattccatgggtgccggcccctgtgccccaggacaccccgatgctgcgcctccactgtctatctctgatgcctcagggctgtggcccgagctactgcaggaaatgccacctcggcattctccacagtcccctcaggaagaccccgattgttggccactgaagttgggatcacgtctcgagcagctccaggcgcagatgaaccgacttgaatccagagtgagtagcgacctgtctagaatcctccagttacttcagaagccaatgccccaagggcacgcttcctatatccttgaggcaccagccagtaacgacttggcactggtgcctatcgcatcagagacaaccagcccaggaccgcgattgccacagggtttcttgcctcctgcacaaacaccctcttacggtgacttggacgactgttcaccgaagcacaggaacagttctcctcggatgccccatctggccgtggctactgataaaactctcgccccaagctcagaacaagagcagccagaggggctttggcctccactcgccagtccgctccatccactcgaggtgcagggtctgatttgtggcccttgcttcagctccctgcccgaacatctggggagtgtgccaaaacagcttgacttccagcgacacggttccgatccagggtttgccggttcttggggacattag

SEQ ID NO: 220113 - DNA, 2985 bp, Artificial Sequence
  derived and/or modified sequence
atgcctgtgcggcggggccacgtggccccccagaacacctacctggacaccatcatcaggaagtttgagggccagagcaggaagttcctgattgccaatgcccagatggagaactgtgccatcatctactgcaatgatggcttctgtgagctgtttggctacagccgggtggaggtgatgcagcagccctgcacctgtgacttcctgaccggccccaacacccccagcagcgctgtgtcccggctggcccaggccctgctgggcgctgaggagtgcaaggtggacatcctgtactacaggaaggatgccagcagcttccgctgcctggtggatgtggtgcctgtgaagaatgaagatggagctgtgatcatgttcatcctgaactttgaggacctggcccagctgctggccaagtgcagcagccgcagcctgagccagaggctgctgagccagagcttcctgggcagcgagggcagccacggccggcctgggggccctggccctggcaccggccggggcaagtaccgcaccatcagccagatcccccagttcaccctgaactttgtggagttcaacctggagaagcacaggagcagcagcaccacagaaattgagatcatcgccccccacaaggtggtggagaggacccagaatgtgacagagaaggtgacccaggtgctgagcctgggcgcagatgtgctgcctgagtacaagctgcaggccccccgcatccaccgctggaccatcctgcactacagccccttcaaggctgtgtgggactggctgatcctgctgctggtgatctacacagctgtgttcaccccctacagcgctgccttcctgctgagtgaccaggatgagagcagaagaggagcctgcagctacacctgcagccccctgactgtggtggacctgattgtggacatcatgtttgtggtggacatcgtcatcaacttccgcaccacctacgtgaacaccaatgatgaggtggtgagccaccccaggagaattgctgtgcactacttcaagggctggttcctgattgacatggtggccgccatcccctttgacctgctgatcttcagaactggaagtgatgagaccaccaccctcatcggcctgctgaagacagcccggctgctgcggctggtgcgggtggccaggaagctggaccgctacagtgaatatggagctgctgtgctcttcctgctgatgtgcacctttgccctgattgcccactggctggcctgcatctggtacgccatcggaaatgtggagcggccctacctggagcacaagattggctggctggacagcctgggcgtgcagctgggcaagcgctacaatggaagtgaccctgccagcggccccagcgtgcaggacaagtatgtgacagccctgtacttcaccttcagcagcctgacctctgtgggctttggaaatgtgagccccaacaccaacagcgagaaggtgttcagcatctgtgtgatgctgattggcagcctgatgtatgccagcatctttggaaatgtgtctgccatcatccagaggctgtacagcggcacagcccgctaccacacccagatgctgcgggtgaaggagttcatccgcttccaccagatccccaaccccctgcggcagaggctggaggagtacttccagcacgcctggagctacaccaatggaattgacatgaatgctgtgctgaagggcttccctgagtgcctgcaggccgacatctgcctgcacctgcaccgggccctgctgcagcactgcccagccttcagcggggccggcaagggctgcctgcgggccctggccgtgaagttcaagaccacccacgcccctcctggggacaccctggtgcacctgggagatgtgctgagcaccctgtacttcatcagccggggcagcattgagatcctgagagatgatgtggtggtggccatcctgggcaagaatgacatctttggagagcctgtgtccctgcacgcccagcccgggaagagcagcgcagatgtgcgggccctgacctactgtgacctgcacaagatccagagagctgacctgctggaggtgctggacatgtacccagcctttgctgagagcttctggagcaagctggaggtgaccttcaacctgagagatgctgctgggggcctgcacagcagcccccggcaggcccctggcagccaggaccaccagggcttcttcctgagtgacaaccagagcggcagcccccatgagctgggcccccagttccccagcaagggctacagcctgctgggccctggcagccagaacagcatgggcgccggcccctgtgcccctggccacccagatgctgccccacccctgagcatcagtgatgccagcggcctgtggccagagctgctgcaggagatgccacccaggcacagcccccagagcccccaggaggaccctgactgctggcccctgaagctgggcagccggctggagcagctgcaggcccagatgaaccggctggagagccgggtgtccagtgacctgagccgcatcctgcagctgctgcagaagcccatgccccagggccacgccagctacatcctggaggccccagccagcaatgacctggccctggtgcccatcgccagcgagaccaccagccctggcccccggctgccccagggcttcctgcccccagcccagacccccagctatggagacctggatgactgcagccccaagcacaggaacagcagccccaggatgccccacctggccgtggccacagacaagaccctggcccccagcagcgagcaggagcagcctgagggcctgtggccacccctggccagccccctgcaccccctggaggtgcagggcctcatctgtggcccctgcttcagcagcctgcctgagcacctgggctctgtgcccaagcagctggacttccagagacatggcagtgaccccggctttgctggctcctggggccactag

SEQ ID NO: 220114 - DNA, 2985 bp, Artificial Sequence
  derived and/or modified sequence
atgcccgtgcggcggggccacgtggccccccagaacacctacctggatactattattcgtaagtttgagggtcaatctcgaaaattcctgatcgccaatgcacagatggagaattgcgctatcatttactgtaatgacgggttctgcgagttgttcggctacagtagagtggaggtgatgcagcagccttgcacgtgcgatttcctgactggaccgaatactccctctagcgcggtgtcccgactagcgcaggccctcctgggggctgaggagtgtaaagttgacattctgtattaccggaaggacgcctcctctttcagatgcctcgtggacgtggtgcccgttaaaaacgaagacggagctgtcatcatgttcattctgaacttcgaggatttagcccagctgctggcaaagtgtagctctcgctccttgtctcagaggctgttgagccagtcatttttggggtcggagggctctcacgggaggcctggtggtcctggcccaggaacgggtcggggcaaatatcggacaatttcgcagatccctcaattcacactgaactttgttgaatttaatctggaaaaacaccggtcttcttccacgactgagatcgaaattattgctccacacaaggttgtggaaagaacacaaaatgttaccgagaaggtcacccaggtgctgagtctgggagccgacgtcctgcccgagtacaaactccaggccccgcgcatccatcgttggaccattttgcattactccccttttaaagccgtatgggactggttgatcctgttgcttgtgatctataccgcagtttttaccccatattctgccgctttcctgctgagcgaccaggacgagagtcgccgcggtgcttgcagctacacatgtagtcccctgactgtcgtggacctcatagtggacattatgttcgtggtggatatcgtgatcaactttaggaccacttacgtgaatactaatgatgaggttgtgtcacacccccgaagaattgcggtgcactatttcaaaggctggtttctcatcgatatggttgcagccatcccgttcgaccttctgatttttcgtacagggtccgacgagacaacgactctgataggattgctgaagaccgcacggttgctgcgactcgttagagttgctagaaaattagatcgctacagcgagtatggtgccgctgtgctgtttctgctcatgtgtacatttgcgctgatcgcacactggttggcatgtatctggtatgccatcggcaatgtcgagagaccttacctggaacacaaaatcggctggctggactccttgggggtgcagctgggtaaacgctacaacgggtctgaccctgcttctgggcctagtgtccaggacaagtatgtcaccgccctgtatttcactttcagttctttgaccagcgtgggctttggtaatgtaagccccaatactaactctgagaaggtgtttagtatctgcgtcatgctcattggtagtctcatgtacgcgtctatctttggtaatgtgagcgcaatcatacagagactctacagcggaactgctcggtatcatacccagatgcttagggtaaaagaatttattcggttccatcagatccccaacccactcaggcagcgcctggaagagtactttcagcatgcctggagctacacaaacggcatcgacatgaacgccgtgctcaaaggatttcccgagtgcttgcaggctgacatctgtcttcacttgcaccgggcattactgcagcactgtccagcgttctctggtgccgggaaaggatgcctgcgcgccttagcagttaagttcaagaccacgcacgccccaccaggtgacaccctcgtgcatctgggcgatgtgctcagtacgttatactttattagtcgaggctcaattgagattctgcgggacgacgtggttgtagctatcctgggcaaaaacgacattttcggtgaacccgtgtcacttcatgcacagccaggaaagtcttctgccgatgtcagggccctcacatattgcgacttgcataagattcagagagctgacttgttggaagtgctcgatatgtacccagcttttgcagagtcattttggagtaagcttgaagtgacatttaatttgagggatgctgccggggggctacacagctcccctcgccaggcaccaggctcccaggatcaccaggggtttttcctgtccgataaccagagcgggagcccacacgagctgggaccccagttcccaagcaaggggtacagcctgctggggcctgggagtcagaactctatgggagccgggccgtgcgctcctggtcacccagatgccgcccccccactcagcatctctgacgcatcgggtctgtggcccgagctgctccaagaaatgcccccgcgccactctccacagtccccgcaggaagaccctgattgctggcctctgaaattgggaagtaggttggagcaacttcaggcccagatgaaccgtcttgaatctcgtgtctcatcagacttgtcccgtattctccagttgctgcagaaaccaatgccacagggtcacgccagttacatcttagaggctcctgccagcaatgacctcgccctggtccccatcgccagcgagacaaccagcccgggtccccgacttccccagggatttctgcctcctgcccagaccccctcgtatggggatctggacgattgttcccctaagcatcgcaatagttcgcctcggatgccccacctggctgtggctacagacaagactctggccccctcctcagagcaggagcagcccgagggactttggcctcccctcgcatctccactgcacccgctggaggtgcagggactaatatgcggaccctgcttcagttcactccccgaacacctggggtcggtgcctaaacagctcgacttccaaagacacggcagcgaccccggcttcgcagggtcctggggacattag

SEQ ID NO: 220115 - DNA, 2985 bp, Artificial Sequence
  derived and/or modified sequence
atgcccgtgcggcggggccacgtggccccccagaacacctacctggacaccattattagaaaatttgagggacagagcaggaaatttttaatcgccaacgcgcagatggagaattgcgctattatatactgcaacgatgggttctgcgagttattcgggtatagtagggtggaggtgatgcagcagccctgcacctgcgattttctcacgggcccaaacaccccttcttcagccgtgtccaggctcgcacaggccctccttggggccgaagaatgcaaagtagatatcctgtactataggaaagacgccagcagctttcggtgcttagtggacgtcgtcccagtgaaaaacgaagacggcgcagtaatcatgtttatactaaactttgaagatttggcccaactcctcgcaaagtgttccagccgcagcttaagccagaggctcctatctcagtcatttctcggctccgaaggttcccatggacgcccggggggaccgggtcccggcacagggcgcgggaaatatcgaacaatttctcaaattccgcagtttacgttgaattttgtggaattcaatttggagaagcaccggtctagttcaaccacagagatcgagattattgctccacacaaggtcgtggagagaacccagaacgtcactgagaaggttacgcaagtcctgagcttaggcgctgacgtgctgccagagtataagctccaggctcctcgaatccaccggtggactatactgcattattctccatttaaagcggtatgggactggcttatacttctattagtgatctataccgctgtcttcactccatactcggctgctttccttctgagtgaccaagacgaatcacggcggggagcgtgttcatatacctgctcgcctctcacagttgtcgatctaatcgtggatatcatgttcgtcgtggatattgtgatcaacttcagaaccacatacgtgaacactaatgacgaggtggtctcccatccacggagaattgccgtgcactacttcaaggggtggtttctgattgatatggtggccgccattccgttcgatctcttgatttttcgtacaggatccgatgagactaccaccctgattggactgctcaagaccgcccgccttcttagactagtgagggttgccaggaagctggaccggtactctgaatacggtgctgccgttctgtttctgcttatgtgtaccttcgccctcatcgcacattggcttgcctgcatatggtacgccattgggaatgtcgagcgcccttacctcgagcacaagatcggctggttagattctctgggggtgcagctgggaaaaaggtataacggtagtgatccagcatctggtccctccgtgcaggataaatacgtaaccgccctatatttcactttcagcagcctgactagtgtcggcttcggcaatgtgtccccaaacacaaattctgaaaaggtgttttcgatctgcgtgatgctcataggctcgctgatgtacgcctccatttttgggaatgtatctgccattattcaacggctttatagcggcacagccagatatcacacacaaatgctacgggttaaagaattcataagattccaccagatacccaacccgctgcggcagagattagaggaatactttcaacacgcatggtcttacacaaacggtatcgacatgaatgcagtgctgaaagggtttcctgagtgcttacaggccgacatctgtctacacctgcaccgggcactgctgcagcactgccccgccttttcgggggcaggcaagggctgcttgcgggctcttgctgtaaagttcaaaacaacccatgctcctcccggcgacacactggtccatttaggagatgtcctctccaccctgtacttcatctcccgcggctcgattgagattctaagagatgatgtggtcgttgccatcctgggaaagaatgacatcttcggcgagcccgtttccctccatgcccagcccgggaagtcctcagccgacgttcgggccctcacctactgtgatctccacaaaattcagagagcagatttgctggaggtactggatatgtatccagcattcgctgaatcattctggtcaaagctcgaggtaacctttaatttacgcgacgcagcaggaggcctgcactcatctcccagacaagcccctgggtctcaggaccaccagggctttttcctctcagacaatcagagcggctctccccatgaactgggtccacagtttccgagcaaaggatactctttgctgggccctggttcacagaactccatgggggcaggtccatgcgcacccggacaccctgacgctgcacctcccctttccattagcgacgcgagcggtctgtggcctgaactcttacaggagatgcccccaagacatagcccacagagcccccaggaggaccccgattgctggccactgaaactcgggtctcgtctggaacagctgcaggcccagatgaacaggttagagtccagggtttcgtctgacttgagcaggatacttcaactgctgcagaagcccatgcctcagggacacgcatcgtacatcctggaagctcccgccagcaacgacctggctttggtgccaattgcttctgagacgacctcccccggaccaagattaccacaggggtttctaccaccagcgcagacaccctcgtatggggacttggacgactgttcgccgaaacacaggaattcttccccccgcatgccacatctggcagtcgccactgacaagacgttggctccctcatcggagcaggagcagccagagggcctttggccaccgcttgcatcgcctttgcacccactcgaagtccagggtttgatttgtggcccatgtttctcctctctgccagaacatttgggttccgttcctaagcagctggatttccagcgccatggaagtgaccctgggtttgctgggtcctggggtcactag

SEQ ID NO: 220116 - DNA, 3821 bp, Artificial Sequence
  derived and/or modified sequence
gcggccgaaagatgccggtccgcaggggccacgtcgctccccaaaacacttacctggacaccatcatccgcaagttcgagggccaaagtcggaagttcctgattgccaatgctcagatggagaactgcgccatcatttactgcaacgacggcttctgcgaactcttcggctactcccgagtggaggtgatgcagcaaccctgcacctgcgacttcctcacaggccccaacacaccaagcagcgccgtgtcccgcctagcgcaggccctgctgggggctgaggagtgcaaggtggacatcctctactaccgcaaggatgcctccagcttccgctgcctggtagatgtggtgcccgtgaagaacgaggacggggctgtcatcatgttcattctcaacttcgaggacctggcccagctcctggccaagtgcagcagccgcagcttgtcccagcgcctgttgtcccagagcttcctgggctccgagggctctcatggcaggccaggcggaccagggccaggcacaggcaggggcaagtacaggaccatcagccagatcccacagttcacgctcaacttcgtggagttcaacttggagaagcaccgctccagctccaccacggagattgagatcatcgcgccccataaggtggtggagcggacacagaacgtcactgagaaggtcacccaggtcctgtccctgggcgcggatgtgctgccggagtacaagctgcaggcgccgcgcatccaccgctggaccatcctgcactacagccccttcaaggccgtgtgggactggctcatcctgctgctggtcatctacacggctgtcttcacgccctactcagccgccttcctgctcagcgatcaggacgaatcacggcgtggggcctgcagctatacctgcagtcccctcactgtggtggatctcatcgtggacatcatgttcgtcgtggacatcgtcatcaacttccgcaccacctatgtcaacaccaatgatgaggtggtcagccacccccgccgcatcgccgtccactacttcaagggctggttcctcattgacatggtggccgccatccctttcgacctcctgatcttccgcactggctccgatgagaccacaaccctgattgggctattgaagacagcgcggctgctgcggctggtgcgcgtagcacggaagctggaccgctactctgagtatggggcggctgtgctcttcttgctcatgtgcaccttcgcgctcatagcgcactggctggcctgcatctggtacgccatcggcaatgtggagcggccctacctagaacacaagatcggctggctggacagcctgggtgtgcagcttggcaagcgctacaacggcagcgacccagcctcgggcccctcggtgcaggacaagtatgtcacagccctctacttcaccttcagcagcctcaccagcgtgggcttcggcaatgtctcgcccaacaccaactccgagaaggtcttctccatctgcgtcatgctcatcggctccctgatgtacgccagcatcttcgggaacgtgtccgcgatcatccagcgcctgtactcgggcaccgcgcgctaccacacgcagatgctgcgtgtcaaggagttcatccgcttccaccagatccccaacccactgcgccagcgcctggaggagtatttccagcacgcctggtcctacaccaatggcattgacatgaacgcggtgctgaagggcttccccgagtgcctgcaggctgacatctgcctgcacctgcaccgcgcactgctgcagcactgcccagctttcagcggcgccggcaagggctgcctgcgcgcgctagccgtcaagttcaagaccacccacgcgccgcctggggacacgctggtgcacctcggcgacgtgctctccaccctctacttcatctcccgaggctccatcgagatcctgcgcgacgacgtggtcgtggccatcctaggaaagaatgacatctttggggaacccgtcagcctccatgcccagccaggcaagtccagtgcagacgtgcgggctctgacctactgcgacctgcacaagatccagcgggcagatctgctggaggtgctggacatgtacccggcctttgcggagagcttctggagtaagctggaggtcaccttcaacctgcgggacgcagccgggggtctccactcatccccccgacaggctcctggcagccaagaccaccaaggtttctttctcagtgacaaccagtcagggtctccccatgagctggggccccagttcccctctaagggctacagcctcctgggtcctgggagccagaactccatgggggcaggaccttgtgctccagggcacccagatgcagcccctcccctgagcatctcagatgcatctggcctctggcctgagctactgcaggaaatgcccccaaggcacagcccccaaagccctcaggaagacccagattgctggcctctgaagctgggctccaggctagagcagctccaggcccagatgaacaggctggagtcccgcgtgtcctcagacctcagccgcatcttgcagctcctccagaagcccatgccccagggccacgccagctacattctggaagcccctgcctccaatgacctggccttggttcctatagcctcggagacgacgagtccagggcccaggctgccccagggctttctgcctcctgcacagaccccaagctatggagacttggatgactgtagtccaaagcacaggaactcctcccccaggatgcctcacctggctgtggcaacggacaaaactctggcaccatcctcagaacaggaacagcctgaggggctctggccacccctagcctcacctctacatcccctggaagtacaaggactcatctgtggtccctgcttctcctccctccctgaacaccttggctctgttcccaagcagctggacttccagagacatggctcagatcctggatttgcagggagttggggccactgaactccaagataaagacaccatgaggggactgaaggtgggcaaggtgagagttaaggatcttggggaggtggccgggtgcagtggctcgcctgtaatcccagcactttgggaggccgaggcgggcggatcagaccatcctggctaacacggtgaaaccccacctctactaaaattaaaaaagaaaaaaaatagccgggcgtggtggcaggcgcctgtaatcccagctactggggaggctgaggcaggagaatggcatgaacccgggaggtggaggttgcagggagccgaggccgcaccactgcactccagcctgggtgacagagtgagactccaactcaaaaaaaaaaaaaaaaaagatcttggggaggcagacagccccccagatgggcctctcctaaagtagctacaaactgctgatccaggtgacccaggatggcgtgggtgaagaagctcacgacttttcccagcctcctccagggctccatttaaacagcaagcctggtgcagggtgggagagtctcaggtgtggaggcagcttacaggattgagggggcagtgaagaaagaggtttctgatctacatgagtaccttgctctgagcctcccagctcagaaccctccagcacctcatggctcagcaccaaggcccggggttggtcagaactcttaccatgagcctctgacctggctggagatggaggtatgttctgtggcagacatgtcaggacagtcctccagccctctgctcctgatggttctgtgacattgggtctcttgagggcagtggagtgtcacacagctaataaagtacacatttcatgttgga

SEQ ID NO: 220117 - DNA, 3402 bp, Artificial Sequence
  derived and/or modified sequence
acgctgctgagcccgaggacagacggagacgccgggagccagtggcgcctgtggctccgggcaggggccgcggccgaaagatgccggtccgcaggggccacgtcgctccccaaaacacttacctggacaccatcatccgcaagttcgagggccaaagtcggaagttcctgattgccaatgctcagatggagaactgcgccatcatttactgcaacgacggcttctgcgaactcttcggctactcccgagtggaggtgatgcagcaaccctgcacctgcgacttcctcacaggccccaacacaccaagcagcgccgtgtcccgcctagcgcaggccctgctgggggctgaggagtgcaaggtggacatcctctactaccgcaaggatgcctccagcttccgctgcctggtagatgtggtgcccgtgaagaacgaggacggggctgtcatcatgttcattctcaacttcgaggacctggcccagctcctggccaagtgcagcagccgcagcttgtcccagcgcctgttgtcccagagcttcctgggctccgagggctctcatggcaggccaggcggaccagggccaggcacaggcaggggcaagtacaggaccatcagccagatcccacagttcacgctcaacttcgtggagttcaacttggagaagcaccgctccagctccaccacggagattgagatcatcgcgccccataaggtggtggagcggacacagaacgtcactgagaaggtcacccaggtcctgtccctgggcgcggatgtgctgccggagtacaagctgcaggcgccgcgcatccaccgctggaccatcctgcactacagccccttcaaggccgtgtgggactggctcatcctgctgctggtcatctacacggctgtcttcacgccctactcagccgccttcctgctcagcgatcaggacgaatcacggcgtggggcctgcagctatacctgcagtcccctcactgtggtggatctcatcgtggacatcatgttcgtcgtggacatcgtcatcaacttccgcaccacctatgtcaacaccaatgatgaggtggtcagccacccccgccgcatcgccgtccactacttcaagggctggttcctcattgacatggtggccgccatccctttcgacctcctgatcttccgcactggctccgatgagaccacaaccctgattgggctattgaagacagcgcggctgctgcggctggtgcgcgtagcacggaagctggaccgctactctgagtatggggcggctgtgctcttcttgctcatgtgcaccttcgcgctcatagcgcactggctggcctgcatctggtacgccatcggcaatgtggagcggccctacctagaacacaagatcggctggctggacagcctgggtgtgcagcttggcaagcgctacaacggcagcgacccagcctcgggcccctcggtgcaggacaagtatgtcacagccctctacttcaccttcagcagcctcaccagcgtgggcttcggcaatgtctcgcccaacaccaactccgagaaggtcttctccatctgcgtcatgctcatcggctccctgatgtacgccagcatcttcgggaacgtgtccgcgatcatccagcgcctgtactcgggcaccgcgcgctaccacacgcagatgctgcgtgtcaaggagttcatccgcttccaccagatccccaacccactgcgccagcgcctggaggagtatttccagcacgcctggtcctacaccaatggcattgacatgaacgcggtgctgaagggcttccccgagtgcctgcaggctgacatctgcctgcacctgcaccgcgcactgctgcagcactgcccagctttcagcggcgccggcaagggctgcctgcgcgcgctagccgtcaagttcaagaccacccacgcgccgcctggggacacgctggtgcacctcggcgacgtgctctccaccctctacttcatctcccgaggctccatcgagatcctgcgcgacgacgtggtcgtggccatcctaggaaagaatgacatctttggggaacccgtcagcctccatgcccagccaggcaagtccagtgcagacgtgcgggctctgacctactgcgacctgcacaagatccagcgggcagatctgctggaggtgctggacatgtacccggcctttgcggagagcttctggagtaagctggaggtcaccttcaacctgcgggacgcagccgggggtctccactcatccccccgacaggctcctggcagccaagaccaccaaggtttctttctcagtgacaaccagtcagggtctccccatgagctggggccccagttcccctctaagggctacagcctcctgggtcctgggagccagaactccatgggggcaggaccttgtgctccagggcacccagatgcagcccctcccctgagcatctcagatgcatctggcctctggcctgagctactgcaggaaatgcccccaaggcacagcccccaaagccctcaggaagacccagattgctggcctctgaagctgggctccaggctagagcagctccaggcccagatgaacaggctggagtcccgcgtgtcctcagacctcagccgcatcttgcagctcctccagaagcccatgccccagggccacgccagctacattctggaagcccctgcctccaatgacctggccttggttcctatagcctcggagacgacgagtccagggcccaggctgccccagggctttctgcctcctgcacagaccccaagctatggagacttggatgactgtagtccaaagcacaggaactcctcccccaggatgcctcacctggctgtggcaacggacaaaactctggcaccatcctcagaacaggaacagcctgaggggctctggccacccctagcctcacctctacatcccctggaagtacaaggactcatctgtggtccctgcttctcctccctccctgaacaccttggctctgttcccaagcagctggacttccagagacatggctcagatcctggatttgcagggagttggggccactgaactccaagataaagacaccatgaggggactgaaggtgggcaaggtgagagttaaggatcttggggaggtggccgggtgcagtggctcgcctgtaatcccagcactttgggaggccgaggcgggcggatcagaccatcctggctaacacggtgaaaccccacctctactaaaattaaaaaagaaaaaaaatagccgggcgtggtggcaggcgcctgtaatcccagctactggggaggctgaggcaggagaatggcatgaacccgggaggtggaggttgcagggagccgaggccgcaccactgcactccagcctgggtgacagagtgagactccaactc

SEQ ID NO: 220118 - DNA, 2985 bp, Artificial Sequence
  derived and/or modified sequence
atgcctgtgcgcaggggccacgtcgctccacaaaacacataccttgatacaatcattaggaagttcgaggggcagtcccggaaatttctgattgccaatgcacagatggagaattgtgcaattatttactgtaacgacgggttttgcgagctgttcggatattcaagggtagaagtgatgcaacaaccatgcacttgtgattttctcaccggacccaatactccaagcagcgccgtgtctaggctggcacaggccttgctgggtgcagaggaatgcaaggtcgatatactctactatcgtaaggatgcctcgtcttttcggtgcctggtggacgtagtacccgtgaaaaatgaggatggtgcggttattatgttcatactgaatttcgaagacctggctcaattactagcaaagtgctcctccagatcactcagccaaaggctgctttctcaatcattcctgggctccgaggggtcccatggcagacccggaggacctggcccaggcaccggcaggggaaaatatagaactatctctcaaatcccccagttcactctcaacttcgtggagtttaatctcgaaaaacatcgcagctcttctaccaccgagattgagatcattgctccacacaaagtcgtcgagcggacgcagaatgtgaccgagaaagtgacccaggtgctgtcattgggggcagatgtcctccccgaatataaacttcaagcacccaggatccatcgatggaccattcttcattactctcctttcaaagcagtgtgggactggttaatccttctcctggtgatttacactgctgtattcaccccctacagtgccgcattcctcctgtccgaccaggatgaaagtagacgaggggcttgcagctacacctgctctccactcactgtcgtagatttaatcgtggacattatgtttgttgtagacatcgtgatcaacttcaggacaacttacgtcaacacgaatgatgaagtggtgagccatcccaggcgcattgctgtgcattatttcaaagggtggtttctaattgacatggtggcggctatccctttcgatttgctgatctttaggacgggcagtgatgagactaccacgctgatcggcctgcttaagacagccagacttctgcgcttggtgagagtggccaggaaattggacaggtacagtgaatacggcgctgccgtgctcttcctgcttatgtgcacattcgccctgatagctcattggcttgcctgcatctggtatgcaatcggcaatgtggaaagaccctatctagagcacaagataggttggctggatagcttaggggttcaactaggcaagaggtacaatggaagcgatccagcctcgggccctagtgtgcaggacaaatacgtgacagcactgtatttcactttttccagccttacctcggtaggttttgggaatgtatccccgaataccaactcagagaaggttttttccatatgtgtcatgctcattggtagcctgatgtatgcaagcattttcggcaacgtctctgccattatccagagattatatagcggtactgctcggtatcacacgcagatgctccgcgttaaggaatttatcaggttccaccagattccaaatcccttacggcagcgccttgaggagtacttccagcacgcatggtcctataccaacggaattgatatgaatgccgtattgaaaggctttccggaatgtctgcaagccgacatctgcctgcacctgcaccgtgccctgctgcagcattgccccgctttttcaggggcagggaagggatgcttacgggctctggctgtgaaatttaaaactacccatgcccctccaggagatactctggtccatttgggcgacgtgttaagcacactgtacttcatatccaggggcagcatcgagatcctgcgagatgacgtggtcgtggccatcttgggaaagaacgacatattcggagagcctgtttctttgcacgctcagcctggtaaaagctccgccgatgttcgagctctgacctattgtgatctccataagatacagcgggctgatctgctggaggtgctggacatgtatcccgcattcgccgagtcattctggtcgaaacttgaggttacctttaacttgagagatgcggctgggggactgcactcttcacctcgtcaggctccaggatcacaagatcaccaggggttttttctgagcgataatcagtccggctcaccccacgagctgggaccacagtttcccagtaagggttactccctgttgggacccggttcccagaactctatgggcgctggcccttgcgcacctggacatccagacgcggcaccccctctctcaatctcggatgcatccggcctctggcccgaactcttacaagagatgccaccacgccactccccacaaagtcctcaagaagatcctgattgttggcctttaaagctcggcagccggctggaacagctacaggctcagatgaaccggctcgagtcacgggttagcagcgatctgtctagaattcttcagcttcttcagaaacccatgccacagggacatgcttcctatattctggaagctcctgcttcgaatgacctggctctcgtacctatcgcctcagaaacgactagtccaggacctaggctgccacagggcttcttgcctcctgcccagactccctcctatggtgatctggatgactgctcgccaaagcatcggaatagcagccctcggatgccccatctcgccgtggccaccgataagaccctggccccttctagtgagcaggagcagccggaaggtctgtggccacccctcgcctcacccctgcacccacttgaggtgcagggtttgatctgtggtccctgcttttcatctctgccggagcacctggggagcgtgcctaagcagctggattttcaaaggcatggaagcgacccaggattcgctgggtcctggggtcattag

SEQ ID NO: 220119 - DNA, 2985 bp, Artificial Sequence
  derived and/or modified sequence
atgcccgttcggcgaggccacgttgccccacagaatacttacttggatacaatcattagaaaattcgaggggcaatccagaaaatttttgatcgcaaacgcccagatggaaaactgtgcaattatttactgcaatgacggtttctgcgaactattcggctactcccgggtagaagtgatgcagcagccctgtacctgtgattttttgaccggtcctaatacaccttcctccgcggtttcgagattagcacaagcgctgctcggcgctgaggaatgcaaagttgatatactgtattatcggaaggatgcaagctcctttagatgcctggtcgatgtggtgcctgttaagaacgaagacggagccgttattatgttcatcctcaacttcgaagacctggcacaactgcttgctaaatgtagttcccggtccctaagtcaacggctgctttcgcagagcttcctgggcagcgaggggtcccacggacggcctgggggtcctggccctggaaccgggaggggcaaatataggactattagtcagataccccagttcacactcaattttgtcgagtttaacttagaaaagcacagaagtagttcaaccaccgaaatagagatcatcgcccctcataaggtcgtggaacgcacgcagaacgtgaccgaaaaggtgactcaggttctgtccctgggggcagacgttctaccagaatacaaactgcaggctccacgaattcacagatggacaattctccactactcaccctttaaggccgtttgggattggttgattctgctgctggtgatctacacggctgtctttaccccctattccgccgctttcctgctgagtgatcaagacgaatcaaggcgaggcgcatgtagttatacttgcagtcctttgacagttgtagacttgattgttgatataatgttcgtggtggacatcgtgattaatttccggaccacttacgttaacactaacgatgaggttgtgagccaccccaggaggatcgcggtccactacttcaagggctggttcctgattgatatggtggccgctatcccgtttgatttactgattttccgcactgggagtgacgaaacaacaacgctcatcggcttgctcaaaacagccagattgctaagactagtaagggtggctaggaaattggatcgctacagtgagtatggagctgcggtgcttttcctcctaatgtgtactttcgcactgatcgcccactggttggcatgcatctggtatgctatcggaaatgtcgagcgtccatatctcgagcataaaattggatggctcgactcactgggggtccagctggggaaacgatataatgggtctgaccccgcttctggacctagcgtccaagataaatacgtgactgccttgtattttacctttagctccttgacgagcgtgggatttggcaatgtctctcctaataccaacagcgagaaggtcttcagcatctgcgttatgctcatcggatccctcatgtacgcatctatttttggcaatgtgagcgctattatccagcggctgtactcgggtaccgctagataccatacacagatgttacgcgtgaaagaatttattcgctttcatcagattcccaatcctctgcgccagcgactcgaggagtacttccagcatgcctggtcttatacaaatggaatcgacatgaatgcggtgctcaaaggattccccgagtgcttgcaagctgacatctgcctgcacctccatcgggcactgctgcagcactgtcccgcttttagcggagccggaaaagggtgcctgcgcgctctagccgtaaaattcaaaacaacacacgcccctccaggagatactctggtccatctgggcgacgtccttagcactctatacttcataagcaggggaagcatcgagatactgagagacgacgtggtggtggctatcctggggaaaaatgacatttttggggaaccggtgtccttgcacgcccagcccggaaaaagtagtgccgacgttcgggctctgacctattgtgatctgcacaagattcagcgagctgacttgctcgaggtcctggacatgtaccccgctttcgctgagtccttttggagtaagttggaggtgacatttaatctgcgcgatgctgctggcggtttgcacagctcacctcgtcaggcacccggttctcaagaccatcagggatttttcctgagcgacaaccagtccgggtccccacacgaactaggtccacagttccccagtaaagggtacagcctcttagggccaggtagccagaacagcatgggagccggaccctgcgcgcctggtcatcccgacgcagcccctccactttcaatcagtgacgcatctggcctctggcctgagctgctccaggaaatgccacctaggcacagtcctcagagcccccaggaggacccagattgctggcctctgaagctcggcagcaggctagagcaactgcaggcccagatgaaccgccttgaaagtagagtttcctcagacctgtcgcgaattctccagcttcttcagaagccgatgccccaggggcacgccagctatatcctcgaagcacctgctagcaatgatctcgctctcgttcccatcgcgagcgagacaactagtccgggaccaaggctgccacaaggtttccttccacccgctcaaacgccatcatacggagatctggacgactgcagccctaaacatcgcaactcttcgcctcggatgcctcacctggccgtagccacagataaaactctggcgccttcgtccgaacaagaacaacctgaaggtctttggccccctctggcatccccccttcaccctctggaggtacagggactgatatgtggcccatgctttagcagcctaccagaacatctgggaagcgtgccaaaacagctcgatttccagagacatgggagtgacccaggcttcgctggaagctggggccactag

SEQ ID NO: 220120 - protein, 538 aa, Artificial Sequence
  derived and/or modified sequence
MWSGRSSFTSLVVGVFVVYVVHTCWVMYGIVYTRPCSGDANCIQPYLARRPKLQLSVYTTTRSHLGAENNIDLVLNVEDFDVESKFERTVNVSVPKKTRNNGTLYAYIFLHHAGVLPWHDGKQVHLVSPLTTYMVPKPEEINLLTGESDTQQIEAEKKPTSALDEPVSHWRPRLALNVMADNFVFDGSSLPADVHRYMKMIQLGKTVHYLPILFIDQLSNRVKDLMVINRSTTELPLTVSYDKVSLGRLRFWIHMQDAVYSLQQFGFSEKDADEVKGIFVDTNLYFLALTFFVAAFHLLFDFLAFKNDISFWKKKKSMIGMSTKAVLWRCFSTVVIFLFLLDEQTSLLVLVPAGVGAAIELWKVKKALKMTIFWRGLMPEFQFGTYSESERKTEEYDTQAMKYLSYLLYPLCVGGAVYSLLNIKYKSWYSWLINSFVNGVYAFGFLFMLPQLFVNYKLKSVAHLPWKAFTYKAFNTFIDDVFAFIITMPTSHRLACFRDDVVFLVYLYQRWLYPVDKRRVNEFGESYEEKATRAPHTD

SEQ ID NO: 220121 - protein, 502 aa, Artificial Sequence
  derived and/or modified sequence
MWSGRSSFTSLVVGVFVVYVVHTCWVMYGIVYTRPCSGDANCIQPYLARRPKLQLSVYTTTRSHLGAENNIDLVLNVEDFDVESKFERTVNVSVPKKTRNNGTLYAYIFLHHAGVLPWHDGKQVHLVSPLTTYMVPKPEEINLLTGESDTQQIEAEKKPTSALDEPVSHWRPRLALNVMADNFVFDGSSLPADVHRYMKMIQLGKTVHYLPILFIDQLSNRVKDLMVINRSTTELPLTVSYDKVSLGRLRFWIHMQDAVYSLQQFGFSEKDADEVKGIFVDTNLYFLALTFFVAAFHLLFDFLAFKNDISFWKKKKSMIGMSTKLWKVKKALKMTIFWRGLMPEFQFGTYSESERKTEEYDTQAMKYLSYLLYPLCVGGAVYSLLNIKYKSWYSWLINSFVNGVYAFGFLFMLPQLFVNYKLKSVAHLPWKAFTYKAFNTFIDDVFAFIITMPTSHRLACFRDDVVFLVYLYQRWLYPVDKRRVNEFGESYEEKATRAPHTD

SEQ ID NO: 220122 - DNA, 1617 bp, Artificial Sequence
  derived and/or modified sequence
atgtggtcggggagatcatcttttacatccctggtcgtgggtgtattcgtagtctatgtggtacacacgtgttgggtgatgtatggaatagtctatactagaccttgctctggggatgctaactgtattcagccataccttgcccgtcgccccaagctgcagctctctgtgtacactaccacaagaagtcatctgggagcagaaaataatattgatttggtactgaacgtggaggatttcgacgtggagtctaagtttgagaggaccgtcaacgttagtgttccaaagaagacacgaaataatggcacactctacgcatacatcttcctgcaccatgccggagtgctgccttggcatgatgggaagcaggtgcaccttgtgtccccattaactacctatatggttccgaaacctgaggagattaacctcttaaccggagagagtgatacccagcagattgaggctgagaagaaacccacttccgctttggacgagccagtgagccactggcggccaaggcttgcattaaatgtgatggccgacaactttgttttcgacggtagctcactgccggccgacgtccacagatatatgaaaatgatacagctgggaaaaacggtccattatcttcccatcttatttatagaccaactgagtaatcgggtaaaggatctgatggtgatcaacaggtctacaacggaactgccattgaccgtatcctatgacaaggtgtctttggggcgtctcagattttggatccatatgcaggatgctgtctattccctgcagcaatttgggttctccgaaaaagatgcagatgaggttaagggaatctttgtagatactaatctctacttccttgcactaactttcttcgtggccgctttccatctcctcttcgacttcctggcattcaagaacgacatcagcttctggaagaagaagaaaagcatgattggaatgtctactaaggcagtgctgtggcgttgctttagcacggtagttattttccttttcctcctagatgagcaaacgtcactcctggttttggttcccgctggcgttggcgctgctatagagctgtggaaggtcaagaaagccttgaagatgacaattttctggcgggggttgatgcccgagttccagttcggaacatattccgaatcagaacggaagacagaggagtatgatactcaagcaatgaagtatttgtcctatcttctgtatcccctctgtgtgggcggcgccgtctacagtctcctgaacatcaagtataagagctggtactcatggttgatcaactctttcgttaatggggtgtacgccttcggttttttattcatgctgccccagctgtttgtgaattataaattgaagagcgttgctcacttgccatggaaagccttcacctacaaggcatttaacacttttatcgatgacgtatttgcatttattattaccatgcccacctcacatcgactcgcctgttttcgggatgacgtggtcttcctcgtttacctctatcaaaggtggttgtatccagtggataagcggcgggtaaacgagtttggagaaagctatgaggaaaaggctacccgggcccctcacactgactag

SEQ ID NO: 220123 - DNA, 1509 bp, Artificial Sequence
  derived and/or modified sequence
atgtggagcggcagatcaagtttcacatcactggttgtgggagttttcgtcgtttacgtggtacatacgtgctgggttatgtacggaatcgtctatacccgcccatgttcaggcgatgctaactgcattcagccatacctggcaaggcggcccaagcttcagctaagtgtttacaccacaacccgctcacacttaggtgctgaaaataatatcgacctcgtccttaacgtagaggactttgacgtcgagagcaagttcgaaaggactgtaaacgtatcagtcccaaaaaagacacgaaataatggaaccctgtacgcctacatcttccttcatcacgccggcgttctcccctggcatgatggtaaacaagtccatcttgtaagtcccctcacgacgtatatggttcccaagcctgaggaaatcaatctactgacaggagagagtgatacccagcagatcgaggctgaaaaaaagccaacctccgcactggatgagcccgtgtcacattggaggcccagactggccctgaacgtcatggcagacaactttgttttcgatggtagcagcctccccgcggatgttcatcgatacatgaaaatgatccaattggggaagacagtgcattatctgccgatacttttcatagatcagctttccaatcgggttaaagatctcatggttattaatcgcagcacaacagaactgccactcaccgtcagttacgataaggttagcctgggccgcctgcggttttggatccacatgcaagacgctgtctactccctgcaacagtttggcttcagcgaaaaggatgccgacgaagttaagggcatctttgtagatacaaacttatatttcctcgcactaacattttttgtggcggcctttcacctgttatttgatttcttagcattcaagaacgatatttctttctggaagaagaagaagtctatgatcggtatgtctaccaaactctggaaagttaagaaggccctgaaaatgaccatcttctggcgaggactgatgccggagtttcagtttggcacctacagcgaatctgaacgcaaaactgaggagtacgacacccaagccatgaagtacctctcatatcttctctaccctttatgcgtgggcggagccgtgtattctcttctcaatatcaagtacaaaagctggtactcttggctaattaacagcttcgtgaatggggtgtacgcctttgggttcttgttcatgctgccccagcttttcgttaactataagctcaaaagtgttgctcatctaccttggaaagcgtttacctataaggcttttaatacctttatcgatgacgtgtttgcctttatcatcacaatgcccactagccacaggctcgcttgctttagggatgacgttgtcttcctcgtgtatctttaccagcgctggctttaccctgtggataaaagaagagtgaatgagtttggcgaaagctacgaagaaaaggctacaagagccccccatacggactag

SEQ ID NO: 220124 - DNA, 1617 bp, Artificial Sequence
  derived and/or modified sequence
atgtggagcggccgcagcagcttcaccagcctggtggtgggcgtgtttgtggtgtatgtggtgcacacctgctgggtgatgtatggcatcgtgtacacccggccctgcagcggagatgccaactgcatccagccctacctggcccggcggcccaagctgcagctgtctgtgtacaccaccaccaggagccacctgggcgctgagaacaacatcgacctggtgctgaatgtggaggactttgatgtggagagcaagtttgagaggacagtgaatgtgtctgtgcccaagaagaccagaaataatggcaccctgtatgcctacatcttcctgcaccacgccggcgtgctgccctggcatgatggcaagcaggtgcacctggtgagccccctgaccacctacatggtgcccaagccagaggagatcaacctgctgactggagagagtgacacccagcagattgaagctgagaagaagcccaccagcgccctggatgagcctgtgagccactggaggccccggctggccctgaatgtgatggctgacaactttgtgtttgatggcagcagcctgcctgcagatgtgcaccgctacatgaagatgatccagctgggcaagacagtgcactacctgcccatcctcttcatcgaccagctgagcaacagagtgaaggacctgatggtgatcaacagaagcaccacagagctgcccctgactgtgtcctatgacaaggtgtccctgggccgcctgcgcttctggatccacatgcaggatgctgtgtacagcctgcagcagtttggcttcagcgagaaggatgctgatgaggtgaagggcatctttgtggacaccaacctgtacttcctggccctgaccttctttgtggccgccttccacctgctgtttgacttcctggccttcaagaatgacatctccttctggaagaagaagaagtccatgattggcatgagcaccaaggctgtgctgtggcgctgcttcagcacagtggtgatcttcctgttcctgctggatgagcagaccagcctgctggtgctggtgcctgctggggtgggcgccgccatcgagctgtggaaggtgaagaaggccctgaagatgaccatcttctggaggggcctgatgcctgagttccagtttggcacctacagcgagagcgagaggaagacagaggagtatgacacccaggccatgaagtacctgagctacctgctgtaccccctgtgtgtgggcggcgctgtgtacagcctgctgaacatcaagtacaagtcctggtacagctggctgatcaacagctttgtgaatggagtgtatgccttcggcttcctgttcatgctgccccagctgtttgtgaactacaagctgaagtctgtggcccacctgccctggaaggccttcacctacaaggccttcaacaccttcattgatgatgtgtttgccttcatcatcaccatgcccaccagccaccggctggcctgcttcagagatgatgtggtgttcctggtgtacctgtaccagcgctggctgtaccctgtggacaagagaagagtgaatgaatttggagagagctatgaggagaaggccacccgggccccccacacagactag

SEQ ID NO: 220125 - DNA, 1509 bp, Artificial Sequence
  derived and/or modified sequence
atgtggagcggccgcagcagcttcaccagcctggtggtgggcgtgtttgtggtgtatgtggtgcacacctgctgggtgatgtatggcatcgtgtacacccggccctgcagcggagatgccaactgcatccagccctacctggcccggcggcccaagctgcagctgtctgtgtacaccaccaccaggagccacctgggcgctgagaacaacatcgacctggtgctgaatgtggaggactttgatgtggagagcaagtttgagaggacagtgaatgtgtctgtgcccaagaagaccagaaataatggcaccctgtatgcctacatcttcctgcaccacgccggcgtgctgccctggcatgatggcaagcaggtgcacctggtgagccccctgaccacctacatggtgcccaagccagaggagatcaacctgctgactggagagagtgacacccagcagattgaagctgagaagaagcccaccagcgccctggatgagcctgtgagccactggaggccccggctggccctgaatgtgatggctgacaactttgtgtttgatggcagcagcctgcctgcagatgtgcaccgctacatgaagatgatccagctgggcaagacagtgcactacctgcccatcctcttcatcgaccagctgagcaacagagtgaaggacctgatggtgatcaacagaagcaccacagagctgcccctgactgtgtcctatgacaaggtgtccctgggccgcctgcgcttctggatccacatgcaggatgctgtgtacagcctgcagcagtttggcttcagcgagaaggatgctgatgaggtgaagggcatctttgtggacaccaacctgtacttcctggccctgaccttctttgtggccgccttccacctgctgtttgacttcctggccttcaagaatgacatctccttctggaagaagaagaagtccatgattggcatgagcaccaagctgtggaaggtgaagaaggccctgaagatgaccatcttctggaggggcctgatgcctgagttccagtttggcacctacagcgagagcgagaggaagacagaggagtatgacacccaggccatgaagtacctgagctacctgctgtaccccctgtgtgtgggcggcgctgtgtacagcctgctgaacatcaagtacaagtcctggtacagctggctgatcaacagctttgtgaatggagtgtatgccttcggcttcctgttcatgctgccccagctgtttgtgaactacaagctgaagtctgtggcccacctgccctggaaggccttcacctacaaggccttcaacaccttcattgatgatgtgtttgccttcatcatcaccatgcccaccagccaccggctggcctgcttcagagatgatgtggtgttcctggtgtacctgtaccagcgctggctgtaccctgtggacaagagaagagtgaatgaatttggagagagctatgaggagaaggccacccgggccccccacacagactag

SEQ ID NO: 220126 - DNA, 1617 bp, Artificial Sequence
  derived and/or modified sequence
atgtggagcggccggagcagcttcaccagcctggtggtgggcgtgtttgtggtgtacgtggtgcacacgtgttgggtgatgtacggtattgtgtacacccggccgtgtagcggcgatgcaaactgtattcaaccctatctggcacgtaggcctaagctgcagctctccgtgtatacgactacccgtagtcacttaggagccgaaaacaacatagacctggtgctgaatgtggaggacttcgacgtggaatctaagtttgaacggaccgtcaacgttagcgtgccaaagaaaacccgcaataatggaactctttacgcctacatattcctacatcatgccggggtcttgccgtggcatgatggcaaacaggtgcacctggtgagccctttaaccacgtatatggtcccgaaacctgaggaaattaatctccttacaggtgagtctgacactcagcaaattgaggcagaaaagaagcccacaagcgcactggatgagcccgtgtctcattggaggccgcggttggccctgaacgtgatggctgacaactttgtattcgacggaagcagtctccctgcagacgttcaccgatacatgaaaatgattcagttaggcaagacagtgcactatctgccaatcctgttcattgatcagttgtctaaccgtgtgaaagacctgatggtgatcaatcggtcaaccaccgagctcccactgacggtgtcctacgataaggtatctctaggcagactgaggttctggatccacatgcaggacgccgtttactcactccagcagttcggattcagcgaaaaggacgctgacgaggttaagggtatttttgttgacacaaatctgtacttcttagccttgacatttttcgttgccgcctttcacctgctgtttgactttctcgcatttaagaacgacatatcattctggaaaaagaagaagtctatgatcggcatgagcaccaaggcagtgttgtggaggtgctttagcactgttgtgatttttttatttctactggatgagcagacctctttgctggtgctcgtgccagcgggcgtcggtgccgctatcgagctatggaaggtcaagaaggcactgaagatgacaatcttctggaggggccttatgccagagtttcaattcggcacctattccgaatccgagaggaagaccgaagagtatgatacacaggccatgaagtacctatcctacctgctttacccactgtgtgtaggcggcgccgtttacagtctcctgaacataaagtacaaatcctggtacagttggttgatcaacagcttcgtgaatggtgtctatgctttcggcttcctctttatgctgccccagttatttgtcaattacaaactcaagtccgtggcccacttgccctggaaggcttttacctacaaggccttcaacactttcatagacgatgtgtttgcgttcattatcaccatgccgacaagccatagactggcgtgcttccgcgatgatgtggtattcctggtgtacctctatcagcgatggttgtatcccgttgacaagcggagggtcaatgaatttggggagtcctacgaagagaaggcaactcgggcaccacacaccgattag

SEQ ID NO: 220127 - DNA, 1509 bp, Artificial Sequence
  derived and/or modified sequence
atgtggagcggccggagcagcttcaccagcctggtggtgggcgtgttcgtggtgtacgtggtgcacacttgttgggtgatgtacggaattgtctatacgagaccgtgtagcggcgacgccaactgtatccagccttacctcgcgcggaggcctaagctacagctaagtgtctacactaccacacgttctcatttgggagctgagaacaatattgacttggtgctgaatgtggaagatttcgatgtggaatctaagttcgaaaggaccgtaaacgtgtcggttccaaagaaaacaaggaataatgggaccctgtacgcctatatctttctgcaccatgctggcgtactgccatggcacgatggtaagcaggtccatctagtgagccctctcaccacgtacatggttccaaaaccagaggaaatcaatctgctcacaggtgaatcagacactcagcaaattgaggccgagaaaaaacctacaagcgcacttgacgagcccgtgagtcactggcggccccgattagctctgaatgtcatggcagataactttgtttttgatggtagcagcttacccgctgatgtgcaccgatacatgaaaatgatccagttgggaaagaccgttcactacctgcccatcctctttatcgaccagcttagtaatagggtgaaagacttgatggtgattaataggtcaaccaccgagctcccactgaccgtgagctacgacaaagtgtctctggggaggctccggttttggattcacatgcaggacgcagtctatagcctccaacaattcggcttctctgaaaaggatgctgatgaagtgaagggaattttcgtggatactaatctatactttcttgctctgacattcttcgtcgccgcgtttcacttactcttcgattttctggctttcaaaaacgacatcagcttctggaagaagaaaaagtctatgatcgggatgtcaacgaaactttggaaggtgaagaaagctctgaaaatgaccatcttttggcgaggacttatgccggaatttcagttcggtacatactccgaaagcgaacggaagacagaagagtatgatacgcaagctatgaaatacctcagttatcttttatatccattgtgcgttggaggtgccgtgtactctctccttaatataaagtataagtcctggtactcatggcttatcaactcattcgtgaacggggtgtatgcttttgggttcctctttatgctgccccaattatttgtgaactacaaactgaagagtgttgcccatctgccttggaaggcctttacctataaagccttcaatacctttatcgatgacgtctttgcgtttattatcactatgcctaccagtcacaggctcgcctgtttccgggacgatgtcgtattcctggtatacctctatcagaggtggctgtaccctgtagataagcgacgggtgaatgagtttggcgaaagttacgaagaaaaagccactagagcgccacacactgattag

SEQ ID NO: 220128 - DNA, 1617 bp, Artificial Sequence
  derived and/or modified sequence
atgtggtccgggaggtcaagctttaccagcctcgtggttggcgtatttgttgtatacgtggtgcatacatgctgggtcatgtatggaatcgtttacacacggccttgcagcggggacgcaaattgtattcagccttatctggcccgacgcccaaagctacagttgtccgtgtacaccaccaccaggtcccatttgggagccgagaataatatagacttagtactgaatgtggaggactttgacgtagaaagcaagttcgaacgaaccgtaaacgtttcagtgccgaaaaaaacacgcaataacggaacactctacgcctatatcttcctgcaccatgctggggtgctcccgtggcacgacgggaagcaggtgcacctggtttcaccactcactacatatatggttcccaaacctgaggagatcaatctgctgacaggggaaagcgacactcaacaaattgaagctgaaaaaaagcctacatctgcactcgacgaaccagttagccactggcgcccaagacttgccctcaacgtgatggccgacaacttcgtttttgacggctcatccctcccagccgacgtgcatcgctacatgaagatgatccagcttgggaaaaccgttcattatctgcctatactgttcatagatcagctttctaacagggtgaaagatctgatggtaataaacaggtctaccacagagttgcccttgacagtgtcctacgacaaggtctcgttaggccgtctgagattctggattcatatgcaggatgccgtgtacagcttgcagcagttcgggttttccgagaaagatgcagatgaggtaaaaggtatcttcgtcgacacaaatttatatttccttgccttaaccttctttgtggctgcatttcacctcctgttcgacttcctagcatttaaaaatgacatatctttctggaaaaaaaagaagtccatgattggcatgagcacaaaggcagttctgtggcgttgtttcagcactgtggtgattttcctcttcctgctggacgagcaaacttccttgttagtgctggtgcccgcaggcgtgggggctgccattgaactgtggaaagttaagaaggccctaaagatgaccatattttggaggggcttgatgcctgaattccaatttggcacctattctgagtccgaacgaaaaacagaagaatatgatactcaggcaatgaagtatctctcttacctgctctacccgctctgcgtagggggagccgtgtacagcctgctgaatattaagtacaagtcgtggtactcctggctgataaactcttttgtgaacggggtctatgctttcggattcttatttatgttaccacagctgtttgtcaattataagctgaaaagtgtcgcccatctgccctggaaggcattcacttataaagcatttaatacgttcattgacgacgtctttgcatttatcattaccatgccgacctcccatagactggcctgcttcagagatgacgtcgtttttttggtgtatctctaccagagatggctttaccccgtcgacaagaggcgggtcaacgagttcggagagtcctacgaagagaaggccacaagggcgccacacaccgactag

SEQ ID NO: 220129 - DNA, 1509 bp, Artificial Sequence
  derived and/or modified sequence
atgtggagcggaaggagctctttcacctctttggtcgtgggcgtatttgtagtttatgtggtccatacctgttgggtaatgtatggaattgtctatacgaggccatgttcgggagatgcaaactgcatccagccttacttagctcgacgccctaagctgcagcttagcgtgtacaccacaactcgaagtcacttgggcgctgaaaacaacattgatttggtcctcaacgtggaggacttcgacgttgaatctaagtttgagagaactgtaaacgtgtcggtccccaaaaagacacggaataacggaactctgtacgcatatatttttctccaccacgccggtgtgctgccttggcatgacgggaagcaggtgcacctggtctcccccctcactacatacatggtgcccaaacccgaggagattaatttgttaaccggagagagtgatacgcagcaaattgaggccgagaaaaagcccacctccgcattggatgaaccagtctctcactggaggccacggctcgcacttaacgtcatggctgataattttgtttttgatggaagttcccttcccgctgatgtgcaccgctacatgaagatgattcagctaggaaaaactgtccactacttgccgatactgtttatcgatcaactgtctaaccgtgtcaaggatttgatggtgatcaatcgttccacaactgagctcccactgaccgtatcatacgataaggttagcctcggtagactgcgattctggattcatatgcaggacgcagtgtacagtctgcaacagtttggattttctgaaaaagatgccgatgaagtgaagggtattttcgtggataccaacctctacttcttggccctgacattcttcgtggctgctttccacttactatttgacttcctggccttcaaaaacgatatcagcttctggaaaaagaaaaagtcaatgatcgggatgagcaccaaactctggaaagtcaagaaggccctcaagatgactatcttttggagagggcttatgcctgaattccagtttgggacgtactccgagagcgaacgcaaaacagaggagtacgatacacaagccatgaaatacctgagctacctattgtaccctttgtgcgtcggtggggctgtgtatagcttacttaatataaagtataagtcttggtacagttggttaattaattcattcgtcaacggagtctatgcattcgggtttttgttcatgttgccccagctgttcgtgaactacaagctgaagtcagtcgcccacctcccctggaaggcttttacatataaggcctttaataccttcattgatgatgtgtttgcttttatcattactatgccaactagccatcgcctggcctgtttccgtgatgatgtggtgttcctcgtttatctgtatcagcgctggctgtatcccgtggataaaaggcgagttaatgaatttggggagtcatacgaggagaaggccacacgcgcaccacatacagactag

SEQ ID NO: 220130 - DNA, 2500 bp, Artificial Sequence
  derived and/or modified sequence
acttccggcaggcggcggggcccggaagcggcgcgcggggccggcgaatcccgcggcgccaggtgggagcggggccggagcatgcggggcggccggcggtctgcggcgcgcggcgcattcgttcccccgcggcggtggcggtggcgcgcggcggctctccagtgagcggcggagcccggagcggcgggctgggcgccgggcgggcggggctcgcggctgagaggcgggcgggccgggggcgccgggcgcggggccgccatgtggagcggccgcagctccttcaccagcttggtggtgggcgtgttcgtggtctacgtggtgcacacctgctgggtcatgtacggcatcgtctacacccgcccgtgctccggcgacgccaactgcatccagccctacctggcgcggcggcccaagctgcagctgagcgtgtacaccacgacgaggtcccacctgggtgctgagaacaacatcgacctggtcttgaatgtggaagactttgatgtggagtccaaatttgaaaggacagttaatgtttctgtaccaaagaaaacgagaaacaatgggacgctgtatgcctacatcttcctccatcacgctggggtcctgccgtggcacgacgggaagcaggtgcacctggtcagtcctctgaccacctacatggtccccaagccagaagaaatcaacctgctcaccggggagtctgatacacagcagatcgaggcggagaagaagccgacgagtgccctggatgagccagtgtcccactggcgaccgcggctggcgctgaacgtgatggcggacaactttgtctttgacgggtcctccctgcctgccgatgtgcatcggtacatgaagatgatccagctggggaaaaccgtgcattacctgcccatcctgttcatcgaccagctcagcaaccgcgtgaaggacctgatggtcataaaccgctccaccaccgagctgcccctcaccgtgtcctacgacaaggtctcactggggcggctgcgcttctggatccacatgcaggacgccgtgtactccctgcagcagttcgggttttcagagaaagatgctgatgaggtgaaaggaatttttgtagataccaacttatacttcctggcgctgaccttctttgtcgcagcgttccatcttctctttgatttcctggcctttaaaaatgacatcagtttctggaagaagaagaagagcatgatcggcatgtccaccaaggcagtgctctggcgctgcttcagcaccgtggtcatctttctgttcctgctggacgagcagacgagcctgctggtgctggtcccggcgggtgttggagccgccattgagctgtggaaagtgaagaaggcattgaagatgactattttttggagaggcctgatgcccgaatttcagtttggcacttacagcgaatctgagaggaaaaccgaggagtacgatactcaggccatgaagtacttgtcatacctgctgtaccctctctgtgtcgggggtgctgtctattcactcctgaatatcaaatataagagctggtactcctggttaatcaacagcttcgtcaacggggtctatgcctttggtttcctcttcatgctgccccagctctttgtgaactacaagttgaagtcagtggcacatctgccctggaaggccttcacctacaaggctttcaacaccttcattgatgacgtctttgccttcatcatcaccatgcccacgtctcaccggctggcctgcttccgggacgacgtggtgtttctggtctacctgtaccagcggtggctttatcctgtggataaacgcagagtgaacgagtttggggagtcctacgaggagaaggccacgcgggcgccccacacggactgaaggccgcccgggctgccgccagccaagtgcaacttgaattgtcaatgagtatttttggaagcatttggaggaattcctagacattgcgttttctgtgttgccaaaatcccttcggacatttctcagacatctcccaagttcccatcacgtcagatttggagctggtagcgcttacgatgcccccacgtgtgaacatctgtcttggtcacagagctgggtgctgccggtcaccttgagctgtggtggctcccggcacacgagtgtccggggttcggccatgtcctcacgcgggcaggggtgggagccctcacaggcaagggggctgttggatttccatttcaggtggttttctaagtgctccttatgtgaatttcaaacacgtatggaattcattccgcatggactctgggatcaaaggctctttcctcttttgtttgagagttggttgttttaaagcttaatgtatgtttctattttaaaataaatttttctggctgtggcatttttcttgacctggtataatgaaagtatttcggatatttgagtttaacccttttccagaaagtaatacatgatatggatttatttatgcattaaaagagcaaatttaaagagccctttgcaa

SEQ ID NO: 220131 - DNA, 2053 bp, Artificial Sequence
  derived and/or modified sequence
gctgagaggcgggcgggccgggggcgccgggcgcggggccgccatgtggagcggccgcagctccttcaccagcttggtggtgggcgtgttcgtggtctacgtggtgcacacctgctgggtcatgtacggcatcgtctacacccgcccgtgctccggcgacgccaactgcatccagccctacctggcgcggcggcccaagctgcagctgagcgtgtacaccacgacgaggtcccacctgggtgctgagaacaacatcgacctggtcttgaatgtggaagactttgatgtggagtccaaatttgaaaggacagttaatgtttctgtaccaaagaaaacgagaaacaatgggacgctgtatgcctacatcttcctccatcacgctggggtcctgccgtggcacgacgggaagcaggtgcacctggtcagtcctctgaccacctacatggtccccaagccagaagaaatcaacctgctcaccggggagtctgatacacagcagatcgaggcggagaagaagccgacgagtgccctggatgagccagtgtcccactggcgaccgcggctggcgctgaacgtgatggcggacaactttgtctttgacgggtcctccctgcctgccgatgtgcatcggtacatgaagatgatccagctggggaaaaccgtgcattacctgcccatcctgttcatcgaccagctcagcaaccgcgtgaaggacctgatggtcataaaccgctccaccaccgagctgcccctcaccgtgtcctacgacaaggtctcactggggcggctgcgcttctggatccacatgcaggacgccgtgtactccctgcagcagttcgggttttcagagaaagatgctgatgaggtgaaaggaatttttgtagataccaacttatacttcctggcgctgaccttctttgtcgcagcgttccatcttctctttgatttcctggcctttaaaaatgacatcagtttctggaagaagaagaagagcatgatcggcatgtccaccaagctgtggaaagtgaagaaggcattgaagatgactattttttggagaggcctgatgcccgaatttcagtttggcacttacagcgaatctgagaggaaaaccgaggagtacgatactcaggccatgaagtacttgtcatacctgctgtaccctctctgtgtcgggggtgctgtctattcactcctgaatatcaaatataagagctggtactcctggttaatcaacagcttcgtcaacggggtctatgcctttggtttcctcttcatgctgccccagctctttgtgaactacaagttgaagtcagtggcacatctgccctggaaggccttcacctacaaggctttcaacaccttcattgatgacgtctttgccttcatcatcaccatgcccacgtctcaccggctggcctgcttccgggacgacgtggtgtttctggtctacctgtaccagcggtggctttatcctgtggataaacgcagagtgaacgagtttggggagtcctacgaggagaaggccacgcgggcgccccacacggactgaaggccgcccgggctgccgccagccaagtgcaacttgaattgtcaatgagtatttttggaagcatttggaggaattcctagacattgcgttttctgtgttgccaaaatcccttcggacatttctcagacatctcccaagttcccatcacgtcagatttggagctggtagcgcttacgatgcccccacgtgtgaacatctgtcttggtcacagagctgggtgctgccggtcaccttgagctgtggtggctcccggcacacgagtgtccggggttcggccatgtcctcacgcgggcaggggtgggagccctcacaggcaagggggctgttggatttccatttcaggtggttttctaagtgctccttatgtgaatttcaaacacgtatggaattcattccgcatggactctgggatcaaaggctctttcctcttttgtttgagagttggttgttttaaagcttaatgtatgtttctattttaaaataaatttttctggctgtggc

SEQ ID NO: 220132 - DNA, 1617 bp, Artificial Sequence
  derived and/or modified sequence
atgtggagcggcagaagcagcttcaccagcctggtggtgggcgtgttcgtggtgtacgtggtgcacacctgctgggtgatgtacggcatcgtgtacaccagaccctgcagcggcgacgccaactgcatccagccctacctggccagaagacccaagctgcagctgagcgtgtacaccaccaccagaagccacctgggcgccgagaacaacatcgacctggtgctgaacgtggaggacttcgacgtggagagcaagttcgagagaaccgtgaacgtgagcgtgcccaagaagaccagaaacaacggcaccctgtacgcctacatcttcctgcaccacgccggcgtgctgccctggcacgacggcaagcaggtgcacctggtgagccccctgaccacctacatggtgcccaagcccgaggagatcaacctgctgaccggcgagagcgacacccagcagatcgaggccgagaagaagcccaccagcgccctggacgagcccgtgagccactggagacccagactggccctgaacgtgatggccgacaacttcgtgttcgacggcagcagcctgcccgccgacgtgcacagatacatgaagatgatccagctgggcaagaccgtgcactacctgcccatcctgttcatcgaccagctgagcaacagagtgaaggacctgatggtgatcaacagaagcaccaccgagctgcccctgaccgtgagctacgacaaggtgagcctgggcagactgagattctggatccacatgcaggacgccgtgtacagcctgcagcagttcggcttcagcgagaaggacgccgacgaggtgaagggcatcttcgtggacaccaacctgtacttcctggccctgaccttcttcgtggccgccttccacctgctgttcgacttcctggccttcaagaacgacatcagcttctggaagaagaagaagagcatgatcggcatgagcaccaaggccgtgctgtggagatgcttcagcaccgtggtgatcttcctgttcctgctggacgagcagaccagcctgctggtgctggtgcccgccggcgtgggcgccgccatcgagctgtggaaggtgaagaaggccctgaagatgaccatcttctggagaggcctgatgcccgagttccagttcggcacctacagcgagagcgagagaaagaccgaggagtacgacacccaggccatgaagtacctgagctacctgctgtaccccctgtgcgtgggcggcgccgtgtacagcctgctgaacatcaagtacaagagctggtacagctggctgatcaacagcttcgtgaacggcgtgtacgccttcggcttcctgttcatgctgccccagctgttcgtgaactacaagctgaagagcgtggcccacctgccctggaaggccttcacctacaaggccttcaacaccttcatcgacgacgtgttcgccttcatcatcaccatgcccaccagccacagactggcctgcttcagagacgacgtggtgttcctggtgtacctgtaccagagatggctgtaccccgtggacaagagaagagtgaacgagttcggcgagagctacgaggagaaggccaccagagccccccacaccgactag

SEQ ID NO: 220133 - DNA, 1509 bp, Artificial Sequence
  derived and/or modified sequence
atgtggagcggcagaagcagcttcaccagcctggtggtgggcgtgttcgtggtgtacgtggtgcacacctgctgggtgatgtacggcatcgtgtacaccagaccctgcagcggcgacgccaactgcatccagccctacctggccagaagacccaagctgcagctgagcgtgtacaccaccaccagaagccacctgggcgccgagaacaacatcgacctggtgctgaacgtggaggacttcgacgtggagagcaagttcgagagaaccgtgaacgtgagcgtgcccaagaagaccagaaacaacggcaccctgtacgcctacatcttcctgcaccacgccggcgtgctgccctggcacgacggcaagcaggtgcacctggtgagccccctgaccacctacatggtgcccaagcccgaggagatcaacctgctgaccggcgagagcgacacccagcagatcgaggccgagaagaagcccaccagcgccctggacgagcccgtgagccactggagacccagactggccctgaacgtgatggccgacaacttcgtgttcgacggcagcagcctgcccgccgacgtgcacagatacatgaagatgatccagctgggcaagaccgtgcactacctgcccatcctgttcatcgaccagctgagcaacagagtgaaggacctgatggtgatcaacagaagcaccaccgagctgcccctgaccgtgagctacgacaaggtgagcctgggcagactgagattctggatccacatgcaggacgccgtgtacagcctgcagcagttcggcttcagcgagaaggacgccgacgaggtgaagggcatcttcgtggacaccaacctgtacttcctggccctgaccttcttcgtggccgccttccacctgctgttcgacttcctggccttcaagaacgacatcagcttctggaagaagaagaagagcatgatcggcatgagcaccaagctgtggaaggtgaagaaggccctgaagatgaccatcttctggagaggcctgatgcccgagttccagttcggcacctacagcgagagcgagagaaagaccgaggagtacgacacccaggccatgaagtacctgagctacctgctgtaccccctgtgcgtgggcggcgccgtgtacagcctgctgaacatcaagtacaagagctggtacagctggctgatcaacagcttcgtgaacggcgtgtacgccttcggcttcctgttcatgctgccccagctgttcgtgaactacaagctgaagagcgtggcccacctgccctggaaggccttcacctacaaggccttcaacaccttcatcgacgacgtgttcgccttcatcatcaccatgcccaccagccacagactggcctgcttcagagacgacgtggtgttcctggtgtacctgtaccagagatggctgtaccccgtggacaagagaagagtgaacgagttcggcgagagctacgaggagaaggccaccagagccccccacaccgactag

SEQ ID NO: 220134 - protein, 569 aa, Artificial Sequence
  derived and/or modified sequence
MLLLFSVILISWVSTVGGEGTLCDFPKIHHGFLYDEEDYNPFSQVPTGEVFYYSCEYNFVSPSKSFWTRITCTEEGWSPTPKCLRMCSFPFVKNGHSESSGLIHLEGDTVQIICNTGYSLQNNEKNISCVERGWSTPPICSFTKGECHVPILEANVDAQPKKESYKVGDVLKFSCRKNLIRVGSDSVQCYQFGWSPNFPTCKGQVRSCGPPPQLSNGEVKEIRKEEYGHNEVVEYDCNPNFIINGPKKIQCVDGEWTTLPTCVEQVKTCGYIPELEYGYVQPSVPPYQHGVSVEVNCRNEYAMIGNNMITCINGIWTELPMCVATHQLKRCKIAGVNIKTLLKLSGKEFNHNSRIRYRCSDIFRYRHSVCINGKWNPEVDCTEKREQFCPPPPQIPNAQNMTTTVNYQDGEKVAVLCKENYLLPEAKEIVCKDGRWQSLPRCVESTAYCGPPPSINNGDTTSFPLSVYPPGSTVTYRCQSFYKLQGSVTVTCRNKQWSEPPRCLDPCVVSEENMNKNNIQLKWRNDGKLYAKTGDAVEFQCKFPHKAMISSPPFRAICQEGKFEYPICE

SEQ ID NO: 220135 - protein, 593 aa, Artificial Sequence
  derived and/or modified sequence
MKADLKQHHHHWSIFSYIRLRLPSMLLLFSVILISWVSTVGGEGTLCDFPKIHHGFLYDEEDYNPFSQVPTGEVFYYSCEYNFVSPSKSFWTRITCTEEGWSPTPKCLRMCSFPFVKNGHSESSGLIHLEGDTVQIICNTGYSLQNNEKNISCVERGWSTPPICSFTKGECHVPILEANVDAQPKKESYKVGDVLKFSCRKNLIRVGSDSVQCYQFGWSPNFPTCKGQVRSCGPPPQLSNGEVKEIRKEEYGHNEVVEYDCNPNFIINGPKKIQCVDGEWTTLPTCVEQVKTCGYIPELEYGYVQPSVPPYQHGVSVEVNCRNEYAMIGNNMITCINGIWTELPMCVATHQLKRCKIAGVNIKTLLKLSGKEFNHNSRIRYRCSDIFRYRHSVCINGKWNPEVDCTEKREQFCPPPPQIPNAQNMTTTVNYQDGEKVAVLCKENYLLPEAKEIVCKDGRWQSLPRCVESTAYCGPPPSINNGDTTSFPLSVYPPGSTVTYRCQSFYKLQGSVTVTCRNKQWSEPPRCLDPCVVSEENMNKNNIQLKWRNDGKLYAKTGDAVEFQCKFPHKAMISSPPFRAICQEGKFEYPICE

SEQ ID NO: 220136 - DNA, 1710 bp, Artificial Sequence
  derived and/or modified sequence
atgctgctgctttttagtgttattttgatatcctgggtcagtacagtcggtggggaagggaccctttgcgatttccctaagatccatcacggcttcctgtatgacgaggaggattacaaccccttcagccaggttccaaccggcgaggtcttctattactcttgcgaatataactttgtctctccaagcaagtctttctggacgagaattacctgcacagaagaaggctggtctcctactccaaaatgcctgcggatgtgttcttttccatttgttaaaaacgggcattcagaaagctccggcctgatccacctggaaggtgacactgtgcagatcatctgcaacacgggatactcacttcaaaacaacgagaagaacatttcgtgtgtagaaagagggtggtctacaccccctatctgctcctttaccaaaggcgagtgccacgtgcccattctggaagccaacgtggacgcgcagcccaagaaagagagttacaaggtgggcgatgtcctgaaatttagttgcagaaagaacctcattagagttggatcagacagcgttcagtgctatcaatttggctggagtcctaatttcccaacatgcaagggacaggttagatcatgcgggcctccccctcagcttagcaacggggaagtgaaggagatccggaaggaagaatacggacacaatgaagtcgtggaatacgactgcaacccaaatttcatcatcaatggtcccaaaaaaatccagtgtgtggatggcgagtggacgacattaccaacctgtgtcgaacaagttaagacctgcgggtatatcccggaactggaatacgggtacgtacagccatcggttcctccgtatcagcatggcgtgtcagtggaggttaactgtcggaatgagtatgccatgattggaaacaacatgatcacctgtattaatggcatctggacggagctccccatgtgcgtggctacgcaccaactcaagcggtgcaagattgccggagtgaatatcaaaacactgttaaaactttccggaaaggagtttaaccataatagcagaattcgatacagatgtagcgatatattccggtatcgtcacagcgtgtgcataaatggcaagtggaatcctgaagtggattgcacggagaagagggagcagttttgcccccctccaccacaaatcccaaacgcccaaaatatgacaacaactgttaactaccaggacggagaaaaggttgccgttctgtgcaaggagaactaccttctgcctgaagcgaaggagattgtctgtaaggacggcaggtggcaatcactgcctaggtgtgtcgaatcaacagcctattgtgggccaccaccctcaatcaataacggagacaccacttcttttcctctgtccgtctatcctcccggatctacagtgacctaccggtgtcaatctttttacaagcttcaaggttcagtgacagttacatgcaggaataaacagtggagtgagccaccacgctgcctagatccctgtgttgtgtctgaggaaaacatgaataaaaataatatacaactgaagtggcggaatgatggcaaactctacgccaaaacgggggacgctgtggagttccagtgcaaatttccacacaaggcaatgatctcaagccccccattccgagccatttgccaagaaggtaaattcgagtaccctatctgtgaatag

SEQ ID NO: 220137 - DNA, 1782 bp, Artificial Sequence
  derived and/or modified sequence
atgaaggccgatcttaagcagcatcaccatcactggagcatatttagctatattcggctccgactcccatcaatgcttcttctgttttctgtgattctgatttcatgggtcagcactgtaggtggagaagggacattgtgcgactttcccaagatccaccacgggttcctgtacgacgaagaggattacaaccctttttcacaagtgccaactggggaagtgttttactattcttgcgagtacaactttgtgagcccgtctaaaagtttttggacacgaattacctgtacagaggaagggtggtctcctactccaaaatgtctgcgaatgtgtagtttccccttcgtcaagaacgggcacagcgagagctccggcctaattcacctagaaggagacacggtgcagataatctgcaatacaggatatagccttcagaataatgagaagaatatttcatgcgtggaaagaggctggagtaccccaccgatatgcagcttcacaaaaggcgagtgccacgtccctatactggaggctaatgttgacgcccaacccaagaaagagtcctataaagtgggagatgtgctgaaatttagctgtcggaaaaacctgattcgtgtcggctccgactccgtgcagtgctatcagtttgggtggtcccccaactttcccacctgtaaaggacaggtaaggagctgcgggcctcctcctcagctgtcgaatggggaggtgaaggaaataaggaaagaagagtacggccacaacgaagtcgttgaatacgactgtaaccctaatttcatcattaatggccctaagaaaattcagtgcgtggacggtgaatggacaactcttccaacctgcgtagagcaggtaaagacttgcggatatattcccgagctggagtatggctacgtgcagccaagcgttcctccctaccagcacggcgttagtgttgaggtgaactgcagaaacgagtatgccatgatcggaaataacatgattacatgtattaacggaatctggacagaactgcctatgtgtgtggccacccaccaactcaagcgctgcaagatcgccggagtcaacattaaaacattgcttaagctttctggtaaagaatttaatcacaattcgcgtatacggtatagatgcagcgatatttttcggtatcggcactccgtgtgtatcaatggaaagtggaatcccgaagtcgattgcaccgaaaagagggaacagttctgtccgccaccccctcaaattccaaacgcccagaacatgacgaccaccgtgaactaccaggatggagagaaggtggcagtgctgtgcaaggaaaattacctgctgcccgaagccaaggagatagtgtgtaaggatggtcgatggcagtcactccccaggtgcgtcgaaagtactgcatattgcggccctcctccaagcattaacaatggggataccacgagttttcccctgagtgtgtacccaccgggttcgacagtgacatataggtgtcaaagtttctataaactacagggcagtgtaaccgtgacctgtcggaacaaacagtggtccgaaccaccgcgatgtctggatccctgtgtagtgtccgaggagaatatgaataaaaataatatacaacttaaatggaggaacgatggcaagctctatgccaagacgggcgacgccgtggagtttcagtgtaagttcccccacaaggcaatgatcagctcccctccgttccgagctatctgccaagaagggaagttcgagtatcccatctgtgagtag

SEQ ID NO: 220138 - DNA, 1710 bp, Artificial Sequence
  derived and/or modified sequence
atgcttctcctcttcagcgtcattttgatttcttgggtttctaccgttggcggtgaaggaacactttgcgatttccccaagattcaccacgggtttctctacgacgaggaagattataacccatttagccaggtgcccaccggcgaggtgttttattacagctgtgaatataacttcgtttcaccatccaagtctttttggaccaggataacatgcacagaggagggttggtctcctacccctaaatgtctgagaatgtgttcttttcctttcgtgaaaaatggccatagcgaatctagcgggctcatccatcttgagggggatactgttcagattatttgtaatacagggtattctctgcagaacaacgaaaagaacatttcctgcgtagagagaggctggtccacaccaccgatctgcagtttcaccaagggggagtgtcacgtgcccatcctggaagccaacgtggacgcgcagccaaagaaggagtcgtataaggtgggtgacgtgcttaaatttagctgtaggaagaatcttattcgcgtggggtcagactcagtccaatgttatcagttcggatggtctccaaactttcctacatgtaagggtcaggtgcggtcatgcggacccccaccccaactgagtaatggggaagtgaaggaaattagaaaagaggaatacggccacaacgaggtggtagaatatgactgcaaccccaacttcatcattaacggccccaagaagatacagtgcgttgacggcgagtggacaacattgccgacttgcgtagagcaggtgaaaacatgcggctatattcccgaacttgaatacggttacgtccagccatccgtacccccctaccagcacggtgtgtctgtggaagtcaattgcaggaacgaatatgccatgatcggaaataacatgatcacatgtatcaacgggatctggacagagttacctatgtgtgtagccacacaccaattaaagaggtgtaaaattgctggtgtgaatatcaaaactcttttgaagctttcgggcaaggagtttaaccataattctaggatccggtaccgttgctctgacatctttcggtatcggcattcggtctgcatcaatggtaaatggaaccctgaagtcgattgcacagaaaagagagagcagttttgtccgccacccccacagataccaaatgcccaaaacatgaccaccacggtcaactatcaggacggggaaaaagtagctgttttgtgtaaagaaaactatctcctgcccgaggcgaaagagatcgtgtgtaaagatggacgctggcagtcccttcctcgttgcgtggaaagcaccgcttattgcgggccccctccgtccatcaacaacggcgacacgacctcatttccgctgagcgtgtaccctccgggctcaacagtgacctacaggtgtcaatccttttacaaactccaagggtctgtgaccgtgacctgtcgaaataagcaatggtccgaacccccccgatgtcttgatccctgcgtagtgtctgaggagaacatgaacaaaaacaatatccagttgaagtggagaaatgacggcaaactgtacgcaaagacaggagatgcagtcgagtttcaatgtaagttcccgcataaggccatgatctcttcccccccctttcgtgctatatgccaagagggtaagtttgaatatcctatctgcgagtag

SEQ ID NO: 220139 - DNA, 1782 bp, Artificial Sequence
  derived and/or modified sequence
atgaaagccgacctaaagcagcatcatcaccattggagcattttctcctacatccgtctcaggttgccttcaatgcttcttctcttctcggttatcctcatatcttgggtttctaccgtgggtggggagggtacactttgtgactttcctaaaattcatcacggttttctgtatgatgaggaggattacaaccccttttcccaggtacccacaggggaggtcttctattattcctgcgaatacaacttcgtcagcccctctaagagtttttggaccagaatcacctgcactgaagagggctggtctccaaccccaaagtgtctgaggatgtgtagcttcccattcgtcaagaacggacattccgaaagttcaggacttattcatctggaaggtgatacagtgcagataatatgcaatacaggctacagcctccagaacaatgaaaaaaacataagttgtgtggagagaggttggtcaacgccacccatctgttctttcacaaagggagaatgccatgtgcctattctggaggcgaacgtggacgcacagcccaagaaagagtcatacaaggtgggcgatgtgctgaagttctcttgccggaaaaatcttataagagtaggatctgattctgtgcagtgctaccaatttggctggagcccgaattttcctacgtgtaagggacaagttcgcagctgtggcccgcctccacaactgtcaaatggagaggttaaagaaatccgtaaagaggaatacggacacaacgaggttgtcgagtacgattgcaatcccaatttcatcatcaatggtcctaagaagatccaatgtgttgatggagaatggaccaccctaccgacatgtgtcgaacaggtgaagacctgcggctatatcccggagttggagtatggctatgtgcaaccctcagtgcccccctatcagcacggggtgtcggtggaagtgaattgtagaaacgaatacgccatgattggtaacaatatgattacttgcatcaatggaatatggactgagttgccaatgtgcgtggccacacaccagcttaagaggtgtaaaatagccggcgtgaatataaaaaccctcttaaaattgtcagggaaagagttcaaccacaatagccgcatcaggtaccgctgctccgatatctttcgctaccggcatagcgtctgcatcaatggtaagtggaatccagaagtggattgtacagagaagagagaacagttttgccccccgcccccacagattcctaacgctcagaacatgaccacgaccgtgaactaccaggacggagagaaagtcgccgtgctgtgcaaagagaattacctgctccccgaggcgaaagagatcgtatgtaaagacggacgatggcagtcacttccaagatgtgttgaaagtacggcttactgtgggcccccaccatctatcaataatggcgatacaacaagtttcccgctgtccgtgtatcctcccgggagcaccgttacctatcgctgtcagagcttttacaagttgcaaggctccgtcacggttacatgcagaaacaaacagtggtcagagcccccacgctgcttggatccgtgtgtggtgtcagaggagaacatgaacaagaataacattcagttgaagtggcgcaacgatggaaaactgtacgcgaagacaggggatgcggtagaattccaatgcaagtttccccacaaggctatgataagctcgcctccatttagagccatctgccaggaggggaaattcgagtaccctatatgtgaatag

SEQ ID NO: 220140 - DNA, 1710 bp, Artificial Sequence
  derived and/or modified sequence
atgctacttctcttttctgtgatcttgataagctgggtttcaaccgtggggggtgaaggtactctctgcgattttcccaagatccatcatggtttcctgtacgatgaggaagattataaccctttcagccaagtgccgactggagaggtgttctattacagctgcgagtacaactttgtaagtcccagtaaatcattttggacccggataacttgtacagaggaaggttggagccccacgcccaaatgtttgagaatgtgttcttttcctttcgtcaagaacggacattcagaatcatctggactaatccatctagagggagacacagtgcagataatatgtaatacaggctattctcttcagaataatgaaaagaatattagctgcgtggaaagaggatggtctacaccccctatttgtagcttcacgaaaggcgagtgccatgtcccaatcctggaagcaaatgtggatgcacaaccgaagaaggagagttataaagttggagatgtgttaaagtttagctgccgcaagaatctgattcgagtgggaagtgactctgtgcagtgctatcagttcggctggagtccaaatttccctacttgcaaaggccaagttcggagttgcggaccgcctccccagttgagtaacggcgaagtcaaggagattagaaaggaagaatatggacacaatgaagtcgtggagtacgactgcaaccccaactttattattaatggacctaaaaaaatacagtgcgttgatggagaatggacgacactccctacttgcgtggagcaagtcaagacctgtgggtacatccccgaattagaatacggatatgttcagccatcagtgccaccataccaacatggcgtgtcagtcgaagtgaactgtagaaatgaatacgcaatgatcggcaataacatgatcacctgcatcaacggaatatggaccgagctacctatgtgcgtagctacccatcaactgaagagatgtaagattgctggcgtaaacatcaagaccctactgaaactctctggtaaggagtttaaccacaactcccgaatccgctatagatgttccgatattttccgataccgccactccgtttgtatcaacgggaaatggaacccagaagtagactgcaccgagaagcgggaacagttttgtccaccacctccacagattccaaatgcacaaaacatgactaccacagtcaactaccaggacggcgagaaagtggccgtgctttgcaaagagaattatctgttgccagaagccaaagagatcgtgtgcaaagatggaagatggcaaagcttaccacgttgcgtcgaatccaccgcatactgcggtccacccccttctataaataacggagacacaacctccttccctttatctgtgtacccgccgggatccaccgttacatatagatgtcagagcttttacaagctgcagggttctgtgactgtcacatgccgaaacaagcagtggagcgagcccccccgatgtctggatccatgtgttgtgagcgaggagaatatgaacaaaaataacatacaactgaaatggagaaatgatggtaaactttatgctaagacaggtgacgctgtcgaattccagtgtaaattcccacataaggctatgattagttcgcccccatttagggctatttgtcaggagggcaaattcgaataccccatttgtgagtag

SEQ ID NO: 220141 - DNA, 1782 bp, Artificial Sequence
  derived and/or modified sequence
atgaaagccgacctcaaacaacaccaccaccactggtccatttttagctacatccggctgcgccttccttcaatgctgctcttattttctgttatactcataagctgggtgtccaccgtggggggggaaggtactctatgcgattttcctaagattcatcacggattcttgtacgacgaggaggactataatccattctcacaggtaccaacaggcgaggtgttttactatagttgcgaatacaactttgtatccccaagcaaaagcttctggactcggatcacttgtaccgaggaaggatggtctcccacccccaaatgcctcaggatgtgtagcttcccatttgtaaaaaatggtcactcagaatccagcggtcttatacacttggagggcgacaccgtgcaaatcatctgtaacactggatactcgctccagaacaacgagaagaacatctcttgtgttgaacgcggttggtcaaccccgcccatctgtagtttcaccaaaggcgaatgccacgtcccaatactagaggctaacgtagacgctcagcctaaaaaagaatcttacaaagtaggcgatgtcctgaagttctcatgtcgaaaaaaccttatccgtgtaggcagcgacagtgtgcaatgttaccagttcggatggtcaccaaacttcccaacatgcaaaggccaggtgaggtcatgcggccctcccccacagttgagcaatggtgaggtgaaagaaattaggaaagaggagtacgggcacaacgaagtagtggagtatgactgcaatccaaacttcatcatcaacggaccgaagaaaatacagtgcgtggacggagagtggactacactacctacctgtgtggaacaagtgaagacttgcggctacataccggaactcgaatatgggtacgtccagccttcagtccctccctaccagcacggagtttctgtggaagtgaattgccgcaatgaatacgccatgatcgggaacaatatgatcacttgcatcaacggtatttggacagagctgccaatgtgtgtggccacccatcagttgaaacgttgtaaaatcgcaggagtcaacattaaaacactcttgaaactatcaggcaaggaatttaaccataatagtcgcattagatatcgctgttccgacatttttcggtatcggcactccgtatgcataaatggaaaatggaacccagaagtggattgtacagagaagagagaacagttttgccccccgcccccacagattcctaacgctcagaacatgaccacgaccgtgaactaccaggacggagagaaagtcgccgtgctgtgcaaagagaattacctgctccccgaggcgaaagagatcgtatgtaaagacggacgatggcagtcacttccaagatgtgttgaaagtacggcttactgtgggcccccaccatctatcaataatggcgatacaacaagtttcccgctgtccgtgtatcctcccgggagcaccgttacctatcgttgtcaaagtttctacaaactgcagggtagcgtcaccgtgacatgtcggaacaaacagtggtctgagccccctaggtgcctggacccttgcgtagtctcggaagagaacatgaacaaaaacaacatccagctgaagtggaggaacgacggaaaactctatgcaaaaacaggagacgccgtggaatttcagtgcaagtttccacacaaagctatgatctccagcccaccattcagggctatttgtcaggaaggaaaattcgaatatccaatctgtgaatag

SEQ ID NO: 220142 - DNA, 2810 bp, Artificial Sequence
  derived and/or modified sequence
agtacattgaaattcaaagtcatgcttgtaactgttaatgaaagcagatttaaagcaacaccaccatcactggagtatttttagttatatacgattgagactaccaagcatgttgctcttattcagtgtaatcctaatctcatgggtatccactgttgggggagaaggaacactttgtgattttccaaaaatacaccatggatttctgtatgatgaagaagattataaccctttttcccaagttcctacaggggaagttttctattactcctgtgaatataattttgtgtctccttcaaaatccttttggactcgcataacatgcacagaagaaggatggtcaccaacaccgaagtgtctcagaatgtgttcctttccttttgtgaaaaatggtcattctgaatcttcaggactaatacatctggaaggtgatactgtacaaattatttgcaacacaggatacagccttcaaaacaatgagaaaaacatttcgtgtgtagaacggggctggtccactcctcccatatgcagcttcactaaaggagaatgtcatgttccaattttagaagccaatgtagatgctcagccaaaaaaagaaagctacaaagttggagacgtgttgaaattctcctgcagaaaaaatcttataagagttggatcagactcagttcaatgttaccaatttgggtggtcacctaactttccaacatgcaaaggacaagtacgatcatgtggtccacctcctcaactctccaatggtgaagttaaggagataagaaaagaggaatatggacacaatgaagtagtggaatatgattgcaatcctaattttataataaacgggcctaagaaaatacaatgtgtggatggagaatggacaactttacccacttgtgttgaacaagtgaaaacatgtggatacatacctgaactcgagtacggttatgttcagccgtctgtccctccctatcaacatggagtttcagtcgaggtgaattgcagaaatgaatatgcaatgattggaaataacatgattacctgtattaatggaatatggacagagcttcctatgtgtgttgcaacacaccaacttaagaggtgcaaaatagcaggagttaatataaaaacattactcaagctatctgggaaagaatttaatcataattctagaatacgttacagatgttcagacatcttcagatacaggcactcagtctgtataaacgggaaatggaatcctgaagtagactgcacagaaaaaagggaacaattctgcccaccgccacctcagatacctaatgctcagaatatgacaaccacagtgaattatcaggatggagaaaaagtagctgttctctgtaaagaaaactatctacttccagaagcaaaagaaattgtatgtaaagatggacgatggcaatcattaccacgctgtgttgagtctactgcatattgtgggccccctccatctattaacaatggagataccacctcattcccattatcagtatatcctccagggtcaacagtgacgtaccgttgccagtccttctataaactccagggctctgtaactgtaacatgcagaaataaacagtggtcagaaccaccaagatgcctagatccatgtgtggtatctgaagaaaacatgaacaaaaataacatacagttaaaatggagaaacgatggaaaactctatgcaaaaacaggggatgctgttgaattccagtgtaaattcccacataaagcgatgatatcatcaccaccatttcgagcaatctgtcaggaagggaaatttgaatatcctatatgtgaatgaagcaagcataattttcctgaatatattcttcaaacatccatctatgctaaaagtagccattatgtagccaattctgtagttacttcttttattctttcaggtgttgtttaactcagttttatttagaactctggatttttagagctttagaaatttgtaagctgagagaacaatgtttcacttaataggagggtgtcttagtccatattacattgttataacagagtatcacagactggataacttctaaccaatagtttatttgtttcataaatctaaaagctgagaagtccaagatggtggggctgcctctggtgagggtcttctcgaagcatcataatatgctggaaggcatcacaacatggtggaagggatcacgtggcaaaagagcatgtacatgggagtgagagaaaaagagagagagagacagagtggcgggggcggggaggagcgcaaactcatcctttataaagacaccactcctgagataacaatccaatcccatgataatgacattaatccattcaagaagatagagctctcgtgacttaatcaccttctaaagatctcacctgacaacactgttgcattggcagttaagtttccacgtaaactttcggggacacattcaaaccacaggagaaactcaaattgttcctgggcaaatcacaacatggggaattttattcataaatgtccacagaaacagtaaatgttctcgcttcagtacttaattcatctaatccctcctgtttgtctcaaattataggataactttgaaactttctgaattaacgttatttaaaaggaaatgtagatgttattttagtctctatcttcatgttattatcacttaaaaacctgcgaaagctgtcaacttttgtggttgtagcaagtattaataaatatttataaatcctctaatgtaagtctagctacctatccaatactaaataccccttaaagtattaaatgcactatctgctgtaaa

SEQ ID NO: 220143 - DNA, 1710 bp, Artificial Sequence
  derived and/or modified sequence
atgctgctgctgttcagcgtgatcctgatcagctgggtgagcaccgtgggcggcgagggcaccctgtgcgacttccccaagatccaccacggcttcctgtacgacgaggaggactacaaccccttcagccaggtgcccaccggcgaggtgttctactacagctgcgagtacaacttcgtgagccccagcaagagcttctggaccagaatcacctgcaccgaggagggctggagccccacccccaagtgcctgagaatgtgcagcttccccttcgtgaagaacggccacagcgagagcagcggcctgatccacctggagggcgacaccgtgcagatcatctgcaacaccggctacagcctgcagaacaacgagaagaacatcagctgcgtggagagaggctggagcaccccccccatctgcagcttcaccaagggcgagtgccacgtgcccatcctggaggccaacgtggacgcccagcccaagaaggagagctacaaggtgggcgacgtgctgaagttcagctgcagaaagaacctgatcagagtgggcagcgacagcgtgcagtgctaccagttcggctggagccccaacttccccacctgcaagggccaggtgagaagctgcggcccccccccccagctgagcaacggcgaggtgaaggagatcagaaaggaggagtacggccacaacgaggtggtggagtacgactgcaaccccaacttcatcatcaacggccccaagaagatccagtgcgtggacggcgagtggaccaccctgcccacctgcgtggagcaggtgaagacctgcggctacatccccgagctggagtacggctacgtgcagcccagcgtgcccccctaccagcacggcgtgagcgtggaggtgaactgcagaaacgagtacgccatgatcggcaacaacatgatcacctgcatcaacggcatctggaccgagctgcccatgtgcgtggccacccaccagctgaagagatgcaagatcgccggcgtgaacatcaagaccctgctgaagctgagcggcaaggagttcaaccacaacagcagaatcagatacagatgcagcgacatcttcagatacagacacagcgtgtgcatcaacggcaagtggaaccccgaggtggactgcaccgagaagagagagcagttctgccccccccccccccagatccccaacgcccagaacatgaccaccaccgtgaactaccaggacggcgagaaggtggccgtgctgtgcaaggagaactacctgctgcccgaggccaaggagatcgtgtgcaaggacggcagatggcagagcctgcccagatgcgtggagagcaccgcctactgcggccccccccccagcatcaacaacggcgacaccaccagcttccccctgagcgtgtacccccccggcagcaccgtgacctacagatgccagagcttctacaagctgcagggcagcgtgaccgtgacctgcagaaacaagcagtggagcgagccccccagatgcctggacccctgcgtggtgagcgaggagaacatgaacaagaacaacatccagctgaagtggagaaacgacggcaagctgtacgccaagaccggcgacgccgtggagttccagtgcaagttcccccacaaggccatgatcagcagcccccccttcagagccatctgccaggagggcaagttcgagtaccccatctgcgagtag

SEQ ID NO: 220144 - DNA, 1782 bp, Artificial Sequence
  derived and/or modified sequence
atgaaggccgacctgaagcagcaccaccaccactggagcatcttcagctacatcagactgagactgcccagcatgctgctgctgttcagcgtgatcctgatcagctgggtgagcaccgtgggcggcgagggcaccctgtgcgacttccccaagatccaccacggcttcctgtacgacgaggaggactacaaccccttcagccaggtgcccaccggcgaggtgttctactacagctgcgagtacaacttcgtgagccccagcaagagcttctggaccagaatcacctgcaccgaggagggctggagccccacccccaagtgcctgagaatgtgcagcttccccttcgtgaagaacggccacagcgagagcagcggcctgatccacctggagggcgacaccgtgcagatcatctgcaacaccggctacagcctgcagaacaacgagaagaacatcagctgcgtggagagaggctggagcaccccccccatctgcagcttcaccaagggcgagtgccacgtgcccatcctggaggccaacgtggacgcccagcccaagaaggagagctacaaggtgggcgacgtgctgaagttcagctgcagaaagaacctgatcagagtgggcagcgacagcgtgcagtgctaccagttcggctggagccccaacttccccacctgcaagggccaggtgagaagctgcggcccccccccccagctgagcaacggcgaggtgaaggagatcagaaaggaggagtacggccacaacgaggtggtggagtacgactgcaaccccaacttcatcatcaacggccccaagaagatccagtgcgtggacggcgagtggaccaccctgcccacctgcgtggagcaggtgaagacctgcggctacatccccgagctggagtacggctacgtgcagcccagcgtgcccccctaccagcacggcgtgagcgtggaggtgaactgcagaaacgagtacgccatgatcggcaacaacatgatcacctgcatcaacggcatctggaccgagctgcccatgtgcgtggccacccaccagctgaagagatgcaagatcgccggcgtgaacatcaagaccctgctgaagctgagcggcaaggagttcaaccacaacagcagaatcagatacagatgcagcgacatcttcagatacagacacagcgtgtgcatcaacggcaagtggaaccccgaggtggactgcaccgagaagagagagcagttctgccccccccccccccagatccccaacgcccagaacatgaccaccaccgtgaactaccaggacggcgagaaggtggccgtgctgtgcaaggagaactacctgctgcccgaggccaaggagatcgtgtgcaaggacggcagatggcagagcctgcccagatgcgtggagagcaccgcctactgcggccccccccccagcatcaacaacggcgacaccaccagcttccccctgagcgtgtacccccccggcagcaccgtgacctacagatgccagagcttctacaagctgcagggcagcgtgaccgtgacctgcagaaacaagcagtggagcgagccccccagatgcctggacccctgcgtggtgagcgaggagaacatgaacaagaacaacatccagctgaagtggagaaacgacggcaagctgtacgccaagaccggcgacgccgtggagttccagtgcaagttcccccacaaggccatgatcagcagcccccccttcagagccatctgccaggagggcaagttcgagtaccccatctgcgagtag

SEQ ID NO: 220145 - DNA, 1710 bp, Artificial Sequence
  derived and/or modified sequence
atgctgcttctcttttcagtgattctgattagctgggtgagcaccgttggtggtgaaggcacgttgtgcgattttcccaagattcaccatggatttctctacgacgaagaggactacaacccattttcccaggtaccgaccggcgaggttttctattacagttgcgaatacaattttgtttctccatccaagtccttctggacaaggatcacgtgcaccgaggagggatggtcaccaacacccaagtgtttgcgcatgtgttctttcccttttgtcaagaacggtcatagcgaatctagcggactgatccacctcgagggggataccgtgcaaatcatttgcaataccgggtactccctccagaataacgagaaaaacattagctgcgttgagcgtgggtggagtaccccacctatttgttcattcaccaaaggagaatgccacgtacctatccttgaggcgaacgtcgatgcacagcccaagaaggagtcatacaaggtgggggacgtcctgaaattctcttgcaggaagaacttgattcgggttggtagcgattcagtacaatgctaccagttcggctggagtcccaacttccctacctgtaaaggacaggtacggtcctgcggcccccctccgcagctgtcaaatggagaggtgaaggagattaggaaggaagagtacgggcataacgaggtggtagagtatgattgtaaccccaacttcataatcaatggtcccaagaagattcaatgcgtcgatggggaatggacgacgcttcctacatgtgtggaacaggtcaaaacctgcggctatatccccgagttggagtatgggtatgtgcaaccctccgtccctccgtaccagcacggagtgagcgttgaggtgaattgcagaaatgaatatgccatgattgggaataatatgataacctgtatcaatgggatttggacggagctccccatgtgtgtggccacgcatcagctcaaaagatgcaaaattgcaggtgtcaatatcaagactttactgaaactgtctggaaaggagttcaaccataattccaggatcagataccggtgttccgacatttttcgctatcgccactcagtgtgcattaacggaaagtggaaccccgaagtggactgcacagagaaaagagaacagttctgtccaccccccccacagattcccaatgctcagaacatgacaactacagtgaattatcaagacggggagaaggtcgcagtgctgtgtaaagagaactacctgttacctgaagccaaggagatcgtttgcaaagatgggcgctggcagtcactccctcgctgtgtggaatccacagcttactgcggcccccctccttctattaataatggtgataccacctcgttcccactgtcggtctatcctccgggcagcactgtgacatataggtgccagtctttctataaactgcaggggtctgttactgtgacctgtcggaacaagcaatggtcagagcccccaaggtgcttagatccctgcgtcgtttccgaggagaatatgaataaaaataatattcaactgaagtggagaaacgacggcaagttgtacgctaaaacgggcgacgcggtagaattccagtgcaaatttccacataaagccatgatctccagtcctcctttccgagccatttgccaggaaggaaagttcgaatatccgatctgtgagtag

SEQ ID NO: 220146 - DNA, 1782 bp, Artificial Sequence
  derived and/or modified sequence
atgaaagccgacttgaagcagcatcatcatcactggtccatcttttcctatataaggctgcgtctgccctcaatgctgcttctgttcagcgttatcttgattagctgggtgtcgaccgtcggcggagaggggaccctttgcgacttcccaaaaattcatcatggatttctgtacgacgaggaggactacaaccccttctctcaagtgccaactggggaagtgttctattactcgtgtgagtataattttgtctccccaagcaaatcattttggacaaggatcacctgtacagaggaaggctggagccccactccgaaatgtctgaggatgtgttccttcccctttgtaaaaaacggccatagtgaatcttcaggccttatccacctggaaggtgatacagttcagatcatatgcaacaccggctacagcctgcagaacaatgaaaaaaatatatcatgtgttgagcgagggtggagcactcctcctatctgcagctttaccaagggtgaatgccatgtcccaatacttgaggccaacgtggatgcccagcccaagaaggagtcctacaaagtcggagatgtactgaagttctcctgtagaaaaaatctgatcagggtgggctccgactccgtacagtgttatcagttcggatggtctcccaacttcccaacctgcaaaggacaagtccggagctgtgggccgccacctcagctgagcaacggcgaggtaaaggagattcggaaggaagaatatggccacaacgaggtggttgaatatgactgtaaccctaacttcattattaacggccctaaaaaaatccagtgtgttgacggggagtggaccactctgcccacatgtgtagagcaggtgaagacctgcgggtacattcctgaactggaatatgggtacgtccagccatctgtgcccccctaccagcacggcgtcagtgtggaggtcaattgccggaatgagtacgccatgatcggcaacaatatgattacctgcattaacggcatatggacggagttaccgatgtgtgtggctacccatcagttgaaaagatgcaagattgcgggtgtaaatatcaagacactcctgaaactatccggcaaggagttcaaccacaattcgagaatcagatatcgctgttcagacatattccgttacagacatagcgtatgtatcaatggcaaatggaatcccgaggtcgattgtactgaaaagagagagcagttctgccctcctcctcctcagatccctaacgcgcagaacatgactaccaccgtgaattaccaggatggtgaaaaagtcgcagtgctgtgcaaggagaactatttactgccagaagcaaaagagattgtgtgtaaagacggcagatggcagagccttcccaggtgtgttgagtctacagcctattgtggtccccctccttctataaacaatggagacacaacaagcttcccattatctgtctaccctcccggatcgaccgtgacctacaggtgtcagtctttctacaaactgcaggggtccgtgaccgttacctgccgcaataaacaatggtccgagccaccacggtgtctggacccatgtgtcgtgtctgaagaaaacatgaataaaaacaacatccagctcaagtggcgtaatgatgggaagctgtacgctaagaccggagacgccgttgaatttcagtgtaagtttccacacaaagctatgattagcagccctcccttccgggccatttgccaggagggaaagttcgaataccctatttgtgagtag

SEQ ID NO: 220147 - DNA, 1710 bp, Artificial Sequence
  derived and/or modified sequence
atgctgctgctcttcagcgtcatcctgatctcctgggtgtccacagtgggcggggagggcaccctgtgtgacttccccaagatccaccacggcttcctgtatgatgaggaggactacaaccccttcagccaggtgcccactggagaggtgttctactacagctgtgagtacaactttgtgagccccagcaagagcttctggacccgcatcacctgcacagaggagggctggagccccacccccaagtgcctgaggatgtgcagcttcccctttgtgaagaatggccacagcgagagcagcggcctcatccacctggagggggacacagtgcagatcatctgcaacacaggctacagcctgcagaacaatgagaagaacatcagctgtgtggagcggggctggagcaccccacccatctgcagcttcaccaagggggagtgccacgtgcccatcctggaggccaacgtggatgcccagcccaagaaggagagctacaaggtgggagatgtgctgaagttcagctgcaggaagaacctgatccgggtgggcagtgacagcgtgcagtgctaccagtttggctggagccccaacttccccacctgcaagggccaggtgcgcagctgtggccccccaccccagctgagcaatggagaggtgaaggagatcaggaaggaggagtatggccacaatgaggtggtggagtatgactgcaaccccaacttcatcatcaatggccccaagaagatccagtgtgtggatggagagtggaccaccctgcccacctgtgtggagcaggtgaagacctgtggctacatccctgagctggagtatggctacgtgcagcccagcgtgcccccctaccagcacggcgtgtctgtggaggtgaactgcagaaatgaatatgccatgattggcaacaacatgatcacctgcatcaatggcatctggacagagctgcccatgtgtgtggccacccaccagctgaagcgctgcaagattgctggggtgaacatcaagaccctgctgaagctgagcggcaaggagttcaaccacaacagccgcatccgctaccgctgcagcgacatcttccgctaccgccacagcgtgtgcatcaacgggaagtggaaccctgaggtggactgcacagagaagcgggagcagttctgccccccaccaccccagatccccaatgcccagaacatgaccaccaccgtgaactaccaggatggagagaaggtggccgtgctgtgcaaggagaactacctgctgcctgaggccaaggagatcgtgtgcaaggatggccgctggcagagcctgccccgctgtgtggagagcacagcctactgcggccccccacccagcatcaacaatggagacaccaccagcttccccctgtctgtgtacccacctggcagcacagtgacctaccgctgccagagcttctacaagctgcagggctctgtgacagtgacctgcaggaacaagcagtggagcgagcccccacgctgcctggacccctgtgtggtgtctgaggagaacatgaacaagaacaacatccagctgaagtggagaaatgatggcaagctgtatgccaagacaggagatgctgtggagttccagtgcaagttcccccacaaggccatgatcagcagcccccccttccgggccatctgccaggagggcaagtttgagtaccccatctgtgagtag

SEQ ID NO: 220148 - DNA, 2829 bp, Artificial Sequence
  derived and/or modified sequence
actaaactagcttccccttagtacattgaaattcaaagtcatgcttgtaactgttaatgaaagcagatttaaagcaacaccaccatcactggagtatttttagttatatacgattgagactaccaagcatgttgctcttattcagtgtaatcctaatctcatgggtatccactgttgggggagaaggaacactttgtgattttccaaaaatacaccatggatttctgtatgatgaagaagattataaccctttttcccaagttcctacaggggaagttttctattactcctgtgaatataattttgtgtctccttcaaaatccttttggactcgcataacatgcacagaagaaggatggtcaccaacaccgaagtgtctcagaatgtgttcctttccttttgtgaaaaatggtcattctgaatcttcaggactaatacatctggaaggtgatactgtacaaattatttgcaacacaggatacagccttcaaaacaatgagaaaaacatttcgtgtgtagaacggggctggtccactcctcccatatgcagcttcactaaaggagaatgtcatgttccaattttagaagccaatgtagatgctcagccaaaaaaagaaagctacaaagttggagacgtgttgaaattctcctgcagaaaaaatcttataagagttggatcagactcagttcaatgttaccaatttgggtggtcacctaactttccaacatgcaaaggacaagtacgatcatgtggtccacctcctcaactctccaatggtgaagttaaggagataagaaaagaggaatatggacacaatgaagtagtggaatatgattgcaatcctaattttataataaacgggcctaagaaaatacaatgtgtggatggagaatggacaactttacccacttgtgttgaacaagtgaaaacatgtggatacatacctgaactcgagtacggttatgttcagccgtctgtccctccctatcaacatggagtttcagtcgaggtgaattgcagaaatgaatatgcaatgattggaaataacatgattacctgtattaatggaatatggacagagcttcctatgtgtgttgcaacacaccaacttaagaggtgcaaaatagcaggagttaatataaaaacattactcaagctatctgggaaagaatttaatcataattctagaatacgttacagatgttcagacatcttcagatacaggcactcagtctgtataaacgggaaatggaatcctgaagtagactgcacagaaaaaagggaacaattctgcccaccgccacctcagatacctaatgctcagaatatgacaaccacagtgaattatcaggatggagaaaaagtagctgttctctgtaaagaaaactatctacttccagaagcaaaagaaattgtatgtaaagatggacgatggcaatcattaccacgctgtgttgagtctactgcatattgtgggccccctccatctattaacaatggagataccacctcattcccattatcagtatatcctccagggtcaacagtgacgtaccgttgccagtccttctataaactccagggctctgtaactgtaacatgcagaaataaacagtggtcagaaccaccaagatgcctagatccatgtgtggtatctgaagaaaacatgaacaaaaataacatacagttaaaatggagaaacgatggaaaactctatgcaaaaacaggggatgctgttgaattccagtgtaaattcccacataaagcgatgatatcatcaccaccatttcgagcaatctgtcaggaagggaaatttgaatatcctatatgtgaatgaagcaagcataattttcctgaatatattcttcaaacatccatctatgctaaaagtagccattatgtagccaattctgtagttacttcttttattctttcaggtgttgtttaactcagttttatttagaactctggatttttagagctttagaaatttgtaagctgagagaacaatgtttcacttaataggagggtgtcttagtccatattacattgttataacagagtatcacagactggataacttctaaccaatagtttatttgtttcataaatctaaaagctgagaagtccaagatggtggggctgcctctggtgagggtcttctcgaagcatcataatatgctggaaggcatcacaacatggtggaagggatcacgtggcaaaagagcatgtacatgggagtgagagaaaaagagagagagagacagagtggcgggggcggggaggagcgcaaactcatcctttataaagacaccactcctgagataacaatccaatcccatgataatgacattaatccattcaagaagatagagctctcgtgacttaatcaccttctaaagatctcacctgacaacactgttgcattggcagttaagtttccacgtaaactttcggggacacattcaaaccacaggagaaactcaaattgttcctgggcaaatcacaacatggggaattttattcataaatgtccacagaaacagtaaatgttctcgcttcagtacttaattcatctaatccctcctgtttgtctcaaattataggataactttgaaactttctgaattaacgttatttaaaaggaaatgtagatgttattttagtctctatcttcatgttattatcacttaaaaacctgcgaaagctgtcaacttttgtggttgtagcaagtattaataaatatttataaatcctctaatgtaagtctagctacctatccaatactaaataccccttaaagtattaaatgcactatctgctgtaaa

SEQ ID NO: 220149 - DNA, 1782 bp, Artificial Sequence
  derived and/or modified sequence
atgaaggctgacctgaagcagcaccaccaccactggagcatcttctcctacatccggctgcggctgcccagcatgctgctgctcttcagcgtcatcctgatctcctgggtgtccacagtgggcggggagggcaccctgtgtgacttccccaagatccaccacggcttcctgtatgatgaggaggactacaaccccttcagccaggtgcccactggagaggtgttctactacagctgtgagtacaactttgtgagccccagcaagagcttctggacccgcatcacctgcacagaggagggctggagccccacccccaagtgcctgaggatgtgcagcttcccctttgtgaagaatggccacagcgagagcagcggcctcatccacctggagggggacacagtgcagatcatctgcaacacaggctacagcctgcagaacaatgagaagaacatcagctgtgtggagcggggctggagcaccccacccatctgcagcttcaccaagggggagtgccacgtgcccatcctggaggccaacgtggatgcccagcccaagaaggagagctacaaggtgggagatgtgctgaagttcagctgcaggaagaacctgatccgggtgggcagtgacagcgtgcagtgctaccagtttggctggagccccaacttccccacctgcaagggccaggtgcgcagctgtggccccccaccccagctgagcaatggagaggtgaaggagatcaggaaggaggagtatggccacaatgaggtggtggagtatgactgcaaccccaacttcatcatcaatggccccaagaagatccagtgtgtggatggagagtggaccaccctgcccacctgtgtggagcaggtgaagacctgtggctacatccctgagctggagtatggctacgtgcagcccagcgtgcccccctaccagcacggcgtgtctgtggaggtgaactgcagaaatgaatatgccatgattggcaacaacatgatcacctgcatcaatggcatctggacagagctgcccatgtgtgtggccacccaccagctgaagcgctgcaagattgctggggtgaacatcaagaccctgctgaagctgagcggcaaggagttcaaccacaacagccgcatccgctaccgctgcagcgacatcttccgctaccgccacagcgtgtgcatcaacgggaagtggaaccctgaggtggactgcacagagaagcgggagcagttctgccccccaccaccccagatccccaatgcccagaacatgaccaccaccgtgaactaccaggatggagagaaggtggccgtgctgtgcaaggagaactacctgctgcctgaggccaaggagatcgtgtgcaaggatggccgctggcagagcctgccccgctgtgtggagagcacagcctactgcggccccccacccagcatcaacaatggagacaccaccagcttccccctgtctgtgtacccacctggcagcacagtgacctaccgctgccagagcttctacaagctgcagggctctgtgacagtgacctgcaggaacaagcagtggagcgagcccccacgctgcctggacccctgtgtggtgtctgaggagaacatgaacaagaacaacatccagctgaagtggagaaatgatggcaagctgtatgccaagacaggagatgctgtggagttccagtgcaagttcccccacaaggccatgatcagcagcccccccttccgggccatctgccaggagggcaagtttgagtaccccatctgtgagtag

SEQ ID NO: 220150 - DNA, 1710 bp, Artificial Sequence
  derived and/or modified sequence
atgctgctgctgttcagcgtgatcctgatcagctgggtgagcaccgtgggcggggaaggaacactatgcgactttccaaagattcatcacggtttcttatacgatgaggaggactataacccattcagtcaggtgcctacaggtgaagtcttctactactcttgcgagtataattttgtgagtcctagtaaatccttctggactaggattacctgcaccgaagaagggtggtcccctacccccaaatgtttgagaatgtgttcattcccatttgtaaaaaacggtcactccgagtcctctggtctgatccatcttgaaggggatacggttcagatcatttgcaacaccggctactctctgcagaacaatgagaagaacatctcttgcgtcgaaaggggttggagcactccaccaatttgttcctttacaaagggcgagtgccacgtaccaatcctggaagccaatgttgacgcccagccaaaaaaagaaagctataaggtcggggatgtcctcaagtttagctgccgaaaaaatctgatccgcgtgggctctgactcagtccagtgctatcagttcggctggagccctaacttccccacatgcaaagggcaggtgcggagctgcggacccccaccccaactgagcaacggagaggtgaaagaaattagaaaggaagagtacgggcacaacgaagtagtggagtacgactgtaacccaaacttcattattaacgggccaaaaaagattcagtgtgtagatggggagtggacaacactacccacctgtgtggagcaggtgaagacctgcggttatatcccggagttggaatatggctatgtccagccatccgtacccccttatcaacatggtgtttccgtcgaagtcaattgccggaatgagtacgccatgattggcaataatatgatcacttgcattaacggcatctggaccgaactgcccatgtgcgtggccactcaccagctgaagagatgtaaaattgctggtgtgaacattaagacattactcaagctgtcagggaaggaatttaaccacaattcccgtatcagataccggtgctccgatatctttcggtatcgacacagtgtgtgtattaacgggaagtggaatcctgaggttgattgcactgagaaaagagaacagttttgcccacctccgccccagatccctaatgcccagaacatgacaacaacagtcaattaccaggacggggaaaaggttgctgtgttgtgtaaggagaactacctgctgcctgaggccaaggagatagtatgcaaagatgggagatggcagagccttcctaggtgtgttgagtcaactgcatattgtggtcccccaccaagcatcaataatggcgataccacatcctttcccttgtccgtgtacccgcctggttccactgtcacctaccgctgtcagtctttctacaaactccagggatctgtgacagtgacatgtagaaacaagcagtggtccgaacctccacgttgcctggatccatgcgtagtgtcagaggagaatatgaataaaaacaacattcagctcaaatggcggaacgacggaaagctgtacgctaagaccggggatgccgtggagttccagtgtaagttcccccataaagccatgatcagcagccccccttttcgcgcgatctgccaggaaggaaagttcgaataccccatctgcgaatag

SEQ ID NO: 220151 - DNA, 1782 bp, Artificial Sequence
  derived and/or modified sequence
atgaaggccgacctgaagcagcaccaccaccactggagcatcttctcatacattcggctccgtctgccttccatgttacttttgttttctgtaatccttatcagttgggtttctacggtgggcggcgaagggactctttgtgattttcctaaaatccaccatggatttctctatgatgaagaggattacaaccccttttcacaggtgcctactggtgaggtgttctattattcatgtgaatataatttcgtgtctccgagcaagagcttttggacgcggataacttgcaccgaagaagggtggtcccctactccaaaatgtctacggatgtgctcattcccatttgtgaagaacggccattccgagagcagcggcctgattcatctcgagggtgataccgtgcaaatcatctgcaatactgggtatagcctccaaaataacgagaagaatatctcctgtgtcgagagagggtggtcaactccaccgatttgcagcttcaccaagggcgagtgccacgtccccattctcgaggctaacgtcgacgcccagcctaagaaagagtcatacaaggtcggggacgtcctgaagttctcctgccgaaagaacctgatcagggtcggctctgattccgtgcagtgttatcaattcggttggagtccaaacttcccaacctgcaaggggcaggtgcggtcttgtgggcctccccctcagttgagtaacggtgaggtcaaagagatacgcaaagaggagtatggtcataacgaggttgtcgagtatgactgtaacccaaacttcattattaatggccccaagaagatccaatgcgttgatggagaatggactaccttgccgacctgcgtggagcaggtaaaaacctgtggctatatcccagagctggagtacggatacgttcagccctctgtgccaccatatcagcacggcgtcagtgtagaagtgaattgtaggaacgagtatgctatgatcggtaataacatgatcacgtgtataaatggcatctggacggagctgcctatgtgtgtagcaacacatcagctaaagagatgcaagatcgccggggtgaacatcaaaaccctcctgaagctgtctggcaaagaatttaatcacaatagccgaatccgataccgttgtagcgacatttttagatatcgccactctgtatgtatcaacggcaagtggaaccccgaggttgattgcacagagaagagagaacagttttgcccaccacccccccagattcccaatgcccaaaatatgaccaccacagttaattatcaagacggggaaaaggtcgcggttctgtgtaaggaaaactatctgctgcctgaggccaaggaaatcgtgtgcaaagatggacgctggcagagcctcccccggtgtgtagagtccacggcctattgcggcccacctccatcaatcaacaatggtgacacaaccagcttccccctaagcgtgtatccgcccggaagcactgttacctacaggtgccagagcttttacaaactccaaggttcggtcactgtgacatgcagaaataaacagtggagcgagccgccaagatgcttggacccatgcgtcgtgtccgaggagaacatgaataagaacaatatccaactcaaatggagaaatgacggaaaactatacgcaaagacaggtgacgccgttgagtttcaatgtaagttcccacacaaggcaatgattagcagcccgcctttccgggctatatgccaggaaggcaaatttgaatacccgatatgtgagtag

SEQ ID NO: 220152 - RNA, 1710 nt, Artificial Sequence
  derived and/or modified sequence
augcuucuccucuucagcgucauuuugauuucuuggguuucuaccguuggcggugaaggaacacuuugcgauuuccccaagauucaccacggguuucucuacgacgaggaagauuauaacccauuuagccaggugcccaccggcgagguguuuuauuacagcugugaauauaacuucguuucaccauccaagucuuuuuggaccaggauaacaugcacagaggaggguuggucuccuaccccuaaaugucugagaauguguucuuuuccuuucgugaaaaauggccauagcgaaucuagcgggcucauccaucuugagggggauacuguucagauuauuuguaauacaggguauucucugcagaacaacgaaaagaacauuuccugcguagagagaggcugguccacaccaccgaucugcaguuucaccaagggggagugucacgugcccauccuggaagccaacguggacgcgcagccaaagaaggagucguauaaggugggugacgugcuuaaauuuagcuguaggaagaaucuuauucgcguggggucagacucaguccaauguuaucaguucggauggucuccaaacuuuccuacauguaagggucaggugcggucaugcggacccccaccccaacugaguaauggggaagugaaggaaauuagaaaagaggaauacggccacaacgaggugguagaauaugacugcaaccccaacuucaucauuaacggccccaagaagauacagugcguugacggcgaguggacaacauugccgacuugcguagagcaggugaaaacaugcggcuauauucccgaacuugaauacgguuacguccagccauccguaccccccuaccagcacggugugucuguggaagucaauugcaggaacgaauaugccaugaucggaaauaacaugaucacauguaucaacgggaucuggacagaguuaccuauguguguagccacacaccaauuaaagagguguaaaauugcuggugugaauaucaaaacucuuuugaagcuuucgggcaaggaguuuaaccauaauucuaggauccgguaccguugcucugacaucuuucgguaucggcauucggucugcaucaaugguaaauggaacccugaagucgauugcacagaaaagagagagcaguuuuguccgccacccccacagauaccaaaugcccaaaacaugaccaccacggucaacuaucaggacggggaaaaaguagcuguuuuguguaaagaaaacuaucuccugcccgaggcgaaagagaucguguguaaagauggacgcuggcagucccuuccucguugcguggaaagcaccgcuuauugcgggcccccuccguccaucaacaacggcgacacgaccucauuuccgcugagcguguacccuccgggcucaacagugaccuacaggugucaauccuuuuacaaacuccaagggucugugaccgugaccugucgaaauaagcaaugguccgaacccccccgaugucuugaucccugcguagugucugaggagaacaugaacaaaaacaauauccaguugaaguggagaaaugacggcaaacuguacgcaaagacaggagaugcagucgaguuucaauguaaguucccgcauaaggccaugaucucuuccccccccuuucgugcuauaugccaagaggguaaguuugaauauccuaucugcgaguag

SEQ ID NO: 220153 - RNA, 1782 nt, Artificial Sequence
  derived and/or modified sequence
augaaagccgaccuaaagcagcaucaucaccauuggagcauuuucuccuacauccgucucagguugccuucaaugcuucuucucuucucgguuauccucauaucuuggguuucuaccguggguggggaggguacacuuugugacuuuccuaaaauucaucacgguuuucuguaugaugaggaggauuacaaccccuuuucccagguacccacaggggaggucuucuauuauuccugcgaauacaacuucgucagccccucuaagaguuuuuggaccagaaucaccugcacugaagagggcuggucuccaaccccaaagugucugaggauguguagcuucccauucgucaagaacggacauuccgaaaguucaggacuuauucaucuggaaggugauacagugcagauaauaugcaauacaggcuacagccuccagaacaaugaaaaaaacauaaguuguguggagagagguuggucaacgccacccaucuguucuuucacaaagggagaaugccaugugccuauucuggaggcgaacguggacgcacagcccaagaaagagucauacaaggugggcgaugugcugaaguucucuugccggaaaaaucuuauaagaguaggaucugauucugugcagugcuaccaauuuggcuggagcccgaauuuuccuacguguaagggacaaguucgcagcuguggcccgccuccacaacugucaaauggagagguuaaagaaauccguaaagaggaauacggacacaacgagguugucgaguacgauugcaaucccaauuucaucaucaaugguccuaagaagauccaauguguugauggagaauggaccacccuaccgacaugugucgaacaggugaagaccugcggcuauaucccggaguuggaguauggcuaugugcaacccucagugccccccuaucagcacggggugucgguggaagugaauuguagaaacgaauacgccaugauugguaacaauaugauuacuugcaucaauggaauauggacugaguugccaaugugcguggccacacaccagcuuaagagguguaaaauagccggcgugaauauaaaaacccucuuaaaauugucagggaaagaguucaaccacaauagccgcaucagguaccgcugcuccgauaucuuucgcuaccggcauagcgucugcaucaaugguaaguggaauccagaaguggauuguacagagaagagagaacaguuuugccccccgcccccacagauuccuaacgcucagaacaugaccacgaccgugaacuaccaggacggagagaaagucgccgugcugugcaaagagaauuaccugcuccccgaggcgaaagagaucguauguaaagacggacgauggcagucacuuccaagauguguugaaaguacggcuuacugugggcccccaccaucuaucaauaauggcgauacaacaaguuucccgcuguccguguauccucccgggagcaccguuaccuaucgcugucagagcuuuuacaaguugcaaggcuccgucacgguuacaugcagaaacaaacaguggucagagcccccacgcugcuuggauccguguguggugucagaggagaacaugaacaagaauaacauucaguugaaguggcgcaacgauggaaaacuguacgcgaagacaggggaugcgguagaauuccaaugcaaguuuccccacaaggcuaugauaagcucgccuccauuuagagccaucugccaggaggggaaauucgaguacccuauaugugaauag

SEQ ID NO: 220154 - RNA, 1710 nt, Artificial Sequence
  derived and/or modified sequence
augcuacuucucuuuucugugaucuugauaagcuggguuucaaccguggggggugaagguacucucugcgauuuucccaagauccaucaugguuuccuguacgaugaggaagauuauaacccuuucagccaagugccgacuggagagguguucuauuacagcugcgaguacaacuuuguaagucccaguaaaucauuuuggacccggauaacuuguacagaggaagguuggagccccacgcccaaauguuugagaauguguucuuuuccuuucgucaagaacggacauucagaaucaucuggacuaauccaucuagagggagacacagugcagauaauauguaauacaggcuauucucuucagaauaaugaaaagaauauuagcugcguggaaagaggauggucuacacccccuauuuguagcuucacgaaaggcgagugccaugucccaauccuggaagcaaauguggaugcacaaccgaagaaggagaguuauaaaguuggagauguguuaaaguuuagcugccgcaagaaucugauucgagugggaagugacucugugcagugcuaucaguucggcuggaguccaaauuucccuacuugcaaaggccaaguucggaguugcggaccgccuccccaguugaguaacggcgaagucaaggagauuagaaaggaagaauauggacacaaugaagucguggaguacgacugcaaccccaacuuuauuauuaauggaccuaaaaaaauacagugcguugauggagaauggacgacacucccuacuugcguggagcaagucaagaccuguggguacauccccgaauuagaauacggauauguucagccaucagugccaccauaccaacauggcgugucagucgaagugaacuguagaaaugaauacgcaaugaucggcaauaacaugaucaccugcaucaacggaauauggaccgagcuaccuaugugcguagcuacccaucaacugaagagauguaagauugcuggcguaaacaucaagacccuacugaaacucucugguaaggaguuuaaccacaacucccgaauccgcuauagauguuccgauauuuuccgauaccgccacuccguuuguaucaacgggaaauggaacccagaaguagacugcaccgagaagcgggaacaguuuuguccaccaccuccacagauuccaaaugcacaaaacaugacuaccacagucaacuaccaggacggcgagaaaguggccgugcuuugcaaagagaauuaucuguugccagaagccaaagagaucgugugcaaagauggaagauggcaaagcuuaccacguugcgucgaauccaccgcauacugcgguccacccccuucuauaaauaacggagacacaaccuccuucccuuuaucuguguacccgccgggauccaccguuacauauagaugucagagcuuuuacaagcugcaggguucugugacugucacaugccgaaacaagcaguggagcgagcccccccgaugucuggauccauguguugugagcgaggagaauaugaacaaaaauaacauacaacugaaauggagaaaugaugguaaacuuuaugcuaagacaggugacgcugucgaauuccaguguaaauucccacauaaggcuaugauuaguucgcccccauuuagggcuauuugucaggagggcaaauucgaauaccccauuugugaguag

SEQ ID NO: 220155 - RNA, 1782 nt, Artificial Sequence
  derived and/or modified sequence
augaaagccgaccucaaacaacaccaccaccacugguccauuuuuagcuacauccggcugcgccuuccuucaaugcugcucuuauuuucuguuauacucauaagcuggguguccaccguggggggggaagguacucuaugcgauuuuccuaagauucaucacggauucuuguacgacgaggaggacuauaauccauucucacagguaccaacaggcgagguguuuuacuauaguugcgaauacaacuuuguauccccaagcaaaagcuucuggacucggaucacuuguaccgaggaaggauggucucccacccccaaaugccucaggauguguagcuucccauuuguaaaaaauggucacucagaauccagcggucuuauacacuuggagggcgacaccgugcaaaucaucuguaacacuggauacucgcuccagaacaacgagaagaacaucucuuguguugaacgcgguuggucaaccccgcccaucuguaguuucaccaaaggcgaaugccacgucccaauacuagaggcuaacguagacgcucagccuaaaaaagaaucuuacaaaguaggcgauguccugaaguucucaugucgaaaaaaccuuauccguguaggcagcgacagugugcaauguuaccaguucggauggucaccaaacuucccaacaugcaaaggccaggugaggucaugcggcccucccccacaguugagcaauggugaggugaaagaaauuaggaaagaggaguacgggcacaacgaaguaguggaguaugacugcaauccaaacuucaucaucaacggaccgaagaaaauacagugcguggacggagaguggacuacacuaccuaccuguguggaacaagugaagacuugcggcuacauaccggaacucgaauauggguacguccagccuucagucccucccuaccagcacggaguuucuguggaagugaauugccgcaaugaauacgccaugaucgggaacaauaugaucacuugcaucaacgguauuuggacagagcugccaauguguguggccacccaucaguugaaacguuguaaaaucgcaggagucaacauuaaaacacucuugaaacuaucaggcaaggaauuuaaccauaauagucgcauuagauaucgcuguuccgacauuuuucgguaucggcacuccguaugcauaaauggaaaauggaacccagaaguggauuguacagagaagagagaacaguuuugccccccgcccccacagauuccuaacgcucagaacaugaccacgaccgugaacuaccaggacggagagaaagucgccgugcugugcaaagagaauuaccugcuccccgaggcgaaagagaucguauguaaagacggacgauggcagucacuuccaagauguguugaaaguacggcuuacugugggcccccaccaucuaucaauaauggcgauacaacaaguuucccgcuguccguguauccucccgggagcaccguuaccuaucguugucaaaguuucuacaaacugcaggguagcgucaccgugacaugucggaacaaacaguggucugagcccccuaggugccuggacccuugcguagucucggaagagaacaugaacaaaaacaacauccagcugaaguggaggaacgacggaaaacucuaugcaaaaacaggagacgccguggaauuucagugcaaguuuccacacaaagcuaugaucuccagcccaccauucagggcuauuugucaggaaggaaaauucgaauauccaaucugugaauag

SEQ ID NO: 220156 - protein, 377 aa, Artificial Sequence
  derived and/or modified sequence
MDSALSDPHNGSAEAGGPTNSTTRPPSTPEGIALAYGSLLLMALLPIFFGALRSVRCARGKNASDMPETITSRDAARFPIIASCTLLGLYLFFKIFSQEYINLLLSMYFFVLGILALSHTISPFMNKFFPASFPNRQYQLLFTQGSGENKEEIINYEFDTKDLVCLGLSSIVGVWYLLRKHWIANNLFGLAFSLNGVELLHLNNVSTGCILLGGLFIYDVFWVFGTNVMVTVAKSFEAPIKLVFPQDLLEKGLEANNFAMLGLGDVVIPGIFIALLLRFDISLKKNTHTYFYTSFAAYIFGLGLTIFIMHIFKHAQPALLYLVPACIGFPVLVALAKGEVTEMFSYEESNPKDPAAVTESKEGTEASASKGLEKKEK

SEQ ID NO: 220157 - protein, 335 aa, Artificial Sequence
  derived and/or modified sequence
MDSALSDPHNGSAEAGGPTNSTTRPPSTPEGIALAYGSLLLMALLPIFFGALRSVRCARGKNASDMPETITSRDAARFPIIASCTLLGLYLFFKIFSQEYINLLLSMYFFVLGILALSHTISPFMNKFFPASFPNRQYQLLFTQGSGENKEEIINYEFDTKDLVCLGLSSIVGVWYLLRKVFGTNVMVTVAKSFEAPIKLVFPQDLLEKGLEANNFAMLGLGDVVIPGIFIALLLRFDISLKKNTHTYFYTSFAAYIFGLGLTIFIMHIFKHAQPALLYLVPACIGFPVLVALAKGEVTEMFSYEESNPKDPAAVTESKEGTEASASKGLEKKEK

SEQ ID NO: 220158 - DNA, 1134 bp, Artificial Sequence
  derived and/or modified sequence
atggatagtgcattgtcagatccccataatggctcggcggaggcaggaggaccaacgaatagcacaaccaggcccccaagcacacccgaaggcatcgctctggcttacggctctttactcctgatggccttgctaccaattttcttcggagctttacgtagcgtgagatgcgctcgcgggaagaacgcctctgacatgcccgaaaccattacttccagagatgcggctaggttccccatcatcgcctcttgcacattactcggactgtacctgttcttcaaaatctttagccaggagtatatcaacctgctcctgagtatgtatttctttgtgctaggtattcttgcactttcacatacaataagtcctttcatgaacaaattttttcccgccagctttcctaatcggcagtatcagctgctattcacccagggcagtggcgaaaataaagaagagattatcaactatgagtttgacactaaagacctcgtatgcttggggctttctagcatcgttggagtttggtatttgctgcgtaagcattggattgcaaacaatctgttcgggctggccttttccctgaatggcgtcgagctgttacaccttaataacgtgtcaaccgggtgcatcctactgggcggactgttcatttacgacgtgttttgggtgtttgggacgaacgtgatggtcaccgtcgccaaaagcttcgaggcacctattaaactcgtcttccctcaagatctcttagaaaaggggcttgaagcaaacaacttcgccatgctcggtctgggagacgtggtgatacccgggatcttcattgccctgctccttcggttcgatattagcctgaaaaagaatacacacacctacttttacaccagctttgccgcttacatctttggcctgggactgactatctttatcatgcatatctttaaacacgcacaacccgccttgttatatttggtgcccgcctgtattggattccccgtgctcgtggccctggccaagggagaagtcaccgagatgttttcttatgaggagtctaatccgaaggaccccgccgccgttaccgaatctaaagagggcacggaagccagcgccagtaaaggactggagaagaaggagaaatag

SEQ ID NO: 220159 - DNA, 1008 bp, Artificial Sequence
  derived and/or modified sequence
atggactcagcactgtccgatccacacaatggatccgcagaggcaggaggtcctacaaactccaccaccagaccaccttccacccccgaggggatagcacttgcctatggctccctattgctgatggccctattgcccatcttctttggcgccctccgctcggttaggtgtgccaggggaaagaatgcatccgatatgcctgagacaatcacttctcgcgacgccgcgagatttcctatcattgcctcatgcacccttctcgggctctacttgttcttcaagatcttctcacaggagtacataaacttgctgctatcaatgtatttttttgtgctcgggatactggcacttagccacacaatatcgccatttatgaacaaatttttccctgctagtttcccaaatagacagtatcaactgcttttcacgcagggatcgggtgaaaataaagaagagatcatcaactatgaatttgacacgaaggaccttgtctgtctagggctctcaagtatcgtcggagtttggtatctgctgaggaaagtttttgggaccaatgtcatggttacagtagcgaagagcttcgaggctccaattaaacttgttttccctcaggatctcctggaaaaaggactggaggctaacaattttgcgatgttaggccttggggacgtcgtcatccctggaatttttatcgcactgctgctgaggttcgacatcagtttgaagaagaatacgcatacctatttttatacgtcattcgcagcatatattttcggcttgggtttaactatatttattatgcacatatttaaacacgcccaacccgcgcttctgtatttggtgcctgcatgcattgggtttcccgtgctcgttgccctcgcaaaaggagaggtgaccgaaatgttcagctatgaagagtccaatccaaaggacccagcggctgtaaccgaaagtaaggagggcacggaggcctccgcctcaaaaggcctcgagaaaaaggagaagtag

SEQ ID NO: 220160 - DNA, 1606 bp, Artificial Sequence
  derived and/or modified sequence
ggagggagcacgtcacttcctgttgccttaggggaacgtggctttccctgcagagccggtgtctccgcctgcgtccctgctgcagcaaccggagctggagtcggatcccgaacgcaccctcgccatggactcggccctcagcgatccgcataacggcagtgccgaggcaggcggccccaccaacagcactacgcggccgccttccacgcccgagggcatcgcgctggcctacggcagcctcctgctcatggcgctgctgcccatcttcttcggcgccctgcgctccgtacgctgcgcccgcggcaagaatgcttcagacatgcctgaaacaatcaccagccgggatgccgcccgcttccccatcatcgccagctgcacactcttggggctctacctctttttcaaaatattctcccaggagtacatcaacctcctgctgtccatgtatttcttcgtgctgggaatcctggccctgtcccacaccatcagccccttcatgaataagttttttccagccagctttccaaatcgacagtaccagctgctcttcacacagggttctggggaaaacaaggaagagatcatcaattatgaatttgacaccaaggacctggtgtgcctgggcctgagcagcatcgttggcgtctggtacctgctgaggaagcactggattgccaacaacctttttggcctggccttctcccttaatggagtagagctcctgcacctcaacaatgtcagcactggctgcatcctgctgggcggactcttcatctacgatgtcttctgggtatttggcaccaatgtgatggtgacagtggccaagtccttcgaggcaccaataaaattggtgtttccccaggatctgctggagaaaggcctcgaagcaaacaactttgccatgctgggacttggagatgtcgtcattccagggatcttcattgccttgctgctgcgctttgacatcagcttgaagaagaatacccacacctacttctacaccagctttgcagcctacatcttcggcctgggccttaccatcttcatcatgcacatcttcaagcatgctcagcctgccctcctatacctggtccccgcctgcatcggttttcctgtcctggtggcgctggccaagggagaagtgacagagatgttcagttatgaggagtcaaatcctaaggatccagcggcagtgacagaatccaaagagggaacagaggcatcagcatcgaaggggctggagaagaaagagaaatgatgcagctggtgcccgagcctctcagggccagaccagacagatgggggctgggcccacacaggcgtgcaccggtagagggcacaggaggccaagggcagctccaggacagggcagggggcagcaggatacctccagccaggcctctgtggcctctgtttccttctccctttcttggccctcctctgctcctccccacaccctgcaggcaaaagaaacccccagcttcccccctccccgggagccaggtgggaaaagtgggtgtgatttttagattttgtattgtggactgattttgcctcacattaaaaactcatcccatggccagggcgggccactgtgctcctggaa

SEQ ID NO: 220161 - DNA, 1424 bp, Artificial Sequence
  derived and/or modified sequence
gggaacgtggctttccctgcagagccggtgtctccgcctgcgtccctgctgcagcaaccggagctggagtcggatcccgaacgcaccctcgccatggactcggccctcagcgatccgcataacggcagtgccgaggcaggcggccccaccaacagcactacgcggccgccttccacgcccgagggcatcgcgctggcctacggcagcctcctgctcatggcgctgctgcccatcttcttcggcgccctgcgctccgtacgctgcgcccgcggcaagaatgcttcagacatgcctgaaacaatcaccagccgggatgccgcccgcttccccatcatcgccagctgcacactcttggggctctacctctttttcaaaatattctcccaggagtacatcaacctcctgctgtccatgtatttcttcgtgctgggaatcctggccctgtcccacaccatcagccccttcatgaataagttttttccagccagctttccaaatcgacagtaccagctgctcttcacacagggttctggggaaaacaaggaagagatcatcaattatgaatttgacaccaaggacctggtgtgcctgggcctgagcagcatcgttggcgtctggtacctgctgaggaaggtatttggcaccaatgtgatggtgacagtggccaagtccttcgaggcaccaataaaattggtgtttccccaggatctgctggagaaaggcctcgaagcaaacaactttgccatgctgggacttggagatgtcgtcattccagggatcttcattgccttgctgctgcgctttgacatcagcttgaagaagaatacccacacctacttctacaccagctttgcagcctacatcttcggcctgggccttaccatcttcatcatgcacatcttcaagcatgctcagcctgccctcctatacctggtccccgcctgcatcggttttcctgtcctggtggcgctggccaagggagaagtgacagagatgttcagttatgaggagtcaaatcctaaggatccagcggcagtgacagaatccaaagagggaacagaggcatcagcatcgaaggggctggagaagaaagagaaatgatgcagctggtgcccgagcctctcagggccagaccagacagatgggggctgggcccacacaggcgtgcaccggtagagggcacaggaggccaagggcagctccaggacagggcagggggcagcaggatacctccagccaggcctctgtggcctctgtttccttctccctttcttggccctcctctgctcctccccacaccctgcaggcaaaagaaacccccagcttcccccctccccgggagccaggtgggaaaagtgggtgtgatttttagattttgtattgtggactgattttgcctcacattaaaaactcatcccatggcc

SEQ ID NO: 220162 - DNA, 1134 bp, Artificial Sequence
  derived and/or modified sequence
atggattctgccctgagtgacccccacaacggcagcgctgaggccggcggccccaccaacagcaccaccaggcctcccagcaccccagagggcatcgccctggcctacggcagcctgctgctgatggccctgctgcccatcttctttggagccctgcggtctgtgcgctgtgcccggggcaagaatgccagtgacatgcctgagaccatcaccagcagagatgctgcccgcttccccatcatcgccagctgcaccctgctgggcctgtacctgttcttcaagatcttcagccaggagtacatcaacctgctgctgtccatgtacttctttgtgctgggcatcctggccctgagccacaccatcagccccttcatgaacaagttcttccctgccagcttccccaaccggcagtaccagctgctcttcacccagggcagcggggagaacaaggaggagatcatcaactatgaatttgacaccaaggacctggtgtgcctgggcctgagcagcatcgtgggcgtgtggtacctgctgaggaagcactggatcgccaacaacctgtttggcctggccttcagcctgaatggagtggagctgctgcacctgaacaacgtgtccacaggctgcatcctgctgggcggcctcttcatctatgatgtgttctgggtgtttggcaccaacgtgatggtgacagtggccaagagctttgaggcccccatcaagctggtgttcccccaggacctgctggagaagggcctggaggccaacaactttgccatgctgggcctgggagatgtggtgattcctggcatcttcatcgccctgctgctgcgctttgacatcagcctgaagaagaacacccacacctacttctacaccagctttgctgcctacatcttcggcctgggcctgaccatcttcatcatgcacatcttcaagcacgcccagcctgccctgctgtacctggtgcctgcctgcatcggcttccctgtgctggtggccctggccaagggggaggtgacagagatgttctcctatgaggagagcaaccccaaggaccctgctgctgtgacagagagcaaggagggcacagaggccagcgccagcaagggcctggagaagaaggagaagtag

SEQ ID NO: 220163 - DNA, 1008 bp, Artificial Sequence
  derived and/or modified sequence
atggattctgccctgagtgacccccacaacggcagcgctgaggccggcggccccaccaacagcaccaccaggcctcccagcaccccagagggcatcgccctggcctacggcagcctgctgctgatggccctgctgcccatcttctttggagccctgcggtctgtgcgctgtgcccggggcaagaatgccagtgacatgcctgagaccatcaccagcagagatgctgcccgcttccccatcatcgccagctgcaccctgctgggcctgtacctgttcttcaagatcttcagccaggagtacatcaacctgctgctgtccatgtacttctttgtgctgggcatcctggccctgagccacaccatcagccccttcatgaacaagttcttccctgccagcttccccaaccggcagtaccagctgctcttcacccagggcagcggggagaacaaggaggagatcatcaactatgaatttgacaccaaggacctggtgtgcctgggcctgagcagcatcgtgggcgtgtggtacctgctgaggaaggtgtttggcaccaacgtgatggtgacagtggccaagagctttgaggcccccatcaagctggtgttcccccaggacctgctggagaagggcctggaggccaacaactttgccatgctgggcctgggagatgtggtgattcctggcatcttcatcgccctgctgctgcgctttgacatcagcctgaagaagaacacccacacctacttctacaccagctttgctgcctacatcttcggcctgggcctgaccatcttcatcatgcacatcttcaagcacgcccagcctgccctgctgtacctggtgcctgcctgcatcggcttccctgtgctggtggccctggccaagggggaggtgacagagatgttctcctatgaggagagcaaccccaaggaccctgctgctgtgacagagagcaaggagggcacagaggccagcgccagcaagggcctggagaagaaggagaagtag

SEQ ID NO: 220164 - DNA, 1134 bp, Artificial Sequence
  derived and/or modified sequence
atggacagcgccctgagcgacccccacaacggcagcgccgaggccgggggtccaacaaattcaacaacccggccaccaagtacaccggagggaattgctctggcctatggcagtcttctcttgatggccctgctgcccatctttttcggcgctctcaggagcgtgcggtgcgctcggggtaaaaatgccagcgacatgcctgaaactatcacctccagggacgccgctcggtttccaattatcgcgtcttgtaccttgttaggcttatacctgttcttcaagatattctctcaggagtacataaatctcctcctgtccatgtatttttttgtcctcggaattttggcgctgagccacacgatcagcccattcatgaataagttctttcctgcctctttccccaatagacagtaccaattattgttcactcaaggcagtggcgagaataaagaggaaattatcaactacgagttcgacaccaaggacctggtttgcctaggcctttcgtccatcgtgggtgtttggtacctcctcagaaagcactggatcgccaacaacttattcggcttggcttttagtttgaacggtgtcgaactgctgcacctgaacaacgtgagcacagggtgtattctgctgggcgggctgtttatctacgacgtcttttgggtatttggcacaaacgtcatggtcaccgtagcgaaatcctttgaagctcccattaagctggtgtttcctcaggatctgttggaaaaaggcttggaagctaacaactttgccatgctcgggctcggggatgtagtgatccctggcatcttcatagccctgctactgcgctttgacatcagtttgaagaagaatacacatacatatttttatacgtcatttgcggcatatattttcggcctgggactgactatctttatcatgcacattttcaaacacgcacagccggctttgctttatctggtgcctgcttgtatcgggttccctgtactcgtggccctcgctaaaggcgaggtgaccgaaatgtttagctatgaggagtccaatcccaaggatcctgctgcagtcacagaatccaaagaggggactgaggccagcgccagtaaaggcctggagaagaaagaaaagtag

SEQ ID NO: 220165 - DNA, 1008 bp, Artificial Sequence
  derived and/or modified sequence
atggacagcgccctgagcgacccccacaacggcagcgccgaggccggtgggcccaccaattctacgacaagacctccctctacacctgagggaatagcccttgcatacgggtctcttctcttgatggccttgctacctattttcttcggagctctgaggagcgtgaggtgtgcccgcggcaagaatgcatctgatatgcctgagacaatcacttctagggatgccgccagatttcccatcatcgcatcatgtacactgctcggcctgtatctgtttttcaagatcttctctcaagaatacatcaacttactactgagcatgtattttttcgtgctgggaatccttgccctcagccatactatctccccctttatgaacaaatttttccctgcaagttttccaaatcgtcagtaccagctgctgttcacacaaggcagcggagaaaacaaggaagagattatcaactatgagttcgatactaaagatttggtctgccttggcctgtcgagtattgtaggcgtgtggtatttgctccgcaaggtgtttggcacaaacgtcatggtcactgttgccaaatcttttgaagccccaatcaaattggtgttcccccaggatctgttggaaaaggggctggaggctaataattttgccatgctgggtctgggcgatgtagttataccggggatttttatcgccctcctcttgcgttttgatatttccctgaagaagaacacccatacatacttttacacaagcttcgctgcttacatcttcgggctgggtctcacaatatttatcatgcatatcttcaagcacgcacagccagcactgttatacctggtcccggcatgcatagggttccccgtcctcgtggcccttgccaagggcgaggtcaccgaaatgttctcatacgaagagagcaaccccaaggacccagctgctgtcacggagagtaaagaaggcaccgaagccagcgccagcaagggcctggagaagaaagaaaaatag

SEQ ID NO: 220166 - DNA, 1134 bp, Artificial Sequence
  derived and/or modified sequence
atggattcagccctttccgaccctcataacggatcggccgaggccggaggacctacgaacagcacaacgcgcccaccatccacacctgagggtatcgctctggcatacggaagcctgctcttgatggcattgctcccaattttcttcggcgcactacgctccgttcggtgtgctagaggaaagaatgccagtgatatgcccgagaccattacctctagggatgctgccaggtttccaatcatcgcctcgtgcacgctcctgggcctgtacctgttcttcaaaatcttcagtcaggagtacatcaatttgctgctgagcatgtacttctttgtgcttggcatcctcgctctcagtcatacgatatcacccttcatgaacaaattcttccccgcttccttccctaaccgacagtatcagctcctattcacccaggggtcaggagaaaataaggaagagataattaactatgaattcgatacgaaagacctggtatgtttgggactgagctctatcgtcggggtgtggtatctattgagaaaacactggatcgcaaataacctgttcggcctggctttctcactcaacggcgtagaacttttgcacctgaacaatgtttctacaggttgtattctgctcgggggactctttatctatgacgtattctgggtctttggcactaacgtcatggtcacagttgccaagagcttcgaggcccctatcaaactggtcttcccccaggacctgctcgaaaagggattagaggcaaataactttgccatgttgggactgggcgacgtggtgattcccggtattttcatcgcattgctgctccggtttgacatttcactgaaaaagaatacgcacacttatttttatacgtcttttgccgcttacatcttcggactcgggctcaccatttttattatgcatatcttcaagcacgcccagccagcactactctacctcgttccagcgtgtataggcttcccggtgttagtcgctctggccaagggtgaagtgacagaaatgttttcatatgaggaatcaaaccctaaggatccggcagcggttactgaatccaaagagggcacagaagccagcgcttccaagggacttgagaagaaagagaaatag

SEQ ID NO: 220167 - DNA, 1008 bp, Artificial Sequence
  derived and/or modified sequence
atggattctgccctcagtgatcctcataacggctctgcagaggcgggtggacccacaaactctacaacacgccctccatcaacacctgagggtatcgcgcttgcatacggtagcctgttactgatggccctcctgcccatcttctttggtgcgctccgcagcgtccgctgcgcaagggggaaaaatgcctctgatatgccagaaaccatcaccagccgtgacgcagcccgatttccaattatcgcctcctgtacactattaggcctctacctctttttcaagattttctcacaagagtacattaacctgttgctgagtatgtatttcttcgtcctgggcatcttagccttgagtcatacaatcagtccgttcatgaacaagtttttcccagcctcattcccaaataggcagtaccagctcttatttacacagggatcaggggaaaataaggaggagataatcaactacgagttcgacacaaaagacctggtgtgcctcggcctgtcgtccattgtaggagtgtggtacctcctccggaaggtatttggtactaatgtgatggttaccgtcgccaagtcgttcgaggctccaatcaaattggtgttcccccaggacctgctggagaaaggcctggaggccaacaactttgccatgctcggccttggggatgtggtcatcccaggtatctttatcgccttattgctgcgcttcgatatctcattaaaaaagaacacgcatacctacttttacacctccttcgctgcttacattttcgggttggggctaacaatttttattatgcatattttcaagcacgcccaaccagctttgctctatctggtccctgcctgtatcgggttcccagttttagtggctctggctaaaggagaagtcacagagatgttttcctatgaagaatctaatccaaaagatcctgctgcagtgacagaatcaaaagagggcacagaagcctcagccagtaaaggactggaaaaaaaagaaaagtag

SEQ ID NO: 220168 - DNA, 1134 bp, Artificial Sequence
  derived and/or modified sequence
atggacagcgccctgagcgacccccacaacggcagcgccgaggccggcggccccaccaacagcaccaccagaccccccagcacccccgagggcatcgccctggcctacggcagcctgctgctgatggccctgctgcccatcttcttcggcgccctgagaagcgtgagatgcgccagaggcaagaacgccagcgacatgcccgagaccatcaccagcagagacgccgccagattccccatcatcgccagctgcaccctgctgggcctgtacctgttcttcaagatcttcagccaggagtacatcaacctgctgctgagcatgtacttcttcgtgctgggcatcctggccctgagccacaccatcagccccttcatgaacaagttcttccccgccagcttccccaacagacagtaccagctgctgttcacccagggcagcggcgagaacaaggaggagatcatcaactacgagttcgacaccaaggacctggtgtgcctgggcctgagcagcatcgtgggcgtgtggtacctgctgagaaagcactggatcgccaacaacctgttcggcctggccttcagcctgaacggcgtggagctgctgcacctgaacaacgtgagcaccggctgcatcctgctgggcggcctgttcatctacgacgtgttctgggtgttcggcaccaacgtgatggtgaccgtggccaagagcttcgaggcccccatcaagctggtgttcccccaggacctgctggagaagggcctggaggccaacaacttcgccatgctgggcctgggcgacgtggtgatccccggcatcttcatcgccctgctgctgagattcgacatcagcctgaagaagaacacccacacctacttctacaccagcttcgccgcctacatcttcggcctgggcctgaccatcttcatcatgcacatcttcaagcacgcccagcccgccctgctgtacctggtgcccgcctgcatcggcttccccgtgctggtggccctggccaagggcgaggtgaccgagatgttcagctacgaggagagcaaccccaaggaccccgccgccgtgaccgagagcaaggagggcaccgaggccagcgccagcaagggcctggagaagaaggagaagtag

SEQ ID NO: 220169 - DNA, 1008 bp, Artificial Sequence
  derived and/or modified sequence
atggacagcgccctgagcgacccccacaacggcagcgccgaggccggcggccccaccaacagcaccaccagaccccccagcacccccgagggcatcgccctggcctacggcagcctgctgctgatggccctgctgcccatcttcttcggcgccctgagaagcgtgagatgcgccagaggcaagaacgccagcgacatgcccgagaccatcaccagcagagacgccgccagattccccatcatcgccagctgcaccctgctgggcctgtacctgttcttcaagatcttcagccaggagtacatcaacctgctgctgagcatgtacttcttcgtgctgggcatcctggccctgagccacaccatcagccccttcatgaacaagttcttccccgccagcttccccaacagacagtaccagctgctgttcacccagggcagcggcgagaacaaggaggagatcatcaactacgagttcgacaccaaggacctggtgtgcctgggcctgagcagcatcgtgggcgtgtggtacctgctgagaaaggtgttcggcaccaacgtgatggtgaccgtggccaagagcttcgaggcccccatcaagctggtgttcccccaggacctgctggagaagggcctggaggccaacaacttcgccatgctgggcctgggcgacgtggtgatccccggcatcttcatcgccctgctgctgagattcgacatcagcctgaagaagaacacccacacctacttctacaccagcttcgccgcctacatcttcggcctgggcctgaccatcttcatcatgcacatcttcaagcacgcccagcccgccctgctgtacctggtgcccgcctgcatcggcttccccgtgctggtggccctggccaagggcgaggtgaccgagatgttcagctacgaggagagcaaccccaaggaccccgccgccgtgaccgagagcaaggagggcaccgaggccagcgccagcaagggcctggagaagaaggagaagtag

SEQ ID NO: 220170 - protein, 612 aa, Artificial Sequence
  derived and/or modified sequence
MAAAGRLPSSWALFSPLLAGLALLGVGPVPARALHNVTAELFGAEAWGTLAAFGDLNSDKQTDLFVLRERNDLIVFLADQNAPYFKPKVKVSFKNHSALITSVVPGDYDGDSQMDVLLTYLPKNYAKSELGAVIFWGQNQTLDPNNMTILNRTFQDEPLIMDFNGDLIPDIFGITNESNQPQILLGGNLSWHPALTTTSKMRIPHSHAFIDLTEDFTADLFLTTLNATTSTFQFEIWENLDGNFSVSTILEKPQNMMVVGQSAFADFDGDGHMDHLLPGCEDKNCQKSTIYLVRSGMKQWVPVLQDFSNKGTLWGFVPFVDEQQPTEIPIPITLHIGDYNMDGYPDALVILKNTSGSNQQAFLLENVPCNNASCEEARRMFKVYWELTDLNQIKDAMVATFFDIYEDGILDIVVLSKGYTKNDFAIHTLKNNFEADAYFVKVIVLSGLCSNDCPRKITPFGVNQPGPYIMYTTVDANGYLKNGSAGQLSQSAHLALQLPYNVLGLGRSANFLDHLYVGIPRPSGEKSIRKQEWTAIIPNSQLIVIPYPHNVPRSWSAKLYLTPSNIVLLTAIALIGVCVFILAIIGILHWQEKKADDREKRQEAHRFHFDAM

SEQ ID NO: 220171 - protein, 272 aa, Artificial Sequence
  derived and/or modified sequence
MDGYPDALVILKNTSGSNQQAFLLENVPCNNASCEEARRMFKVYWELTDLNQIKDAMVATFFDIYEDGILDIVVLSKGYTKNDFAIHTLKNNFEADAYFVKVIVLSGLCSNDCPRKITPFGVNQPGPYIMYTTVDANGYLKNGSAGQLSQSAHLALQLPYNVLGLGRSANFLDHLYVGIPRPSGEKSIRKQEWTAIIPNSQLIVIPYPHNVPRSWSAKLYLTPSNIVLLTAIALIGVCVFILAIIGILHWQEKKADDREKRQEAHRFHFDAM

SEQ ID NO: 220172 - protein, 357 aa, Artificial Sequence
  derived and/or modified sequence
MMVVGQSAFADFDGDGHMDHLLPGCEDKNCQKSTIYLVRSGMKQWVPVLQDFSNKGTLWGFVPFVDEQQPTEIPIPITLHIGDYNMDGYPDALVILKNTSGSNQQAFLLENVPCNNASCEEARRMFKVYWELTDLNQIKDAMVATFFDIYEDGILDIVVLSKGYTKNDFAIHTLKNNFEADAYFVKVIVLSGLCSNDCPRKITPFGVNQPGPYIMYTTVDANGYLKNGSAGQLSQSAHLALQLPYNVLGLGRSANFLDHLYVGIPRPSGEKSIRKQEWTAIIPNSQLIVIPYPHNVPRSWSAKLYLTPSNIVLLTAIALIGVCVFILAIIGILHWQEKKADDREKRQEAHRFHFDAM

SEQ ID NO: 220173 - DNA, 1839 bp, Artificial Sequence
  derived and/or modified sequence
atggcagcagctggcagactaccttcttcctgggctctgttcagcccactgctggctggattggcacttcttggggtagggccagtgcccgctagagccctgcataatgtgacagcagaactttttggggctgaggcatggggtacgttggccgcctttggagatttaaattccgacaagcagacggacttgtttgtactgcgcgaacgaaacgacctgattgtcttcctcgctgaccaaaacgctccctatttcaaacctaaagtgaaggtgtcgttcaagaaccactccgctctgattacctctgtggtgcccggggattatgacggcgactcccagatggatgtgctgttgacttatctgcccaaaaattacgcgaaatccgaattgggagcagtgattttttggggccagaatcaaacgttagatcctaacaacatgaccatcctaaataggacattccaggacgaaccgttaatcatggactttaacggggatctaataccagatatcttcggaataactaatgaatctaaccaacctcagattctcctgggcgggaatctgtcgtggcatcccgctctgacgacaacttctaagatgcgcatcccccactcccatgcctttatagacctgacagaggacttcactgctgacctcttcctcacgactctgaatgccaccacctctacgttccaatttgagatttgggagaatcttgatggcaactttagcgtgtccactatcctggaaaaaccacaaaacatgatggtggttggacagagtgcctttgcagactttgacggagatggccacatggatcacctgctccctggttgtgaggacaaaaattgtcaaaagagtacaatctatctcgtgcggtcaggaatgaaacaatgggtccctgtcctgcaggatttttccaacaaaggcacactgtggggatttgtcccatttgttgacgagcaacaacccactgagattccaatccccatcacccttcatataggggactacaacatggatggctatcccgacgcactcgtcattctgaaaaataccagtgggtctaaccagcaggcttttttgctcgaaaacgtgccctgcaacaacgcaagctgtgaagaagcccgacgcatgttcaaagtttattgggagctcacagatctaaatcagataaaggatgccatggttgccacgtttttcgatatctacgaagacggaatcttggacatagtggtgctgtctaagggctacactaagaatgattttgcgattcacacgctgaaaaacaatttcgaggcggatgcctattttgtgaaggtcattgtgctcagcgggctgtgctcaaacgactgccccaggaaaatcacaccgttcggtgtgaaccagcctggcccttacattatgtataccaccgtggatgcaaacggctacttaaaaaacggatccgccgggcagctcagccagtcagcccacctagcccttcagcttccttacaatgttctgggcctcgggcgttccgcaaattttctggatcacctttatgtggggataccaaggccttccggggaaaagtccatcagaaaacaggagtggacagctatcatacctaactcgcaactcatagttattccataccctcacaacgtgccacggtcctggtctgccaagctgtacctaaccccttctaatatcgtactgctgacagccattgcccttatcggcgtttgtgtatttatcctcgccatcataggtatcctgcactggcaggaaaagaaggccgatgacagagaaaagcgacaggaggcccataggttccacttcgatgcaatgtag

SEQ ID NO: 220174 - DNA, 819 bp, Artificial Sequence
  derived and/or modified sequence
atggacggttacccagacgctctggtgatactcaagaatacgagcggctccaaccaacaggcctttttgcttgagaacgtgccttgcaataatgcctcctgcgaagaggctcgcaggatgtttaaagtttattgggagcttacagatttgaatcaaatcaaagatgccatggtggccacattcttcgacatctatgaggacggcattctggacatcgtggttctgagtaaagggtacacaaagaatgattttgcgatccacaccctgaaaaacaacttcgaagcagatgcttactttgtgaaggttatagtgcttagcggattgtgttccaatgactgccctagaaagataaccccctttggagtgaaccagcctggtccctacatcatgtacaccaccgtggatgcaaatggctacttgaaaaatggtagcgccggacagcttagccagagcgcgcacctggcgcttcagctcccctacaacgtgctggggcttggaaggagcgctaacttcctggatcatctttatgttggcattccccggccaagcggcgagaaatcaatcaggaaacaggagtggaccgccattatcccaaatagccagctcatcgtcatcccctatccacacaacgttcctagaagttggtccgctaagctgtacctgaccccctctaatattgtgctgctgactgctattgcgctgatcggagtctgtgtgttcatcctagctattatagggatcctgcattggcaagaaaagaaagctgatgaccgcgaaaagagacaggaagcccatcggttccactttgatgccatgtag

SEQ ID NO: 220175 - DNA, 1074 bp, Artificial Sequence
  derived and/or modified sequence
atgatggtggtggggcaaagcgcctttgctgatttcgacggcgatggacacatggatcacctcttgcccggatgcgaggataagaattgtcaaaaaagcaccatttatctagtgcgctctggcatgaaacagtgggtccccgtgttgcaagatttctcgaacaaaggcaccctatggggatttgtgcccttcgtggatgagcaacagccgacagagattcccattccaattaccttgcacatcggagactataatatggatggctaccccgatgccctggtgatcctaaagaatacctctggatccaatcagcaggcttttcttctggagaatgtcccttgtaataacgcctcttgcgaggaggcccgacggatgttcaaggtctattgggagctgactgatctcaatcaaattaaggacgctatggttgctacgttcttcgatatttacgaggatgggattttagatattgtggtgctatcaaaaggatacaccaagaatgattttgcaattcacacactgaagaacaactttgaggcagacgcttatttcgttaaggtaatcgtactgtcaggactgtgctccaatgactgccctcgaaagattactccctttggggtgaatcaaccggggccttatatcatgtacactaccgtggacgctaacggttatctcaaaaacggttccgccggccaactcagccagtcagcccatttagctctccaactaccctacaacgtccttggtctgggtcggagcgctaatttcctcgaccatctctatgtgggcatcccacggccttccggagaaaaaagcatcaggaagcaggaatggacagcgattattccaaactcccagcttatcgtcattccatacccacacaacgtcccccgtagttggtccgctaaactttacctgactccatccaacatcgtgctgctcacggccattgccctgatcggtgtgtgtgtcttcattctggctatcattggcattttgcactggcaggagaagaaagctgacgatagggaaaagagacaggaggctcacaggtttcattttgatgcgatgtag

SEQ ID NO: 220176 - DNA, 3388 bp, Artificial Sequence
  derived and/or modified sequence
cgcgcctgccggaagtgagcgtgagggcggctttcaccctagctccactgcttttttagcgtcggaagggcagccctagtgggagagagaaaaaggagccggcagcggctcttacgcgtcccggggctgcgcgccactctctcggccggtaacgcggtgctttgcggctgtcgtcaagcgcggcgttgggccggcgggcgggggctgaggggctgccatggcggcggcgggccggctcccgagctcctgggccctcttctcgccgctcctcgcagggcttgcactactgggagtcgggccggtcccagcgcgggcgctgcacaacgtcacggccgagctctttggggccgaggcctggggcacccttgcggctttcggggacctcaactccgacaagcagacggatctcttcgtgctgcgggaaagaaatgacttaatcgtctttttggcagaccagaatgcaccctattttaaacccaaagtaaaggtatctttcaagaatcacagtgcattgataacaagtgtagtccctggggattatgatggagattctcaaatggatgtccttctgacatatcttcccaaaaattatgccaagagtgaattaggagctgttatcttctggggacaaaatcaaacattagatcctaacaatatgaccatactcaataggacttttcaagatgagccactaattatggatttcaatggtgatctaattcctgatatttttggtatcacaaatgaatccaaccagccacagatactattaggagggaatttatcatggcatccagcattgaccactacaagtaaaatgcgaattccacattctcatgcatttattgatctgactgaagattttacagcagatttattcctgacgacattgaatgccaccactagtaccttccagtttgaaatatgggaaaatttggatggaaacttctctgtcagtactatattggaaaaacctcaaaatatgatggtggttggacagtcagcatttgcagactttgatggagatggacacatggatcatttactgccaggctgtgaagataaaaattgccaaaagagtaccatctacttagtgagatctgggatgaagcagtgggttccagtcctacaagatttcagcaataagggcacactctggggctttgtgccatttgtggatgaacagcaaccaactgaaataccaattccaattacccttcatattggagactacaatatggatggctatccagacgctctggtcatactaaagaacacatctggaagcaaccagcaggcctttttactggagaacgtcccttgtaataatgcaagctgtgaagaggcgcgtcgaatgtttaaagtctactgggagctgacagacctaaatcaaattaaggatgccatggttgccaccttctttgacatttacgaagatggaatcttggacattgtagtgctaagtaaaggatatacaaagaatgattttgccattcatacactaaaaaataactttgaagcagatgcttattttgttaaagttattgttcttagtggtctgtgttctaatgactgtcctcgtaagataacaccctttggagtgaatcaacctggaccttatatcatgtatacaactgtagatgcaaatgggtatctgaaaaatggatcagctggccaactcagccaatccgcacatttagctctccaactaccatacaacgtgcttggtttaggtcggagcgcaaattttcttgaccatctctacgttggtattccccgtccatctggagaaaaatctatacgaaaacaagagtggactgcaatcattccaaattcccagctaattgtcattccataccctcacaatgtccctcgaagttggagtgccaaactgtatcttacaccaagtaatattgttctgcttactgctatagctctcatcggtgtctgtgttttcatcttggcaataattggcattttacattggcaggaaaagaaagcagatgatagagaaaaacgacaagaagcccaccggtttcattttgatgctatgtgacttgcctttaatattacataatggaatggctgttcacttgattagttgaaacacaaattctggcttgaaaaaataggggagattaaatattatttataaatgatgtatcccatggtaattattggaaagtattcaaataaatatggtttgaatatgtcacaaggtctttttttttaaagcactttgtatataaaaatttgggttctctattctgtagtgctgtacatttttgttcctttgtggaatgtgttgcatgtactccagtgtttgtgtatttataatcttatttgcatcatgatgatggaaaaagttgtgtaaataaaaataattaaatgagcaggaatttttgtgtccacttgacttggtcttgcttcttattctaatgatgcaaattatacttttgtgaatatatcacggagtcattaggcattcagcttcatcacagcaggtcaggggtctcactgatggcatacaatatagtgatcgggtactctgacttggtagcacagtaagacagacttgccttaaactcctaattcaaccacttacaaagtcattgtttgaacttggctcttgtttaacctctgtaaacctcagttttcttgtttattcagtggggctaatacttgagttactgtaaacattaaatgggatgatgtatgtgaagtgcttagcttggtgcctagcacagagtaagtggtcaatatgtggtagttgtcattattaatattttagatgatcttattagacttatacatctaattatagaaatacatagacttgatagaattttattttcaggcatgaagaaatattctttggaaaagctaaatttttggtgattgacataaagatttacttgctcatattaactaaaaattatagtactctccaagaattaatgtgccctaaaaattttcctccaaaaacttatccttatcatgtgataatgaagaacatttgatttcttgaaaggaaactgctgtaggcagcatctgggaatgcaaatcttcaatcacatttctattctcaaacacttggagaagtctataatttacattcagacttcaatgcaaattttgtattgtgaacttcacatttccaaaaagttactttaaaaagactttaagactgaaaaaaaaaagtttatcaatgctaataattttctagtatgcaaatggacatgtgatgcctataaaacacaaaaatttctctgaaaacaattttgttcttatttttttctttatagttcactgagattggcatgtgtttttactttgtatctaagcatgttaacatgtcttcttaataaatattccttattgaaacaaa

SEQ ID NO: 220177 - DNA, 1451 bp, Artificial Sequence
  derived and/or modified sequence
gttgtttggaaagactcaggagctgctcggctggaaggcaatgactgaagtcatctgcatgttgggttccagtcctacaagatttcagcaataagggcacactctggggctttgtgccatttgtggatgaacagcaaccaactgaaataccaattccaattacccttcatattggagactacaatatggatggctatccagacgctctggtcatactaaagaacacatctggaagcaaccagcaggcctttttactggagaacgtcccttgtaataatgcaagctgtgaagaggcgcgtcgaatgtttaaagtctactgggagctgacagacctaaatcaaattaaggatgccatggttgccaccttctttgacatttacgaagatggaatcttggacattgtagtgctaagtaaaggatatacaaagaatgattttgccattcatacactaaaaaataactttgaagcagatgcttattttgttaaagttattgttcttagtggtctgtgttctaatgactgtcctcgtaagataacaccctttggagtgaatcaacctggaccttatatcatgtatacaactgtagatgcaaatgggtatctgaaaaatggatcagctggccaactcagccaatccgcacatttagctctccaactaccatacaacgtgcttggtttaggtcggagcgcaaattttcttgaccatctctacgttggtattccccgtccatctggagaaaaatctatacgaaaacaagagtggactgcaatcattccaaattcccagctaattgtcattccataccctcacaatgtccctcgaagttggagtgccaaactgtatcttacaccaagtaatattgttctgcttactgctatagctctcatcggtgtctgtgttttcatcttggcaataattggcattttacattggcaggaaaagaaagcagatgatagagaaaaacgacaagaagcccaccggtttcattttgatgctatgtgacttgcctttaatattacataatggaatggctgttcacttgattagttgaaacacaaattctggcttgaaaaaataggggagattaaatattatttataaatgatgtatcccatggtaattattggaaagtattcaaataaatatggtttgaatatgtcacaaggtctttttttttaaagcactttgtatataaaaatttgggttctctattctgtagtgctgtacatttttgttcctttgtggaatgtgttgcatgtactccagtgtttgtgtatttataatcttatttgcatcatgatgatggaaaaagttgtgtaaataaaaataattaaatgagcaggaatttttgtgtccacttgacttggtcttgcttcttattctaatgatgcaaattatacttttgtgaatatatcacggagtcattaggcattcagcttcatcacagca

SEQ ID NO: 220178 - DNA, 1464 bp, Artificial Sequence
  derived and/or modified sequence
aacaatgtatttgctctgagttgcagccgattaacttttcttcagaggcaaatgtagacttatctctccttctcctgaccacccaccacactatacttaagaaaatggaaagggatagatttattcctgacgacattgaatgccaccactagtaccttccagtttgaaatatgggaaaatttggatggaaacttctctgtcagtactatattggaaaaacctcaaaatatgatggtggttggacagtcagcatttgcagactttgatggagatggacacatggatcatttactgccaggctgtgaagataaaaattgccaaaagagtaccatctacttagtgagatctgggatgaagcagtgggttccagtcctacaagatttcagcaataagggcacactctggggctttgtgccatttgtggatgaacagcaaccaactgaaataccaattccaattacccttcatattggagactacaatatggatggctatccagacgctctggtcatactaaagaacacatctggaagcaaccagcaggcctttttactggagaacgtcccttgtaataatgcaagctgtgaagaggcgcgtcgaatgtttaaagtctactgggagctgacagacctaaatcaaattaaggatgccatggttgccaccttctttgacatttacgaagatggaatcttggacattgtagtgctaagtaaaggatatacaaagaatgattttgccattcatacactaaaaaataactttgaagcagatgcttattttgttaaagttattgttcttagtggtctgtgttctaatgactgtcctcgtaagataacaccctttggagtgaatcaacctggaccttatatcatgtatacaactgtagatgcaaatgggtatctgaaaaatggatcagctggccaactcagccaatccgcacatttagctctccaactaccatacaacgtgcttggtttaggtcggagcgcaaattttcttgaccatctctacgttggtattccccgtccatctggagaaaaatctatacgaaaacaagagtggactgcaatcattccaaattcccagctaattgtcattccataccctcacaatgtccctcgaagttggagtgccaaactgtatcttacaccaagtaatattgttctgcttactgctatagctctcatcggtgtctgtgttttcatcttggcaataattggcattttacattggcaggaaaagaaagcagatgatagagaaaaacgacaagaagcccaccggtttcattttgatgctatgtgacttgcctttaatattacataatggaatggctgttcacttgattagttgaaacacaaattctggcttgaaaaaataggggagattaaatattatttataaatgatgtatcccatggtaattattggaaagtattcaaataaatatggtttgaatatgtcacaa

SEQ ID NO: 220179 - DNA, 1799 bp, Artificial Sequence
  derived and/or modified sequence
ctagctccactgcttttttagcgtcggaagggcagccctagtgggagagagaaaaaggagccggcagcggctcttacgcgtcccggggctgcgcgccactctctcggccggaaatgacttaatcgtctttttggcagaccagaatgcaccctattttaaacccaaagtaaaggtatctttcaagaatcacagtgcattgataacaagtgtagtccctggggattatgatggagattctcaaatggatgtccttctgacatatcttcccaaaaattatgccaagagtgaattaggagctgttatcttctggggacaaaatcaaacattagatcctaacaatatgaccatactcaataggacttttcaagatgagccactaattatggatttcaatggtgatctaattcctgatatttttggtatcacaaatgaatccaaccagccacagatactattaggagggaatttatcatggcatccagcattgaccactacaagtaaaatgcgaattccacattctcatgcatttattgatctgactgaagattttacagcagatttattcctgacgacattgaatgccaccactagtaccttccagtttgaaatatgggaaaatttggatggaaacttctctgtcagtactatattggaaaaacctcaaaatatgatggtggttggacagtcagcatttgcagactttgatggagatggacacatggatcatttactgccaggctgtgaagataaaaattgccaaaagagtaccatctacttagtgagatctgggatgaagcagtgggttccagtcctacaagatttcagcaataagggcacactctggggctttgtgccatttgtggatgaacagcaaccaactgaaataccaattccaattacccttcatattggagactacaatatggatggctatccagacgctctggtcatactaaagaacacatctggaagcaaccagcaggcctttttactggagaacgtcccttgtaataatgcaagctgtgaagaggcgcgtcgaatgtttaaagtctactgggagctgacagacctaaatcaaattaaggatgccatggttgccaccttctttgacatttacgaagatggaatcttggacattgtagtgctaagtaaaggatatacaaagaatgattttgccattcatacactaaaaaataactttgaagcagatgcttattttgttaaagttattgttcttagtggtctgtgttctaatgactgtcctcgtaagataacaccctttggagtgaatcaacctggaccttatatcatgtatacaactgtagatgcaaatgggtatctgaaaaatggatcagctggccaactcagccaatccgcacatttagctctccaactaccatacaacgtgcttggtttaggtcggagcgcaaattttcttgaccatctctacgttggtattccccgtccatctggagaaaaatctatacgaaaacaagagtggactgcaatcattccaaattcccagctaattgtcattccataccctcacaatgtccctcgaagctctcatcggtgtctgtgttttcatcttggcaataattggcattttacattggcaggaaaagaaagcagatgatagagaaaaacgacaagaagcccaccggtttcattttgatgctatgtgacttgcctttaatattacataatggaatggctgttcacttgattagttgaaacacaaattctggcttgaaaaaataggggagattaaatattatttataaatgatgtatcccatg

SEQ ID NO: 220180 - DNA, 1839 bp, Artificial Sequence
  derived and/or modified sequence
atggctgctgctggccgcctgcccagctcctgggccctcttcagccccctgctggccggcctggccctgctgggcgtgggccctgtgcctgcccgggccctgcacaacgtgacagctgagctgtttggagctgaggcctggggcaccctggccgcctttggagacctgaacagcgacaagcagacagacctgtttgtgctgcgggagagaaatgacctgattgtgttcctggccgaccagaatgccccctacttcaagcccaaggtgaaggtgtccttcaagaaccacagcgccctgatcacctctgtggtgcctggggactatgatggagacagccagatggatgtgctgctgacctacctgcccaagaactatgccaagtctgagctgggcgccgtcatcttctggggccagaaccagaccctggaccccaacaacatgaccatcctgaacagaaccttccaggatgagcccctcatcatggacttcaacggggacctgatcccagacatcttcggcatcaccaatgaaagcaaccagccccagatcctgctgggcggcaacctgtcctggcacccagccctgaccaccaccagcaagatgaggatcccccacagccacgccttcatcgacctgacagaggacttcaccgctgacctcttcctgaccaccctgaatgccaccaccagcaccttccagtttgagatctgggagaacctggatggcaacttctctgtgtccaccatcctggagaagccccagaacatgatggtggtgggccagagcgcctttgctgactttgatggagatggccacatggaccacctgctgcccggctgtgaggacaagaactgccagaagagcaccatctacctggtgcgcagcggcatgaagcagtgggtgcctgtgctgcaggacttcagcaacaagggcaccctgtggggctttgtgccctttgtggatgagcagcagcccacagagatccccatccccatcaccctgcacatcggggactacaacatggatggctacccagatgccctggtgatcctgaagaacaccagcggcagcaaccagcaggccttcctgctggagaatgtgccctgcaacaatgccagctgtgaggaggcccggaggatgttcaaggtgtactgggagctgacagacctgaaccagatcaaggatgccatggtggccaccttctttgacatctatgaagatggcatcctggacatcgtggtgctgagcaagggctacaccaagaatgactttgccatccacaccctgaagaacaactttgaagcagatgcctactttgtgaaggtgattgtgctgagcggcctgtgcagcaatgactgccccaggaagatcacccccttcggcgtgaaccagcccggcccctacatcatgtacaccaccgtggatgccaacggctacctgaagaatggcagcgctggccagctgagccagagcgcccacctggccctgcagctgccctacaacgtgctgggcctgggccgcagcgccaacttcctggaccacctgtatgtgggcatcccccggcccagcggggagaagagcatcaggaagcaggagtggacagccatcatccccaacagccagctgattgtcatcccctacccccacaacgtgcccaggtcctggagcgccaagctgtacctgacccccagcaacatcgtgctgctgacagccatcgccctgattggagtgtgtgtgttcatcctggccatcatcggcatcctgcactggcaggagaagaaggcagatgaccgggagaagaggcaggaggcccaccgcttccactttgatgccatgtag

SEQ ID NO: 220181 - DNA, 819 bp, Artificial Sequence
  derived and/or modified sequence
atggatggctacccagatgccctggtgatcctgaagaacaccagcggcagcaaccagcaggccttcctgctggagaatgtgccctgcaacaatgccagctgtgaggaggcccggaggatgttcaaggtgtactgggagctgacagacctgaaccagatcaaggatgccatggtggccaccttctttgacatctatgaagatggcatcctggacatcgtggtgctgagcaagggctacaccaagaatgactttgccatccacaccctgaagaacaactttgaagcagatgcctactttgtgaaggtgattgtgctgagcggcctgtgcagcaatgactgccccaggaagatcacccccttcggcgtgaaccagcccggcccctacatcatgtacaccaccgtggatgccaacggctacctgaagaatggcagcgctggccagctgagccagagcgcccacctggccctgcagctgccctacaacgtgctgggcctgggccgcagcgccaacttcctggaccacctgtatgtgggcatcccccggcccagcggggagaagagcatcaggaagcaggagtggacagccatcatccccaacagccagctgattgtcatcccctacccccacaacgtgcccaggtcctggagcgccaagctgtacctgacccccagcaacatcgtgctgctgacagccatcgccctgattggagtgtgtgtgttcatcctggccatcatcggcatcctgcactggcaggagaagaaggcagatgaccgggagaagaggcaggaggcccaccgcttccactttgatgccatgtag

SEQ ID NO: 220182 - DNA, 1074 bp, Artificial Sequence
  derived and/or modified sequence
atgatggtggtgggccagagcgcctttgctgactttgatggagatggccacatggaccacctgctgcccggctgtgaggacaagaactgccagaagagcaccatctacctggtgcgcagcggcatgaagcagtgggtgcctgtgctgcaggacttcagcaacaagggcaccctgtggggctttgtgccctttgtggatgagcagcagcccacagagatccccatccccatcaccctgcacatcggggactacaacatggatggctacccagatgccctggtgatcctgaagaacaccagcggcagcaaccagcaggccttcctgctggagaatgtgccctgcaacaatgccagctgtgaggaggcccggaggatgttcaaggtgtactgggagctgacagacctgaaccagatcaaggatgccatggtggccaccttctttgacatctatgaagatggcatcctggacatcgtggtgctgagcaagggctacaccaagaatgactttgccatccacaccctgaagaacaactttgaagcagatgcctactttgtgaaggtgattgtgctgagcggcctgtgcagcaatgactgccccaggaagatcaccccatttggagtgaaccagcccggcccctacatcatgtacaccaccgtggatgccaacggctacctgaagaatggatctgctggccagctgagccagagcgcccacctggccctgcagctgccctacaacgtgctgggcctgggccgcagcgccaacttcctggaccacctgtatgtgggcatcccccggcccagcggggagaagagcatcaggaagcaggagtggacagccatcatccccaacagccagctgattgtcatcccctacccccacaacgtgcccaggtcctggagcgccaagctgtacctgacccccagcaacatcgtgctgctgacagccatcgccctgattggagtgtgtgtgttcatcctggccatcatcggcatcctgcactggcaggagaagaaggcagatgaccgggagaagaggcaggaggcccaccgcttccactttgatgccatgtag

SEQ ID NO: 220183 - DNA, 1839 bp, Artificial Sequence
  derived and/or modified sequence
atggccgccgccggccggctgcccagcagctgggccctgttcagccccctgctggctggccttgccttgttaggggtgggccctgtgcccgcccgcgcactgcacaatgttactgccgagttgttcggagcagaggcttgggggactttagcagctttcggggacttaaactcggacaaacagaccgatttattcgtgttacgcgagcgcaatgacctcatagtgtttctggcggaccaaaacgcgccttacttcaaaccaaaggtcaaggtctcgttcaagaatcattctgcacttatcaccagcgtcgttccgggggactacgacggcgatagtcaaatggatgttctactcacctacctccccaaaaactacgcaaagagcgagttgggtgccgtgatcttctggggccaaaatcagacattggacccgaacaacatgaccatcctgaataggacttttcaggacgaaccactcatcatggattttaacggcgacctgatcccggacatttttggaattacaaacgagagcaatcagcctcagatcttgttgggcgggaatcttagttggcatcccgccctgactacaacctccaaaatgcggatccctcacagtcacgctttcatagacttgacggaagattttacagccgacctattcctgactactctaaacgccacaacgagcacttttcagttcgaaatctgggaaaatttggacgggaacttctctgtgagtacaatactggagaagccacagaacatgatggtggtcggtcagagtgccttcgcagactttgatggggatggccatatggaccatttattgccgggatgtgaggacaagaattgtcaaaagtccacgatatacttggtgcgatctggaatgaaacaatgggtgcccgtgctgcaagatttcagcaataaggggacactctggggcttcgtgccttttgtagacgaacagcagcctacagaaattcctattccgatcaccctgcacataggggattacaacatggacggctatccggatgctctggtgattttgaagaacactagtgggtccaatcagcaggcctttcttcttgagaacgtgccatgtaataacgcttcatgcgaggaagcgagacgcatgtttaaggtgtattgggagcttaccgacctgaaccagatcaaggacgctatggtagcaaccttcttcgatatttacgaggacggcatccttgacattgtggtattatccaaaggatataccaaaaacgatttcgcaattcacacgttgaaaaataactttgaggccgatgcgtatttcgtgaaagtgattgtgttatctgggctgtgtagcaatgactgccctcggaaaataacaccctttggagtgaaccagccagggccctatatcatgtatactacagtggacgcaaacggctatctgaagaacggtagtgccggacagctcagtcagtcagcccaccttgctctccagctgccctacaacgtcctgggtcttgggcgcagcgctaacttcctcgaccacctgtatgtgggcattccccggccatcaggagaaaagagtatacgcaaacaggagtggacagctatcattcccaatagtcagttgattgtgattccttacccccacaacgtcccgagatcatggtccgcgaagctctacttaacacccagcaatatcgtcttgctgactgcaatcgctttgataggcgtttgtgtattcattctggccattattggcatcctacactggcaggaaaagaaggcagatgacagagaaaagcgccaggaagcacaccgcttccattttgatgctatgtag

SEQ ID NO: 220184 - DNA, 819 bp, Artificial Sequence
  derived and/or modified sequence
atggacggctaccccgacgccctggtgatcctgaagaacaccagcgggtcaaaccaacaggcatttctgcttgagaatgtgccatgcaacaacgcctcatgtgaagaggctagacgtatgtttaaagtgtactgggagttaaccgatcttaatcaaataaaagacgcgatggtcgccacattcttcgacatctacgaagatggcatcctggacatcgtggtgctgtcgaagggctataccaaaaatgattttgccatccacaccttgaaaaacaacttcgaggcagatgcctatttcgtgaaagtcatcgtgctgagcggattgtgctctaacgattgcccgaggaagatcactcccttcggcgtgaaccagcccgggccctacatcatgtatacaacagtagatgctaacggctatctgaagaacggttccgctggccaactctctcagtccgcccacctcgctctgcagctgccctacaatgtgctgggcctgggtcgcagtgcaaactttctggatcatctgtacgttggcatccctcgcccttccggtgagaagtctattagaaagcaagagtggaccgctattatccccaatagccaacttattgtcatcccttatccccacaatgtgcccaggtcttggagcgcaaaattatacctgaccccgtccaacattgtgctgctgaccgctattgcgttaattggtgtttgtgtctttattctggctatcattggaatcttgcactggcaagagaagaaggccgacgatcgggagaaaaggcaggaggcccatcgtttccattttgacgccatgtag

SEQ ID NO: 220185 - DNA, 1074 bp, Artificial Sequence
  derived and/or modified sequence
atgatggtggtgggccagagcgccttcgccgacttcgacggcgacgggcatatggaccacctgctacccgggtgtgaagataagaactgtcaaaagtcaaccatatatctcgttcgctccggcatgaagcagtgggtgccagtcctgcaggactttagcaacaaagggaccttgtggggattcgtgcctttcgtggatgaacagcagccaaccgaaatccctattccgatcacactccacataggggactacaacatggatggatacccagatgccctggtgattttgaaaaataccagcgggtctaaccagcaggcatttctgctggagaacgtgccttgcaataacgccagctgtgaggaagcgcgacgtatgtttaaagtgtactgggagctgacagatcttaatcagataaaagatgcaatggttgcgacctttttcgatatctatgaggacggtattctcgatatcgtggtcctcagtaagggctatacaaagaatgacttcgcgatccacacactgaagaacaactttgaagccgacgcatactttgtcaaggtgatcgttctcagtggcctctgcagtaatgattgcccccgtaaaattacaccatttggcgtcaatcagccggggccatacattatgtacaccaccgtggacgccaacgggtaccttaagaatggctcggctggccagttgagccagagtgctcaccttgccctgcagttaccatataatgtacttggcctagggagaagcgccaactttttagaccatctctacgtgggcatcccaagacccagcggggagaagtccattcgcaaacaggaatggacagcaatcatcccgaatagccagctcatcgtcatcccctaccctcataatgtaccccggagttggagtgccaaactttatcttacaccctcaaatattgtactgctaacagccatcgcactgataggggtctgtgtgttcattctggccattatcggaattttgcactggcaggagaaaaaggcagacgatagagagaagcggcaagaggcacaccggttccactttgacgcaatgtag

SEQ ID NO: 220186 - DNA, 1839 bp, Artificial Sequence
  derived and/or modified sequence
atggcggctgcaggaagacttccctccagttgggccttgttttcacctctgcttgcgggtttggctctgctgggcgtcggtccagtccctgccagagccctacataatgtaactgctgaactgtttggcgcagaggcatgggggactttggcagcattcggggacttgaacagcgataaacaaactgaccttttcgtgttgagagagagaaatgacctgatcgtgttcctagcggaccagaacgccccatactttaaacctaaggtcaaggtttcgtttaagaatcatagcgcactgatcacgagcgtggtccccggagactatgacggtgacagccagatggatgtgttgttaacgtatttacctaagaactatgctaaaagcgaactcggggctgtcatcttttggggacagaatcagacactggatcccaataacatgacgatcctcaatcggacttttcaggacgaacccctgatcatggactttaacggcgatctcattcccgacatatttggtattacaaatgagagcaatcagccccagattctgctcggtggtaacctgagttggcaccccgcacttaccacaacaagcaagatgcggataccacacagccacgctttcatcgacttgaccgaggactttaccgccgatctcttcttgaccacactgaacgcaactaccagtactttccagttcgaaatctgggagaatctagatggtaactttagtgtctccacgattcttgagaagccacagaacatgatggtggtagggcagtccgcctttgcggacttcgatggagacggccacatggaccacctgctccccggttgtgaagacaagaattgtcagaagtcaacaatctatctggttcgttccggaatgaaacaatgggtaccagtgttgcaggactttagcaacaaaggaacactatggggatttgttcctttcgtggacgagcagcagccaacggagatccctatacccattacgctgcatatcggggattataatatggacgggtaccctgatgctctggtcattctaaagaacacctccggcagcaatcagcaagcatttttgctggagaacgtaccatgcaataacgctagctgcgaagaagcccgacggatgtttaaagtgtattgggaactcacagatctcaaccaaataaaagacgctatggtcgccaccttcttcgacatctatgaggacgggatccttgacatcgtggttctgagcaaaggatataccaaaaacgacttcgccattcacacattgaaaaataattttgaggccgacgcatacttcgtgaaggttattgtactgagcggcctatgctctaatgattgtccacggaaaattacccccttcggcgtgaatcagccaggcccatacatcatgtatactactgttgatgcaaatggatatctcaagaatggttccgcagggcaactatctcaaagtgctcaccttgctctacagttaccttacaatgtgttaggcttggggagatccgctaacttcctcgaccacctttatgtagggatacctcgccctagcggagagaagtcaataagaaaacaagaatggacggctatcattcctaatagtcagttgattgtgatcccctatccccacaatgttccccgttcttggtccgcgaaactgtatttaaccccctccaatattgtcctcctgaccgctattgccctcattggtgtttgtgttttcatcttggctatcatcgggatcctccattggcaggagaagaaagccgatgatagagaaaagcgccaggaggcccatagatttcattttgatgcaatgtag

SEQ ID NO: 220187 - DNA, 819 bp, Artificial Sequence
  derived and/or modified sequence
atggatggatacccagatgctctggtaatcctcaaaaatacctctggaagcaaccagcaggcttttctcctggagaacgtcccctgcaacaacgcttcgtgcgaagaagccagacgtatgtttaaagtgtactgggagctgaccgatttgaaccagataaaggatgccatggtagctacttttttcgatatttacgaggacgggattctagacatagtagtactcagtaaaggctatactaagaacgacttcgccatacacaccctgaaaaacaattttgaagcagatgcatacttcgtcaaggtgatcgtcttatctggactatgctccaatgattgtccaagaaagattactccattcggggtaaatcaacctggcccttacatcatgtacacgactgtggacgcgaacggatatctgaagaacggctcagccggtcagttgagtcagtccgcacacctcgctctacagctgccatacaatgtcctggggctgggtcgctcagccaactttctggatcacctgtacgtgggtatcccacgaccctcaggtgaaaaatccatcaggaaacaggagtggacggcaataatcccaaatagccagctaatagtgattccgtatccacacaacgtcccacggtcatggagtgctaagttgtacttgactccctctaatatcgtcctcctgacggctattgctctgattggggtatgtgtcttcatattagcaataataggaatcctgcactggcaggaaaaaaaggccgatgacagggagaaacgacaggaggcccatcggttccacttcgatgccatgtag

SEQ ID NO: 220188 - DNA, 1074 bp, Artificial Sequence
  derived and/or modified sequence
atgatggtggtgggtcaatcagcttttgctgatttcgatggagacggccacatggaccacctgctcccagggtgtgaggacaagaactgtcagaagagcactatttatcttgttaggtctggaatgaagcagtgggtgcccgtgctgcaagacttttccaataaaggcacgctctggggcttcgttccctttgtggacgaacagcagccaaccgaaatcccaatccccataacccttcatattggcgattacaatatggacggataccccgacgccctggttatcctgaaaaacacttccggaagtaatcagcaagcttttctgcttgagaatgtgccatgcaacaatgcgagttgcgaagaggcgaggcgtatgtttaaagtgtattgggaactgacagatttaaaccaaattaaggatgcgatggtggccaccttcttcgacatctacgaggacggaattctcgacattgttgtcctgagcaagggttacactaagaatgacttcgccattcatacacttaagaataattttgaggccgatgcttacttcgtaaaggtgattgtcctgagtggactgtgctccaacgactgccctcggaagatcaccccatttggtgtgaatcagcccggtccatacataatgtacacaactgtggacgcaaacgggtacctgaaaaatggatctgcaggccagctttcccaaagcgcacatcttgcccttcagttgccatacaatgtgcttgggttgggtagatccgctaactttctggaccatttgtatgtgggcattccacgccctagtggagaaaaatccatacggaaacaggagtggacagccatcattcctaactcacagcttatcgtgataccttacccacataatgtacccaggtcctggtcggctaaattatatctaacgccatccaatatcgtccttctcactgcaatagccttgatcggcgtctgtgtcttcatactggccatcattggaattctgcactggcaggaaaaaaaggcagatgacagggaaaaacggcaggaagcccataggtttcacttcgacgccatgtag

SEQ ID NO: 220189 - DNA, 1839 bp, Artificial Sequence
  derived and/or modified sequence
atggccgccgccggcagactgcccagcagctgggccctgttcagccccctgctggccggcctggccctgctgggcgtgggccccgtgcccgccagagccctgcacaacgtgaccgccgagctgttcggcgccgaggcctggggcaccctggccgccttcggcgacctgaacagcgacaagcagaccgacctgttcgtgctgagagagagaaacgacctgatcgtgttcctggccgaccagaacgccccctacttcaagcccaaggtgaaggtgagcttcaagaaccacagcgccctgatcaccagcgtggtgcccggcgactacgacggcgacagccagatggacgtgctgctgacctacctgcccaagaactacgccaagagcgagctgggcgccgtgatcttctggggccagaaccagaccctggaccccaacaacatgaccatcctgaacagaaccttccaggacgagcccctgatcatggacttcaacggcgacctgatccccgacatcttcggcatcaccaacgagagcaaccagccccagatcctgctgggcggcaacctgagctggcaccccgccctgaccaccaccagcaagatgagaatcccccacagccacgccttcatcgacctgaccgaggacttcaccgccgacctgttcctgaccaccctgaacgccaccaccagcaccttccagttcgagatctgggagaacctggacggcaacttcagcgtgagcaccatcctggagaagccccagaacatgatggtggtgggccagagcgccttcgccgacttcgacggcgacggccacatggaccacctgctgcccggctgcgaggacaagaactgccagaagagcaccatctacctggtgagaagcggcatgaagcagtgggtgcccgtgctgcaggacttcagcaacaagggcaccctgtggggcttcgtgcccttcgtggacgagcagcagcccaccgagatccccatccccatcaccctgcacatcggcgactacaacatggacggctaccccgacgccctggtgatcctgaagaacaccagcggcagcaaccagcaggccttcctgctggagaacgtgccctgcaacaacgccagctgcgaggaggccagaagaatgttcaaggtgtactgggagctgaccgacctgaaccagatcaaggacgccatggtggccaccttcttcgacatctacgaggacggcatcctggacatcgtggtgctgagcaagggctacaccaagaacgacttcgccatccacaccctgaagaacaacttcgaggccgacgcctacttcgtgaaggtgatcgtgctgagcggcctgtgcagcaacgactgccccagaaagatcacccccttcggcgtgaaccagcccggcccctacatcatgtacaccaccgtggacgccaacggctacctgaagaacggcagcgccggccagctgagccagagcgcccacctggccctgcagctgccctacaacgtgctgggcctgggcagaagcgccaacttcctggaccacctgtacgtgggcatccccagacccagcggcgagaagagcatcagaaagcaggagtggaccgccatcatccccaacagccagctgatcgtgatcccctacccccacaacgtgcccagaagctggagcgccaagctgtacctgacccccagcaacatcgtgctgctgaccgccatcgccctgatcggcgtgtgcgtgttcatcctggccatcatcggcatcctgcactggcaggagaagaaggccgacgacagagagaagagacaggaggcccacagattccacttcgacgccatgtag

SEQ ID NO: 220190 - DNA, 819 bp, Artificial Sequence
  derived and/or modified sequence
atggacggctaccccgacgccctggtgatcctgaagaacaccagcggcagcaaccagcaggccttcctgctggagaacgtgccctgcaacaacgccagctgcgaggaggccagaagaatgttcaaggtgtactgggagctgaccgacctgaaccagatcaaggacgccatggtggccaccttcttcgacatctacgaggacggcatcctggacatcgtggtgctgagcaagggctacaccaagaacgacttcgccatccacaccctgaagaacaacttcgaggccgacgcctacttcgtgaaggtgatcgtgctgagcggcctgtgcagcaacgactgccccagaaagatcacccccttcggcgtgaaccagcccggcccctacatcatgtacaccaccgtggacgccaacggctacctgaagaacggcagcgccggccagctgagccagagcgcccacctggccctgcagctgccctacaacgtgctgggcctgggcagaagcgccaacttcctggaccacctgtacgtgggcatccccagacccagcggcgagaagagcatcagaaagcaggagtggaccgccatcatccccaacagccagctgatcgtgatcccctacccccacaacgtgcccagaagctggagcgccaagctgtacctgacccccagcaacatcgtgctgctgaccgccatcgccctgatcggcgtgtgcgtgttcatcctggccatcatcggcatcctgcactggcaggagaagaaggccgacgacagagagaagagacaggaggcccacagattccacttcgacgccatgtag

SEQ ID NO: 220191 - DNA, 1074 bp, Artificial Sequence
  derived and/or modified sequence
atgatggtggtgggccagagcgccttcgccgacttcgacggcgacggccacatggaccacctgctgcccggctgcgaggacaagaactgccagaagagcaccatctacctggtgagaagcggcatgaagcagtgggtgcccgtgctgcaggacttcagcaacaagggcaccctgtggggcttcgtgcccttcgtggacgagcagcagcccaccgagatccccatccccatcaccctgcacatcggcgactacaacatggacggctaccccgacgccctggtgatcctgaagaacaccagcggcagcaaccagcaggccttcctgctggagaacgtgccctgcaacaacgccagctgcgaggaggccagaagaatgttcaaggtgtactgggagctgaccgacctgaaccagatcaaggacgccatggtggccaccttcttcgacatctacgaggacggcatcctggacatcgtggtgctgagcaagggctacaccaagaacgacttcgccatccacaccctgaagaacaacttcgaggccgacgcctacttcgtgaaggtgatcgtgctgagcggcctgtgcagcaacgactgccccagaaagatcacccccttcggcgtgaaccagcccggcccctacatcatgtacaccaccgtggacgccaacggctacctgaagaacggcagcgccggccagctgagccagagcgcccacctggccctgcagctgccctacaacgtgctgggcctgggcagaagcgccaacttcctggaccacctgtacgtgggcatccccagacccagcggcgagaagagcatcagaaagcaggagtggaccgccatcatccccaacagccagctgatcgtgatcccctacccccacaacgtgcccagaagctggagcgccaagctgtacctgacccccagcaacatcgtgctgctgaccgccatcgccctgatcggcgtgtgcgtgttcatcctggccatcatcggcatcctgcactggcaggagaagaaggccgacgacagagagaagagacaggaggcccacagattccacttcgacgccatgtag

SEQ ID NO: 220192 - protein, 441 aa, Artificial Sequence
  derived and/or modified sequence
MSLRQRLAQLVGRLQDPQKVARFQRLCGVEAPPRRSADRREDEKAEAPLAGDPRLRGRQPGAPGGPQPPGSDRNQCPAKPDGGGAPNGVRNGLAAELGPASPRRAGALRRNSLTGEEGQLARVSNWPLYCLFCFGTELGNELFYILFFPFWIWNLDPLVGRRLVVIWVLVMYLGQCTKDIIRWPRPASPPVVKLEVFYNSEYSMPSTHAMSGTAIPISMVLLTYGRWQYPLIYGLILIPCWCSLVCLSRIYMGMHSILDIIAGFLYTILILAVFYPFVDLIDNFNQTHKYAPFIIIGLHLALGIFSFTLDTWSTSRGDTAEILGSGAGIACGSHVTYNMGLVLDPSLDTLPLAGPPITVTLFGKAILRILIGMVFVLIIRDVMKKITIPLACKIFNIPCDDIRKARQHMEVELPYRYITYGMVGFSITFFVPYIFFFIGIS

SEQ ID NO: 220193 - DNA, 1326 bp, Artificial Sequence
  derived and/or modified sequence
atgagcctgagacagagactggcccagctggtgggcagactgcaggacccccagaaggtggccagattccagagactgtgcggcgtggaggccccccccagaagaagcgccgacagaagagaggacgagaaggccgaggcccccctggccggcgaccccagactgagaggcagacagcccggcgcccccggcggcccccagccccccggcagcgacagaaaccagtgccccgccaagcccgacggcggcggcgcccccaacggcgtgagaaacggcctggccgccgagctgggccccgccagccccagaagagccggcgccctgagaagaaacagcctgaccggcgaggagggccagctggccagagtgagcaactggcccctgtactgcctgttctgcttcggcaccgagctgggcaacgagctgttctacatcctgttcttccccttctggatctggaacctggaccccctggtgggcagaagactggtggtgatctgggtgctggtgatgtacctgggccagtgcaccaaggacatcatcagatggcccagacccgccagcccccccgtggtgaagctggaggtgttctacaacagcgagtacagcatgcccagcacccacgccatgagcggcaccgccatccccatcagcatggtgctgctgacctacggcagatggcagtaccccctgatctacggcctgatcctgatcccctgctggtgcagcctggtgtgcctgagcagaatctacatgggcatgcacagcatcctggacatcatcgccggcttcctgtacaccatcctgatcctggccgtgttctaccccttcgtggacctgatcgacaacttcaaccagacccacaagtacgcccccttcatcatcatcggcctgcacctggccctgggcatcttcagcttcaccctggacacctggagcaccagcagaggcgacaccgccgagatcctgggcagcggcgccggcatcgcctgcggcagccacgtgacctacaacatgggcctggtgctggaccccagcctggacaccctgcccctggccggcccccccatcaccgtgaccctgttcggcaaggccatcctgagaatcctgatcggcatggtgttcgtgctgatcatcagagacgtgatgaagaagatcaccatccccctggcctgcaagatcttcaacatcccctgcgacgacatcagaaaggccagacagcacatggaggtggagctgccctacagatacatcacctacggcatggtgggcttcagcatcaccttcttcgtgccctacatcttcttcttcatcggcatcagctag

SEQ ID NO: 220194 - DNA, 1326 bp, Artificial Sequence
  derived and/or modified sequence
atgtctcttcgtcagcggctagcacagctggtgggcaggctgcaggatccccagaaggtagcccgttttcaacggctgtgcggtgtcgaggctccccctaggcgatccgctgataggcgcgaagacgaaaaagcggaagcccctcttgccggtgacccaagactgcggggaagacaacctggtgctcctggcggtccccaaccacctgggagcgaccgcaaccagtgccccgcaaaacccgatgggggcggcgctccgaacggcgtcaggaatgggctcgctgcagagcttggtccagcctcacccagacgagcaggagctctcagaagaaactcacttacgggcgaagaaggccagttggcgagagtttcaaattggcccctgtattgtcttttttgtttcggaacagagctaggcaacgagctgttttatattttgttcttccctttttggatttggaatctggatccgctcgtgggcaggagactggtggtaatttgggttttagtgatgtatctgggacaatgcaccaaggatatcatacggtggcctaggccagcttctcctcctgtggtaaagctggaagttttttataacagtgaatactcgatgccctcaacacatgcaatgagcggtactgccatcccaatatccatggtattgcttacctacggacggtggcaatacccgcttatttacggcctcatcttaatcccatgctggtgttccctcgtctgtctgtctaggatttacatggggatgcattcaattcttgacatcattgcagggtttctgtacacgatccttattctggcggtgttctaccctttcgttgatctcatagacaacttcaaccagactcacaaatatgccccgttcatcatcattggactccacctagccctggggatcttttctttcactctggatacctggtctacctctaggggcgatacagccgagatcctcggctcgggagctggtattgcatgcggcagtcatgtcacatataatatgggcttggtgctggacccatccctagacactctgccgcttgcgggccctcctataaccgtcactctgttcggaaaagcgattcttcggatcctgattggcatggtttttgtgctgatcatacgcgatgtgatgaagaagattaccatccctctcgcatgcaaaatatttaacattccttgtgatgatattagaaaagctcgacagcatatggaagtcgaactcccataccgctatattacctacggaatggtgggattttcaatcaccttcttcgtgccatacatattctttttcattggcatctcctag

SEQ ID NO: 220195 - DNA, 1326 bp, Artificial Sequence
  derived and/or modified sequence
atgagcctgcggcagaggctggcccagctggtgggccgcctgcaggacccccagaaggtggcccgcttccagaggctgtgtggggtggaggccccaccccggcgctctgctgacagaagagaagatgagaaggccgaggcccccctggccggggacccccggctgcggggccggcagcccggggcccctgggggcccccagcccccaggcagtgacaggaaccagtgcccagccaagccagatggcggcggggccccaaatggagtgagaaatggcctggccgctgagctgggccctgccagccccaggagagctggggccctgcggaggaacagcctgaccggggaggagggccagctggcccgggtgagcaactggcccctgtactgcctcttctgcttcggcacagagctgggcaatgagctgttctacatcctcttcttccccttctggatctggaacctggaccccctggtgggccgccgcctggtggtgatctgggtgctggtgatgtacctgggccagtgcaccaaggacatcatccgctggcccaggcctgccagcccccctgtggtgaagctggaggtgttctacaacagcgagtacagcatgcccagcacccacgccatgtctggaacagccatccccatctccatggtgctgctgacctacggccgctggcagtaccccctcatctacggcctcatcctgatcccctgctggtgcagcctggtgtgcctgagccgcatctacatgggcatgcacagcatcctggacatcatcgccggcttcctgtacaccatcctgatcctggccgtgttctacccctttgtggacctgattgacaacttcaaccagacccacaagtatgcccccttcatcatcatcggcctgcacctggccctgggcatcttctccttcaccctggacacctggagcaccagcagaggagacacagctgagatcctgggcagcggggccggcatcgcctgtggcagccacgtgacctacaacatgggcctggtgctggaccccagcctggacaccctgcccctggccggcccccccatcaccgtgaccctgtttgggaaggccatcctgcgcatcctgattggcatggtgtttgtgctgatcatcagagatgtgatgaagaagatcaccatccccctggcctgcaagatcttcaacatcccctgtgatgacatcaggaaggcccggcagcacatggaggtggagctgccctaccgctacatcacctacggcatggtgggcttcagcatcaccttctttgtgccctacatcttcttcttcatcggcatctcctag

SEQ ID NO: 220196 - DNA, 1326 bp, Artificial Sequence
  derived and/or modified sequence
atgagcctgcggcagcggctggcccagctggtgggccggctgcaggatcctcagaaggtggctagattccaacggctctgtggagtggaggccccccctaggcgctccgcagaccgccgagaagatgaaaaggccgaggcgcccctagcaggggatccacgtcttaggggtcggcaaccaggagcgccaggtgggccccagccgcccggatctgaccggaatcagtgccccgccaaacccgatggtggtggtgcccctaacggagtcaggaacgggctggccgccgagctggggcccgcaagcccgcggcgcgccggtgccttgagaaggaatagcttgactggggaagagggccaactggctcgggtgagcaattggcctctctactgtctgttctgctttggaactgaactgggcaatgaactgttttatattctttttttccccttctggatctggaatttggaccccctggtaggacgcagattggtggtcatctgggtgctggttatgtacctgggacagtgcaccaaagatataatcagatggcccaggccggcctcccctccagtggtcaagttggaagtattctacaattctgagtactccatgccaagcacacacgcaatgtccgggaccgctatcccaatcagcatggtgctgctgacctacggacgatggcaatatcctcttatttatggcttgattctgattccttgttggtgctcccttgtgtgcctgagtcgcatttacatgggcatgcactcgattctcgacataatcgcagggtttctctacacaatactgattctcgcagtcttctacccttttgtcgatctgatcgataactttaatcagactcacaagtatgcaccctttattatcattggcttgcacctagctctgggcatcttctccttcacgctggatacatggtctactagtcgcggggacacagctgagattcttgggtctggagctgggattgcttgcgggtcccatgtcacttataatatggggttggtactagatccctccctcgacaccttgcccctggccggccccccaattacggttactctgtttgggaaggctatcctccggattttaatcggcatggtgttcgttctgatcattcgcgatgttatgaagaagattactattcccctggcttgtaagatcttcaatatcccttgcgacgatattcgtaaggccagacagcacatggaagtggaactgccataccgttacataacctacggaatggtaggcttcagcatcacattcttcgtcccttacatcttcttctttatcggcattagttag

SEQ ID NO: 220197 - DNA, 1326 bp, Artificial Sequence
  derived and/or modified sequence
atgtcactgcgccaaagactggcacagttggtggggagactgcaggatccacagaaagttgccagatttcagcgtctttgtggggtggaagcacctcctcgcagatccgcggatcgccgtgaagacgagaaggcagaggcaccacttgctggcgatcccagattgcgtggtcggcaacccggtgccccagggggtccacaaccccctgggtccgatcgaaaccaatgccctgccaaacccgatggcggaggagccccaaacggcgtccggaacggactcgccgctgaactcggcccagccagccccagacgtgctggggctctaaggcgaaactctctgaccggcgaggagggtcagctggccagagtgtcaaattggcccctctattgcttgttctgtttcggtaccgaactgggaaatgaactcttttatatcctctttttccctttctggatctggaacctagatccattggtgggcaggcggctggtggtgatttgggtattggttatgtatcttggacagtgcactaaggatataattaggtggcccagacctgcctcaccgcctgtcgtgaagctggaggtgttctacaactcagagtactcaatgccaagtacacatgcaatgtctggcacagctattcccatttccatggtgctgctcacctatggcagatggcaatacccgttgatatacggactgatcctgataccgtgttggtgtagccttgtttgcctgagcagaatctacatgggcatgcatagcatcctggatataattgccggattcctctacacgattctgatcttagctgtcttttaccctttcgtagacctcatcgacaactttaatcagacccacaagtatgcacctttcattatcattgggctgcacctggctcttggcattttcagcttcaccctcgacacctggagtaccagccggggagatactgccgagatattgggttccggggctggcattgcttgcggctctcacgtcacctataatatgggactggtgctcgaccctagcctcgataccctcccgcttgcaggaccccctatcacggtgactttattcggtaaagccattctgcgcattctgattggaatggtgtttgtcctgattattcgcgacgttatgaagaagattacaattccacttgcctgcaagatattcaacatcccttgtgatgatatccggaaagctcggcagcatatggaagtcgagttgccctatcgctatattacctacggcatggtgggcttttctattacttttttcgtcccctacatcttcttcttcattggtatcagctag

SEQ ID NO: 220198 - DNA, 3312 bp, Artificial Sequence
  derived and/or modified sequence
agcgctgtgccggttccgctgccgctggccaggagcgcggggacagttcggggctgcgccggaggccggcccgccttcccgggggttccgttatcatgtcgctgaggcagcgcctggcccagctggttggccgtctgcaggacccgcagaaagtggcccgtttccagcggctgtgcggggtggaagcgccgccgcgccgctcagcagaccggagggaggatgagaaagcggaggcgcctctcgccggagaccctcgactgcgagggcggcagccaggggcgcctggaggcccccagcctcccgggagcgaccgcaatcagtgcccggccaagccggacggcggcggcgcccccaacggcgtgcggaacgggctggcggccgagctgggcccggcctcgccgcggcgcgcgggcgctctgcgccgcaactcgctgacgggcgaggagggccagctggcccgcgtgagcaactggccgctctactgcctgttctgcttcggcacggagctgggcaacgaactcttctacatcctgttcttccccttctggatctggaacctggaccctctggtgggccggaggctcgtggtcatctgggtgctggtcatgtacctgggccagtgcaccaaggacatcatccgctggccgaggcccgcctcgccgcccgtggtcaagttggaggtcttctacaactctgagtacagcatgccctccacccatgccatgtccggcaccgccatccccatttctatggtcctcctcacctatggccgctggcagtaccctcttatatatggactgattcttattccctgctggtgttctctagtttgcctaagtagaatttacatgggaatgcactctattctggatattattgctggattcctatataccattttaatcttagctgtcttctatccatttgtggacctgattgacaacttcaaccaaactcacaaatatgctccattcatcatcatcgggcttcatttagctttggggatcttttctttcactcttgacacctggagcacatcccgaggagacacagccgagatactaggaagtggtgctggaattgcatgtggatctcatgttacttataacatgggtctagtattagatccttctctagatacattacctttagctgggccccccattactgtgactctgtttggaaaagccatattgcggatcctcatagggatggtatttgtactaataatcagagatgtaatgaaaaagatcaccattcctttagcctgcaaaatcttcaatataccgtgtgatgatattcgaaaagcaagacagcacatggaagttgaacttccttatcggtatattacctatggaatggttggtttctccatcacattttttgttccttacatatttttctttattggtatctcttgatggagaagtattgtttatgataagaaaggagggtatcagttactgatacccaaaaatatattccaggtaaagccaggtcagaattaggcttttgcaggaatttaacttaaataattatttaagtaaattcataagagtcagtgcattttatcattgcacatccagatactgttttaggtgagctgagctatttcgttactgagaaaatgataagtatccatttagaatgttcatgtaatgtttggagagttttgtattatggattcaacttatatataatatatataaggtacataatatgcaattatatatctgatatatattatatataaaataatatacctaagtgtttttttaaactatgggagtgtattataaaatcaataataatatgcaaacagttgtgcctgtgtatttgaactacatacaggtatgttgttattaacagatatatttaacatttatttactatgggagccatttcctaattgaattgcgtaattactagaccagaatgcatatgctactatacattgatttactgcctgtttttacactgccattacctttcatgttatccatgatgttgaacatgggaggcatttttaatggaccaaatttttagaaaaattagtttttggatttttttttaagttctgtatactgttttgaatgaactttatttgcagctattctggatgtcagtttaataattcaggtactgaattttattgcttgctaattgtgcctttccgttgctaaattaagaaatgctatgtgtactgtgatgtaaaaataagacattaactttatcttaagttacatataatcaagcaaatattttaaaaaatgtatgtcagggtgacaggcataaaagtaaattacccttaactctttagcctttatttagaaagaaatgtggaatgggctaaactttctcaccaatttattagaaagctaaatggataaatacttccctttttgtagatatttttctgtgcattgtaagttataggagcaggacatattttttgtacattgtcttgattgtttatactgcaggtaggtatttccagtgaatggaaacgttgaaatttatagatgggacaatgcacatacttcatatgtaaacaaagcatttttctaaataatttggaaaggattggatttagcaccgttaacttttaatacccatttattggctatttaaggtaaattataaaacctaaaattagtatcagtattttagatcctattattttttcaactttctattattttcacagtggaaaatttgcgtatagtattaaactattcttttttctgtctacctttatattttgaagtgtggttgtacttacgttaatagtaagtgtatttgtagaaagtttttcataaagaagagattaactttccatataaataaataccaggtatgaaattactgattttagtgcaatatctgtatgattatccagaactatcacttcagatgtttctattttgggcaccataactatttgagctcatatttttataattctgattgagaatttaggggcatggtaatttttaccaaaactgaagctggtaattttaagtaaagcaactaaatttaccctttacttattagttaaaaggaaaccaaggcatgtaggaaaatattggtacgttggaaaatgtgaaaagagctttactttcaaaatgtatgtttaatgaattgaattttagggaccgtttcccataatttgggcctatgctatcctgttgatttttatgtctagcttaaaaggtatttgaaaatgttccatttgtgttttattattttctgtcctatgacagttctatgctaaatgtattttaaaataaaagccaaattgaagattaaaga

SEQ ID NO: 220199 - protein, 605 aa, Artificial Sequence
  derived and/or modified sequence
MVRHQPLQYYEPQLCLSCLTGIYGCRWKRYQRSHDDTTPWERLWFLLLTFTFGLTLTWLYFWWEVHNDYDEFNWYLYNRMGYWSDWPVPILVTTAAAFAYIAGLLVLALCHIAVGQQMNLHWLHKIGLVVILASTVVAMSAVAQLWEDEWEVLLISLQGTAPFLHVGAVAAVTMLSWIVAGQFARAERTSSQVTILCTFFTVVFALYLAPLTISSPCIMEKKDLGPKPALIGHRGAPMLAPEHTLMSFRKALEQKLYGLQADITISLDGVPFLMHDTTLRRTTNVEEEFPELARRPASMLNWTTLQRLNAGQWFLKTDPFWTASSLSPSDHREAQNQSICSLAELLELAKGNATLLLNLRDPPREHPYRSSFINVTLEAVLHSGFPQHQVMWLPSRQRPLVRKVAPGFQQTSGSKEAVASLRRGHIQRLNLRYTQVSRQELRDYASWNLSVNLYTVNAPWLFSLLWCAGVPSVTSDNSHALSQVPSPLWIMPPDEYCLMWVTADLVSFTLIVGIFVLQKWRLGGIRSYNPEQIMLSAAVRRTSRDVSIMKEKLIFSEISDGVEVSDVLSVCSDNSYDTYANSTATPVGPRGGGSHTKTLIERSGR

SEQ ID NO: 220200 - protein, 73 aa, Artificial Sequence
  derived and/or modified sequence
MVRHQPLQYYEPQLCLSCLTGIYGCRWKRYQRSHDDTTPWERLWFLLLTFTFGLTLTWLYFWWEVHNDYDEFN

SEQ ID NO: 220201 - DNA, 1818 bp, Artificial Sequence
  derived and/or modified sequence
atggttagacaccagccattgcagtattacgaacctcaactctgtctgagctgccttactggtatctacggctgccggtggaaacgctatcagcgctcacatgatgataccacaccctgggaaaggttgtggttcctgcttctgacttttacctttggactaacactaacttggctgtatttctggtgggaagttcacaacgactacgacgaattcaattggtacctatacaatagaatgggatattggtccgactggccggtgcccatccttgtgaccacagctgccgctttcgcctacatagcaggcctgcttgtgctggccctgtgccacatcgcagtgggccagcagatgaatctccattggctccataaaatcggtttagtagttatcttagcctccacggtcgtggcaatgagcgctgttgctcaattatgggaagacgaatgggaggttttgcttatcagcttgcagggtacagcccctttcctccacgttggagccgtcgctgccgttaccatgctttcctggattgtcgccggccagttcgccagagccgaaagaactagctcccaggttacaatactgtgcaccttttttacagtagtctttgcactgtatctagctccgttaacgataagcagcccgtgcatcatggaaaaaaaagacctgggccctaaacctgctctcattggacacagaggggcgccgatgttagcacccgaacacactctaatgtcctttcggaaggctctggaacagaagctctacggcctgcaggcggatattacgatatccttggatggcgtcccatttctcatgcatgatacgactctcagaaggacaaccaacgttgaggaggaatttccagagctggcccgccgccctgcaagcatgctaaactggaccaccctgcagcggttgaatgccggacaatggttcctgaagactgacccattttggaccgccagtagtttgagcccctctgaccacagagaggctcaaaaccaatctatctgttctctcgcggaactgcttgagctcgccaagggtaatgccaccctgttgttgaacctgcgcgatcctccacgggagcacccatatcggtcgtctttcatcaatgttaccctcgaggccgtcctgcattctgggttcccgcaacaccaggtgatgtggctaccgtcacgccagagacccctggtccgtaaggtggcgcctggcttccagcaaacttccggatccaaagaagcagtggcatcacttcggagaggacacattcagcgtctgaatctccgctacacacaggtgtcccgccaggagcttagagattatgctagctggaaccttagcgtcaatctgtatacagttaatgctccatggctcttcagtttgttgtggtgcgcgggggtgccttccgtcacctccgataactcacatgctttgtcacaagtgccgtcgccactctggataatgccccctgatgaatattgtctgatgtgggtaaccgcagacctcgtgtcgttcacactcatcgtgggcatcttcgtgctgcagaaatggcggctcggcggaattcgatcatacaatccagagcagattatgctgtcggccgccgtcaggaggacttccagggacgtctctatcatgaaggagaagctgattttcagcgaaatttccgatggggtggaggtgtccgatgtcctgagcgtgtgttcagacaactcttatgacacttatgctaactctactgccacgccggtaggacccaggggagggggttctcacacaaaaacgctgatcgagaggtctggacggtag

SEQ ID NO: 220202 - DNA, 1461 bp, Artificial Sequence
  derived and/or modified sequence
atggtgcggcaccagccattacagtattacgagcctcagctgtgtctttcatgtttgaccggaatctatggatgccgctggaaaaggtatcagagaagccatgacgatacaacacccgggaccgctccttttctgcacgttggcgcagttgcagctgtaacgatgctgagctggatcgttgcaggacagttcgctcgggcggaacgtacttctagccaggtgaccattctctgcactttcttcacggtggtcttcgcattatatctggctcctttaactatctcttcaccctgcataatggaaaagaaagaccttggcccaaaaccagccctgattggtcatcgtggtgcccccatgcttgcgcccgagcataccctcatgtccttccgcaaggctctggaacagaaattatacgggctgcaagccgacatcacgatttccctcgacggagtgcctttcctgatgcacgatactacattaagaagaactaccaacgtggaggaggagtttcccgaactggccaggaggcctgcaagcatgttaaactggaccacgttgcagcgtctaaacgccgggcagtggttcctgaaaacggacccattctggactgcaagcagtctgtcaccgtctgaccacagagaggcccagaatcagtccatctgtagcctggcggaactactggagctcgcaaaaggtaacgctacactcctgctaaatctgagggatcctcctagagagcacccttaccggagttcctttataaatgtcaccctggaagcagtcttgcattctgggtttcctcaacatcaggtgatgtggctcccctctcgacagaggcccctcgtgaggaaggtcgcccccggctttcagcagacctcgggctcaaaggaagccgtggcttccttgaggcgaggccacattcagcgactcaatttgagatatacacaggtgtccaggcaagaactgagggactacgcttcttggaacctttctgtgaacctgtatacggtgaacgctccatggttgtttagcctgctttggtgtgctggagtgccctccgtcacaagcgacaattcgcatgccttatcgcaggtcccctcgcccctctggatcatgccccctgatgagtattgtttaatgtgggtgacggcggatctggtctcgttcactctcattgttggcatcttcgtcctacagaaatggcgcctgggaggaatacgaagttataatccagagcagataatgttgtccgccgcagtcaggcgaactagtagagatgtcagtatcatgaaggaaaagctcatcttcagtgagatctcagatggcgtggaggtgtccgacgttttgtcggtttgctccgataactcctacgatacttatgccaattctacagccacgccagtgggccctagaggcggaggctcgcacactaagactctgatagagaggagtgggaggtag

SEQ ID NO: 220203 - DNA, 408 bp, Artificial Sequence
  derived and/or modified sequence
atggtgcgtcaccaacccctccagtactatgaaccgcagctgtgcctgtcgtgcctgacgggcatctacggctgccggtggaaacgctaccagcggtcgcatgatgacaccactccctgggagaggctctggttcctgctattaacatttacctttgggttaactttgacttggctgtacttttggtgggaggtgcacaacgactacgatgagtttaactggtatctctataaccgaatgggttactggagcgactggcccgttcccatcctcgtgaccaccgccgccgccttcgcttacattgccggccttctggtgttggctttatgccacatcgccgtaggacagcaaatgaatctccattggctgcacaaagcctcatcaggcctaccacttagccccttgtag

SEQ ID NO: 220204 - DNA, 1404 bp, Artificial Sequence
  derived and/or modified sequence
atgagcgcagtagctcagctttgggaagatgagtgggaagtgctacttatttctctgcagggaacagctccttttctgcacgtgggcgccgtcgcagcagtcaccatgctctcatggattgtggccggccaatttgctagggcagagcggacaagtagccaggtcaccatactctgtacattctttaccgtggttttcgcgctttacctggctcctttaaccatttcctcaccctgcatcatggagaaaaaggaccttggccccaagcccgccttaattgggcaccgcggtgcacccatgctggcaccagaacacactcttatgagcttccggaaggccctggaacaaaaattgtacggcttgcaggcagacataaccattagcctggacggagtaccatttctgatgcatgatacaacccttcgtagaactaccaacgtcgaggaggagttccctgagctggcccgtcggccggcaagtatgctgaactggacaacactacaacggctcaatgccggtcagtggttcctcaaaactgatcccttctggactgctagcagcctgtccccttctgaccaccgcgaagcacagaaccagtctatctgttcgctagcagaactcctggagctggccaagggcaatgctactctgctgcttaacctgagagatcccccccgcgaacatccgtatcggtcctcgtttatcaatgtgaccctggaggcagtcttacacagcggtttcccacagcaccaggttatgtggttgccttccaggcaaagaccgctcgtgcgtaaggtcgcacctggattccagcagacatccgggagcaaagaagccgtcgcctctttacgccggggccacatccagagacttaatctcagatacacccaggtctctaggcaggagttgagggactacgcctcgtggaacctcagcgtgaatctctacaccgtcaacgcgccatggctgttctctctactgtggtgtgcaggcgttcccagtgtcactagtgataattcccatgcactgtcccaggttccgtctcccctttggatcatgccccccgatgagtactgtctgatgtgggtcacagctgatctcgtgtcatttactctgatagttgggatattcgttctgcagaagtggcggctgggtggcatacgcagctacaatcctgagcagatcatgctatctgcggccgtccgtcgtacctcacgcgacgtgagcatcatgaaagagaaactcattttctccgagatctctgatggggttgaggtgtctgacgtcctaagcgtttgtagcgacaactcctatgatacgtacgcaaactccaccgctactcctgtgggccccagagggggcggcagccatacgaagaccctaattgagagatctggaagatag

SEQ ID NO: 220205 - DNA, 1818 bp, Artificial Sequence
  derived and/or modified sequence
atggtgcgccaccaaccactgcagtattacgagccgcagctctgtctgagctgtctcaccggaatctacgggtgcaggtggaaacgatatcagcgctcccacgatgatactacaccctgggagcggctgtggtttctattactgacctttactttcggactgacccttacttggctgtacttctggtgggaggtgcataacgactatgacgaatttaactggtacttatataaccgtatggggtattggtcagattggcccgtgcccatattggtgactacagccgctgcctttgcctacattgctgggctcttggtgctggcactgtgccatatcgcagtgggtcaacagatgaatctccattggctccacaaaatcggcttagttgtcatcctcgcatcgacagtggttgctatgtctgcagtagcacagttatgggaagatgaatgggaagtgttacttatctctctccagggcacagcccccttcctgcacgtcggggccgtagcagcagtcactatgctgagttggatagtggcgggccagtttgctcgtgctgagcgcacttcaagccaggtcaccatcctgtgcaccttcttcaccgtggtgttcgcactgtatctcgctcccctgacaatttctagcccctgtatcatggaaaagaaagacttgggacctaaaccagccctgatcggccatagaggcgctcctatgctggcaccagagcacactctgatgtctttccggaaagcacttgaacaaaagctgtatggcttgcaagccgatattacgataagcctggatggggttcctttcttgatgcacgacacaacattaagacgcacaaccaacgtggaagaggaattccctgaactggccaggcggcccgcatctatgttgaattggacaactcttcagaggctgaatgccgggcagtggtttttgaagactgatcccttttggacggcctcatccctcagccctagcgatcacagagaggcacaaaaccagagtatatgttctctggccgagctcctcgagctggctaaggggaacgcgacccttcttctgaacctgagagatcccccaagagagcacccttaccggtcctccttcataaatgtgactctggaggcggtgttgcactctggctttccacagcatcaggtgatgtggctaccttcccgtcaacgtcccctagtaagaaaggtggcaccaggctttcaacaaacaagcggatccaaagaggccgtggctagtctgcggcgaggtcatatacagcggcttaacctaagatatacccaggtgagcaggcaggaactgcgcgattacgcatcgtggaatctctccgtaaacctctataccgttaatgcaccttggctgtttagcctgctttggtgtgccggggtaccttctgttacatccgataacagtcacgccctcagtcaggtgccgtcgcccctgtggatcatgcctcccgatgagtattgtctgatgtgggtcacagcagatcttgtatcctttactctgattgtcggtatatttgtgctgcaaaaatggcggctgggaggcattcgatcttacaacccagagcagattatgctctccgcggccgtgagacgtacatctagggacgtctccatcatgaaggagaagctgatattttcagagatttctgatggcgtggaagttagtgatgtgttatctgtgtgctcagacaactcttacgatacatatgcaaatagtactgctacccctgtagggcccagaggtggcgggagccacaccaaaacccttatcgagcgtagcggtaggtag

SEQ ID NO: 220206 - DNA, 222 bp, Artificial Sequence
  derived and/or modified sequence
atggttcgtcatcaacctctgcagtactatgagccgcagctgtgtctgtcttgcttgactgggatctacggctgccgttggaagcggtatcagaggagtcatgacgacacaaccccatgggagcggctctggtttctgcttcttacatttacatttggactgaccctgacctggctgtatttttggtgggaggtgcataatgactatgacgagtttaactag

SEQ ID NO: 220207 - DNA, 1461 bp, Artificial Sequence
  derived and/or modified sequence
atggtgaggcaccagcccttacagtactacgaaccacaactgtgcctgtcctgtctcacagggatttacggatgtcggtggaagagatatcaaagaagccacgacgatactactccaggtacagcaccctttctccatgtgggcgctgtggccgctgtcacgatgctgagctggatcgtcgcgggacagttcgccagggctgaaaggacaagcagccaggtgacaattctctgtaccttttttaccgtagttttcgctctctatctggcaccattaactatcagttctccctgtattatggaaaagaaggatctcggccccaagcccgccttgattggacacagaggagcccccatgctcgccccagagcatactttaatgtctttccggaaagcactggagcaaaagttgtacggactgcaggcggacattaccattagtctggacggagtacctttccttatgcatgacaccacactccggcggactacaaatgttgaggaggaattcccagagctggctagaagaccagcctccatgctcaattggaccaccctgcaacggctgaacgccggccaatggttcctaaagaccgaccccttttggacagccagcagcttgtcccccagcgaccacagggaagctcaaaaccagagcatatgcagcttagcggagctgcttgaactggcgaagggaaatgccacccttcttcttaacctgcgtgacccaccccgggagcacccatacaggtcctcattcatcaatgtaactctcgaagcggtgctgcacagtgggttccctcagcaccaggtgatgtggctgccctctagacagcgccccttagttaggaaggtggctccaggattccagcagacatcaggctccaaagaggccgttgcctccctgaggcgggggcatatccagcgactgaacctgagatatacacaggtatctagacaagagcttcgggattacgcatcatggaacctgagtgtaaacctctacaccgtcaacgcgccctggctttttagtctgctctggtgtgcgggagtaccctctgtgacgagcgacaactctcatgctctttctcaggtcccctcaccattgtggattatgccgcctgacgaatactgtttgatgtgggtcaccgccgacctggtgagctttactctaatagtcgggatatttgtccttcagaagtggaggttgggcggaattagaagctacaaccctgagcaaattatgctcagtgctgccgtccggcgcacttctagagatgtatcaattatgaaggaaaagttgatcttctccgagatttccgatggagtggaagtgagtgatgtgctcagcgtatgcagcgataacagctatgatacatatgctaacagcaccgccacacccgtggggcctagagggggtggaagtcacacgaaaactctcatcgagcgctcaggccggtag

SEQ ID NO: 220208 - DNA, 3523 bp, Artificial Sequence
  derived and/or modified sequence
cggggatgacagcggaggtggcagcggcgcggcgctgagcgagcggcgagggagcaggggaagaggaggaagtggagccgcggccgggagctcgggagtcggccgccgcgccgaggttcgccccgttttgcagagagagccgagtcgggacctggaaagacttccccgcggggctccggccgccgcgcctccccgccggcgcctgccctgccctgcccgtcccagccccgcggttcggggcgtgcggccgggacgcgcggagccccggccctgacccgctgcgccgggacgggacgctcctaacgccgccgtaccggtccgtggttgcagggtcgctccgcgcctttccgtcagtgagggtcggaaccccagctccagggctagcgcagtgtggccccaggccctcgcctccggtgcacgggaccccggacccccccagcctctggcttcacgagaccccaaccttcagttggaacagcttggaacagcgcgagcgcccgggaagccctggccgggtcgtgcgctcggtgaggggtcctaggcgggcaggacagtcggaccgaaccgccgggctggtgccgcgagcccaggctgtcaccttcgtcccgcctcaggtgaggggttcagcgcctgccccgaagataacacaggggtccccttctgtcccggcggcctgcgagagccaaggctgcagctctcccagtgaagtgatatcactgcctctgtggacaagacacctccaggagcccagctcacagccaccggtaccttcttccaggacaagctgggggcctccatgggcgcctgagggccaggcgccagggccgtgggcacgagtatggtgagacaccagcccctgcagtactacgagccacagctgtgcctctcctgcctcacgggcatctacggctgccgttggaagcgctaccagcgctcccatgatgataccacaccgtgggagcgcctctggttcctgctcctcaccttcacctttggcctcacgctcacctggctttacttctggtgggaagtccacaatgactatgatgaattcaactggtacctctacaaccgcatgggctactggagcgactggcccgtacccatccttgtgaccacagctgctgccttcgcatacatcgctggcctcctggtcctggcactatgtcacattgccgtggggcagcagatgaacctgcactggctgcacaagatcgggctggtggtcatcctggcttccacggtggtggccatgtcggccgtggcccagctgtgggaggacgagtgggaggtgctgctgatctccctgcagggcacagcgccattcctgcatgtgggggctgtggcagcagtcaccatgctctcctggatcgtggcaggacagttcgcccgcgcagagcggacctcctcccaggtgaccattctctgtaccttcttcaccgtggtgtttgccctctacctggcccctctcaccatctcctctccctgcatcatggagaagaaagacctcggccccaagcctgctctcattggccaccgcggggcccccatgctggctccagagcacacgctcatgtccttccggaaggccctcgagcagaagctgtacgggctccaggctgacattaccatcagcctggacggcgtgcccttcctcatgcatgacaccaccctgcggcgcaccaccaacgtggaggaggagttcccggagctggcccgcaggcctgcctccatgcttaactggaccaccctgcagagactcaacgctggccagtggttcctgaagactgaccccttctggacagccagctccctgtcaccctccgaccacagagaggcccagaaccagtccatctgcagcctggcagagctcctggagctggccaagggcaatgccacactgctgctcaacctgcgtgacccgccccgggagcacccctaccgcagcagttttatcaacgtgactctggaggccgtgctgcactccggcttcccccagcaccaggtcatgtggctgcctagcaggcagaggcccctggtgcggaaggtggctcccggcttccaacagacatcaggctccaaggaggcagtcgccagcctgcggagaggccacatccagcggctgaacctgcgctacactcaggtgtcccgccaggagctcagggactacgcgtcctggaacctgagtgtgaacctctacacagtcaacgcaccgtggctcttctccctgctgtggtgtgcgggggtcccatccgtcacctctgacaactcccacgccctgtcccaggtgccttcccccctctggatcatgcccccggacgagtactgtctcatgtgggtcactgccgacctggtctccttcaccctcatcgtgggcatcttcgtgctccagaagtggcgcctgggtggcatacggagctacaaccctgagcagatcatgctgagtgctgcggtgcgccggaccagccgggacgtcagcatcatgaaggagaagcttattttctcagagatcagcgatggtgtagaggtctccgatgtgctctccgtatgttcagacaacagttatgacacatatgccaacagcaccgccacccctgtgggcccccgagggggtggcagccacaccaagaccctcatagagcggagtgggcgttagctgaagacatgtctgtcccacctgtacctgacacagaagctggggagcctaggagagctggtggaagtgtgtctgaactcggagtgctctgggagcgggctccacagcctccttgtgggctccagccccttgtcagccgcagcctctcttgagggggactccctgtctcctgaggcccagctgggccaggactccatcctttcagatgcccctgcaggcctggggctccttctgggaagtatggggcctagggcttggtccccctcttctgaggccctctcctgtatcccgacctggaagctttgatgggtcatgggccatgccataccccctgtggcaatggagtgtgtggatgctcacctgtgccatctgtcctcctgtctgtgccaggaggcacctgagttctctgctgttatcctgccccaagggcctgggccgagcctctacctgaagcaactctgctcttcctgtcagtctcaaagcacaaggaggttcagcccaggaggaagccagctgcaatgtggagacacgtcctcctccccaacccacctcatgccaccgccaaccccctgccccaggagcgggcctgagccacgtcctctaggagcagctggagatggccaaaagagtgagctcaggactactggatcccatgcccaggtgtccagcagacctcaaggcagaagggtcacctaacccaggagtccacagactgatgtgacctcaggttcccacatcagtggccacagggcagggcccacctggtagaagtgttctggatatggccagggtgggtgtgtggctaagtgggcctgaacagagggaacctagggcccttggccaatgtgattaaagctgccatcttga

SEQ ID NO: 220209 - DNA, 3084 bp, Artificial Sequence
  derived and/or modified sequence
ggccgggagctcgggagtcggccgccgcgccgaggttcgccccgttttgcagagagagccgagtcgggacctggaaagacttccccgcggggctccggccgccgcgcctccccgccggcgcctgccctgccctgcccgtcccagccccgcggttcggggcgtgcggccgggacgcgcggagccccggccctgacccgctgcgccgggacgggacgctcctaacgccgccgtaccggtccgtggttgcagggtcgctccgcgcctttccgtcagtgagggtcggaaccccagctccagggctagcgcagtgtggccccaggccctcgcctccggtgcacgggaccccggacccccccagcctctggcttcacgagaccccaaccttcagttggaacagcttggaacagcgcgagcgcccgggaagccctggccgggtcgtgcgctcggtgaggggtcctaggcgggcaggacagtcggaccgaaccgccgggctggtgccgcgagcccaggctgtcaccttcgtcccgcctcaggtgaggggttcagcgcctgccccgaagataacacaggggtccccttctgtcccggcggcctgcgagagccaaggctgcagctctcccagtgaagtgatatcactgcctctgtggacaagacacctccaggagcccagctcacagccaccggtaccttcttccaggacaagctgggggcctccatgggcgcctgagggccaggcgccagggccgtgggcacgagtatggtgagacaccagcccctgcagtactacgagccacagctgtgcctctcctgcctcacgggcatctacggctgccgttggaagcgctaccagcgctcccatgatgataccacaccgggcacagcgccattcctgcatgtgggggctgtggcagcagtcaccatgctctcctggatcgtggcaggacagttcgcccgcgcagagcggacctcctcccaggtgaccattctctgtaccttcttcaccgtggtgtttgccctctacctggcccctctcaccatctcctctccctgcatcatggagaagaaagacctcggccccaagcctgctctcattggccaccgcggggcccccatgctggctccagagcacacgctcatgtccttccggaaggccctcgagcagaagctgtacgggctccaggctgacattaccatcagcctggacggcgtgcccttcctcatgcatgacaccaccctgcggcgcaccaccaacgtggaggaggagttcccggagctggcccgcaggcctgcctccatgcttaactggaccaccctgcagagactcaacgctggccagtggttcctgaagactgaccccttctggacagccagctccctgtcaccctccgaccacagagaggcccagaaccagtccatctgcagcctggcagagctcctggagctggccaagggcaatgccacactgctgctcaacctgcgtgacccgccccgggagcacccctaccgcagcagttttatcaacgtgactctggaggccgtgctgcactccggcttcccccagcaccaggtcatgtggctgcctagcaggcagaggcccctggtgcggaaggtggctcccggcttccaacagacatcaggctccaaggaggcagtcgccagcctgcggagaggccacatccagcggctgaacctgcgctacactcaggtgtcccgccaggagctcagggactacgcgtcctggaacctgagtgtgaacctctacacagtcaacgcaccgtggctcttctccctgctgtggtgtgcgggggtcccatccgtcacctctgacaactcccacgccctgtcccaggtgccttcccccctctggatcatgcccccggacgagtactgtctcatgtgggtcactgccgacctggtctccttcaccctcatcgtgggcatcttcgtgctccagaagtggcgcctgggtggcatacggagctacaaccctgagcagatcatgctgagtgctgcggtgcgccggaccagccgggacgtcagcatcatgaaggagaagcttattttctcagagatcagcgatggtgtagaggtctccgatgtgctctccgtatgttcagacaacagttatgacacatatgccaacagcaccgccacccctgtgggcccccgagggggtggcagccacaccaagaccctcatagagcggagtgggcgttagctgaagacatgtctgtcccacctgtacctgacacagaagctggggagcctaggagagctggtggaagtgtgtctgaactcggagtgctctgggagcgggctccacagcctccttgtgggctccagccccttgtcagccgcagcctctcttgagggggactccctgtctcctgaggcccagctgggccaggactccatcctttcagatgcccctgcaggcctggggctccttctgggaagtatggggcctagggcttggtccccctcttctgaggccctctcctgtatcccgacctggaagctttgatgggtcatgggccatgccataccccctgtggcaatggagtgtgtggatgctcacctgtgccatctgtcctcctgtctgtgccaggaggcacctgagttctctgctgttatcctgccccaagggcctgggccgagcctctacctgaagcaactctgctcttcctgtcagtctcaaagcacaaggaggttcagcccaggaggaagccagctgcaatgtggagacacgtcctcctccccaacccacctcatgccaccgccaaccccctgccccaggagcgggcctgagccacgtcctctaggagcagctggagatggccaaaagagtgagctcaggactactggatcccatgcccaggtgtccagcagacctcaaggcagaagggtcacctaacccaggagtccacagactgatgtgacctcaggttcccacatcagtggccacagggcagggcccacctggtagaagtgttctggatatggccagggtgggtgtgtggctaagtgggcctgaacagagggaacctagggcccttggccaatgtgattaaagctgccatcttg

SEQ ID NO: 220210 - DNA, 4150 bp, Artificial Sequence
  derived and/or modified sequence
tcacagctctggaaaggtccctggagaggatgtggaaagatccccagtaggtagcagagccaggattcgactgaagaccgtgattcaagtgaggctcttaaccctgggccagctgtctgccatttggactgcaaaacccagaggccagatacccctaagaggccagctgttgcacctctgcaaggcggggttccacctcctctcgggtcccggcacctaggccagactcatcgaatgaatgaaagactctgttgtatcccctgtacccaccatggctatcacaagccacagtcccatgaagacagagaacccaaggccactttctcagaggaggacggtgatctgtctctgggcctctagggtgggattcatccttctcagtcagatttcaggagcgatggtggttgcgtttttgggtgtcagtgctattgctataacttaatgatgcaaggtagggaagtcccacagacactgaacatgcagtgatgctgctgagtgtgttgattagcaccaaagcaactgtggaactcagagataataacatttttaattgtattagggtttggggaatcagttttattgcaagtcgtttccattaataggtattgtgatgagatgctcctggaaaccatccttaactcactgtgtgcagggccacctcccacgatggccacaagggggagctgcgcgccgggggcagccgggagaaggggcctgagtgccgagggcggggttctcaggggttcggaggcgcagctgggcctcccagagactgcgcagcctctctgacaccagcgtgctgtctgtccgagaaagcgcacacccccttaccccctgagatgggcagaaggtgttcgtttctggttctgccccttcaaagctccgtgacccagccagctgttcctctccccgaacctcgcttcccgtgtgtgagatgaggatgctcgtgcctccgcggaaccaacctggggaccacgcgaagcgcccccacaggcccaggctgatgggctggaatgaaaagcctccaaagggaaacttcatcccaggcgagactcagcattccccgccggcgagtgaaggtccctgggtagggagcggagatgctggccaccgccccaccctcatcgtctagaaatgccactgtccctgctcggcatcagagggccctggccgctgctgcctctgggaaaggttgcctcgggagaaagggggtgaaggccctgccagcagctagaacggctccagggaggcagggcggccggcagtgctgtgggagaaggacaggcctttggagggagatgggagacgagtctggagaaactagggggacggaggtggcggctttgactgacccttccagagactgggatctgcgggaggctttggaggagagccacaacctgggcttcggggaggcacgcctgggggtgtggaggggggtgggtggagtgagatccacggctaggggcgaggggctgggggccgaggagccgaaaacctctgccgagcttcacgtggttaaagatttcaggtcttacctgtcaccagagatctctgtcccgtagaggtgccacctcatcctccatgagagctgtgctttgctttcttctggaggctgcaaggaggatggcccccatcacggcggacctagatgctgggagtccgggagagggcaggccgtggagatggggcaggtggcgatgtgtttcaccacccactcccgcctgaagtgccactgtgagcccagcccagggtgccaggctgggctgcactccaggctcctgcagcagacccagttcctcagcctccttcccctgaggcctgggcatggcctggacaaatcgggctggtggtcatcctggcttccacggtggtggccatgtcggccgtggcccagctgtgggaggacgagtgggaggtgctgctgatctccctgcagggcacagcgccattcctgcatgtgggggctgtggcagcagtcaccatgctctcctggatcgtggcaggacagttcgcccgcgcagagcggacctcctcccaggtgaccattctctgtaccttcttcaccgtggtgtttgccctctacctggcccctctcaccatctcctctccctgcatcatggagaagaaagacctcggccccaagcctgctctcattggccaccgcggggcccccatgctggctccagagcacacgctcatgtccttccggaaggccctcgagcagaagctgtacgggctccaggctgacattaccatcagcctggacggcgtgcccttcctcatgcatgacaccaccctgcggcgcaccaccaacgtggaggaggagttcccggagctggcccgcaggcctgcctccatgcttaactggaccaccctgcagagactcaacgctggccagtggttcctgaagactgaccccttctggacagccagctccctgtcaccctccgaccacagagaggcccagaaccagtccatctgcagcctggcagagctcctggagctggccaagggcaatgccacactgctgctcaacctgcgtgacccgccccgggagcacccctaccgcagcagttttatcaacgtgactctggaggccgtgctgcactccggcttcccccagcaccaggtcatgtggctgcctagcaggcagaggcccctggtgcggaaggtggctcccggcttccaacagacatcaggctccaaggaggcagtcgccagcctgcggagaggccacatccagcggctgaacctgcgctacactcaggtgtcccgccaggagctcagggactacgcgtcctggaacctgagtgtgaacctctacacagtcaacgcaccgtggctcttctccctgctgtggtgtgcgggggtcccatccgtcacctctgacaactcccacgccctgtcccaggtgccttcccccctctggatcatgcccccggacgagtactgtctcatgtgggtcactgccgacctggtctccttcaccctcatcgtgggcatcttcgtgctccagaagtggcgcctgggtggcatacggagctacaaccctgagcagatcatgctgagtgctgcggtgcgccggaccagccgggacgtcagcatcatgaaggagaagcttattttctcagagatcagcgatggtgtagaggtctccgatgtgctctccgtatgttcagacaacagttatgacacatatgccaacagcaccgccacccctgtgggcccccgagggggtggcagccacaccaagaccctcatagagcggagtgggcgttagctgaagacatgtctgtcccacctgtacctgacacagaagctggggagcctaggagagctggtggaagtgtgtctgaactcggagtgctctgggagcgggctccacagcctccttgtgggctccagccccttgtcagccgcagcctctcttgagggggactccctgtctcctgaggcccagctgggccaggactccatcctttcagatgcccctgcaggcctggggctccttctgggaagtatggggcctagggcttggtccccctcttctgaggccctctcctgtatcccgacctggaagctttgatgggtcatgggccatgccataccccctgtggcaatggagtgtgtggatgctcacctgtgccatctgtcctcctgtctgtgccaggaggcacctgagttctctgctgttatcctgccccaagggcctgggccgagcctctacctgaagcaactctgctcttcctgtcagtctcaaagcacaaggaggttcagcccaggaggaagccagctgcaatgtggagacacgtcctcctccccaacccacctcatgccaccgccaaccccctgccccaggagcgggcctgagccacgtcctctaggagcagctggagatggccaaaagagtgagctcaggactactggatcccatgcccaggtgtccagcagacctcaaggcagaagggtcacctaacccaggagtccacagactgatgtgacctcaggttcccacatcagtggccacagggcagggcccacctggtagaagtgttctggatatggccagggtgggtgtgtggctaagtgggcctgaacagagggaacctagggcccttggccaatgtgattaaagctgccatcttga

SEQ ID NO: 220211 - DNA, 3222 bp, Artificial Sequence
  derived and/or modified sequence
ggctgctttagaagaacaagctggtttggcagctacctcagagaagcaggaccctgggcagcgtgaaagggcctctgcccccagggtggctgggctttggatcctggatccgtgggtcctggaggggcaggagtggttcaggaaacagctctcccagtgaagtgatatcactgcctctgtggacaagacacctccaggagcccagctcacagccaccggtaccttcttccagggctgctgttatagtttctgcatggaaagcacttggaacaatgcctggctgttcccctctttggccctctcagggccctaggagcctttgtgtgtcctgctcacattgtctccagggcctcggacagggcctggtacagaacatatgactgagtttctggagtcccacaggccagcgttggagtcctgacacctcagtatagctgtgcacctctgggcaaatagtttctctgctctgagccccaggacaagctgggggcctccatgggcgcctgagggccaggcgccagggccgtgggcacgagtatggtgagacaccagcccctgcagtactacgagccacagctgtgcctctcctgcctcacgggcatctacggctgccgttggaagcgctaccagcgctcccatgatgataccacaccgtgggagcgcctctggttcctgctcctcaccttcacctttggcctcacgctcacctggctttacttctggtgggaagtccacaatgactatgatgaattcaactggtacctctacaaccgcatgggctactggagcgactggcccgtacccatccttgtgaccacagctgctgccttcgcatacatcgctggcctcctggtcctggcactatgtcacattgccgtggggcagcagatgaacctgcactggctgcacaagatcgggctggtggtcatcctggcttccacggtggtggccatgtcggccgtggcccagctgtgggaggacgagtgggaggtgctgctgatctccctgcagggcacagcgccattcctgcatgtgggggctgtggcagcagtcaccatgctctcctggatcgtggcaggacagttcgcccgcgcagagcggacctcctcccaggtgaccattctctgtaccttcttcaccgtggtgtttgccctctacctggcccctctcaccatctcctctccctgcatcatggagaagaaagacctcggccccaagcctgctctcattggccaccgcggggcccccatgctggctccagagcacacgctcatgtccttccggaaggccctcgagcagaagctgtacgggctccaggctgacattaccatcagcctggacggcgtgcccttcctcatgcatgacaccaccctgcggcgcaccaccaacgtggaggaggagttcccggagctggcccgcaggcctgcctccatgcttaactggaccaccctgcagagactcaacgctggccagtggttcctgaagactgaccccttctggacagccagctccctgtcaccctccgaccacagagaggcccagaaccagtccatctgcagcctggcagagctcctggagctggccaagggcaatgccacactgctgctcaacctgcgtgacccgccccgggagcacccctaccgcagcagttttatcaacgtgactctggaggccgtgctgcactccggcttcccccagcaccaggtcatgtggctgcctagcaggcagaggcccctggtgcggaaggtggctcccggcttccaacagacatcaggctccaaggaggcagtcgccagcctgcggagaggccacatccagcggctgaacctgcgctacactcaggtgtcccgccaggagctcagggactacgcgtcctggaacctgagtgtgaacctctacacagtcaacgcaccgtggctcttctccctgctgtggtgtgcgggggtcccatccgtcacctctgacaactcccacgccctgtcccaggtgccttcccccctctggatcatgcccccggacgagtactgtctcatgtgggtcactgccgacctggtctccttcaccctcatcgtgggcatcttcgtgctccagaagtggcgcctgggtggcatacggagctacaaccctgagcagatcatgctgagtgctgcggtgcgccggaccagccgggacgtcagcatcatgaaggagaagcttattttctcagagatcagcgatggtgtagaggtctccgatgtgctctccgtatgttcagacaacagttatgacacatatgccaacagcaccgccacccctgtgggcccccgagggggtggcagccacaccaagaccctcatagagcggagtgggcgttagctgaagacatgtctgtcccacctgtacctgacacagaagctggggagcctaggagagctggtggaagtgtgtctgaactcggagtgctctgggagcgggctccacagcctccttgtgggctccagccccttgtcagccgcagcctctcttgagggggactccctgtctcctgaggcccagctgggccaggactccatcctttcagatgcccctgcaggcctggggctccttctgggaagtatggggcctagggcttggtccccctcttctgaggccctctcctgtatcccgacctggaagctttgatgggtcatgggccatgccataccccctgtggcaatggagtgtgtggatgctcacctgtgccatctgtcctcctgtctgtgccaggaggcacctgagttctctgctgttatcctgccccaagggcctgggccgagcctctacctgaagcaactctgctcttcctgtcagtctcaaagcacaaggaggttcagcccaggaggaagccagctgcaatgtggagacacgtcctcctccccaacccacctcatgccaccgccaaccccctgccccaggagcgggcctgagccacgtcctctaggagcagctggagatggccaaaagagtgagctcaggactactggatcccatgcccaggtgtccagcagacctcaaggcagaagggtcacctaacccaggagtccacagactgatgtgacctcaggttcccacatcagtggccacagggcagggcccacctggtagaagtgttctggatatggccagggtgggtgtgtggctaagtgggcctgaacagagggaacctagggcccttggccaatgtgattaaagctgccatcttga

SEQ ID NO: 220212 - DNA, 825 bp, Artificial Sequence
  derived and/or modified sequence
ttggaacagcgcgagcgcccgggaagccctggccgggtcgtgcgctcggtgaggggtcctaggcgggcaggacagtcggaccgaaccgccgggctggtgccgcgagcccaggctgtcaccttcgtcccgcctcaggtgaggggttcagcgcctgccccgaagataacacaggggtccccttctgtcccggcggcctgcgagagccaaggctgcagctctcccagtgaagtgatatcactgcctctgtggacaagacacctccaggagcccagctcacagccaccggtaccttcttccagggctgctgttatagtttctgcatggaaagcacttggaacaatgcctggctgttcccctctttggccctctcagggccctaggagcctttgtgtgtcctgctcacattgtctccagggcctcggacagggcctggtacagaacatatgactgagtttctggagtcccacaggccagcgttggagtcctgacacctcagtatagctgtgcacctctgggcaaatagtttctctgctctgagccccaggacaagctgggggcctccatgggcgcctgagggccaggcgccagggccgtgggcacgagtatggtgagacaccagcccctgcagtactacgagccacagctgtgcctctcctgcctcacgggcatctacggctgccgttggaagcgctaccagcgctcccatgatgataccacaccgtgggagcgcctctggttcctgctcctcaccttcacctttggcctcacgctcacctggctttacttctggtgggaagtccacaatgactatgatgaattcaactg

SEQ ID NO: 220213 - DNA, 2441 bp, Artificial Sequence
  derived and/or modified sequence
tggacaagacacctccaggagcccagctcacagccaccggtaccttcttccaggacaagctgggggcctccatgggcgcctgagggccaggcgccagggccgtgggcacgagtatggtgagacaccagcccctgcagtactacgagccacagctgtgcctctcctgcctcacgggcatctacggctgccgttggaagcgctaccagcgctcccatgatgataccacaccgggcacagcgccattcctgcatgtgggggctgtggcagcagtcaccatgctctcctggatcgtggcaggacagttcgcccgcgcagagcggacctcctcccaggtgaccattctctgtaccttcttcaccgtggtgtttgccctctacctggcccctctcaccatctcctctccctgcatcatggagaagaaagacctcggccccaagcctgctctcattggccaccgcggggcccccatgctggctccagagcacacgctcatgtccttccggaaggccctcgagcagaagctgtacgggctccaggctgacattaccatcagcctggacggcgtgcccttcctcatgcatgacaccaccctgcggcgcaccaccaacgtggaggaggagttcccggagctggcccgcaggcctgcctccatgcttaactggaccaccctgcagagactcaacgctggccagtggttcctgaagactgaccccttctggacagccagctccctgtcaccctccgaccacagagaggcccagaaccagtccatctgcagcctggcagagctcctggagctggccaagggcaatgccacactgctgctcaacctgcgtgacccgccccgggagcacccctaccgcagcagttttatcaacgtgactctggaggccgtgctgcactccggcttcccccagcaccaggtcatgtggctgcctagcaggcagaggcccctggtgcggaaggtggctcccggcttccaacagacatcaggctccaaggaggcagtcgccagcctgcggagaggccacatccagcggctgaacctgcgctacactcaggtgtcccgccaggagctcagggactacgcgtcctggaacctgagtgtgaacctctacacagtcaacgcaccgtggctcttctccctgctgtggtgtgcgggggtcccatccgtcacctctgacaactcccacgccctgtcccaggtgccttcccccctctggatcatgcccccggacgagtactgtctcatgtgggtcactgccgacctggtctccttcaccctcatcgtgggcatcttcgtgctccagaagtggcgcctgggtggcatacggagctacaaccctgagcagatcatgctgagtgctgcggtgcgccggaccagccgggacgtcagcatcatgaaggagaagcttattttctcagagatcagcgatggtgtagaggtctccgatgtgctctccgtatgttcagacaacagttatgacacatatgccaacagcaccgccacccctgtgggcccccgagggggtggcagccacaccaagaccctcatagagcggagtgggcgttagctgaagacatgtctgtcccacctgtacctgacacagaagctggggagcctaggagagctggtggaagtgtgtctgaactcggagtgctctgggagcgggctccacagcctccttgtgggctccagccccttgtcagccgcagcctctcttgagggggactccctgtctcctgaggcccagctgggccaggactccatcctttcagatgcccctgcaggcctggggctccttctgggaagtatggggcctagggcttggtccccctcttctgaggccctctcctgtatcccgacctggaagctttgatgggtcatgggccatgccataccccctgtggcaatggagtgtgtggatgctcacctgtgccatctgtcctcctgtctgtgccaggaggcacctgagttctctgctgttatcctgccccaagggcctgggccgagcctctacctgaagcaactctgctcttcctgtcagtctcaaagcacaaggaggttcagcccaggaggaagccagctgcaatgtggagacacgtcctcctccccaacccacctcatgccaccgccaaccccctgccccaggagcgggcctgagccacgtcctctaggagcagctggagatggccaaaagagtgagctcaggactactggatcccatgcccaggtgtccagcagacctcaaggcagaagggtcacctaacccaggagtccacagactgatgtgacctcaggttcccacatcagtggccacagggcagggcccacctggtagaagtgttctggatatggccagggtgggtgtgtggctaagtgggcctgaacagagggaacctagggcccttggccaatgtgattaaagctgccatcttga

SEQ ID NO: 220214 - DNA, 1818 bp, Artificial Sequence
  derived and/or modified sequence
atggtgcgccaccagcccctgcagtactatgagccccagctgtgcctgagctgcctgaccggcatctacggctgccgctggaagcgctaccagaggagccatgatgacaccaccccctgggagcggctgtggttcctgctgctgaccttcaccttcggcctgaccctgacctggctgtacttctggtgggaggtgcacaatgactatgatgagttcaactggtacctgtacaacaggatgggctactggagcgactggcctgtgcccatcctggtgaccacagctgctgcctttgcctacatcgccggcctgctggtgctggccctgtgccacatcgctgtgggccagcagatgaacctgcactggctgcacaagattggcctggtggtgatcctggccagcacagtggtggccatgtctgctgtggcccagctgtgggaggatgagtgggaggtgctgctgatcagcctgcagggcacagcccccttcctgcacgtgggcgctgtggccgctgtgaccatgctgtcctggatcgtggccggccagtttgcccgggcagagaggaccagcagccaggtgaccatcctgtgcaccttcttcaccgtggtgtttgccctgtacctggcccccctgaccatcagcagcccctgcatcatggagaagaaggacctgggccccaagccagccctgattggccacagaggagcccccatgctggcccctgagcacaccctgatgtccttcaggaaggccctggagcagaagctgtatggcctgcaggccgacatcaccatcagcctggatggagtgcccttcctgatgcatgacaccaccctgcggaggaccaccaacgtggaggaggagttccctgagctggcccggcggcctgcctccatgctgaactggaccaccctgcagaggctgaatgccggccagtggttcctgaagacagaccccttctggacagccagcagcctgagccccagcgaccaccgggaggcccagaaccagagcatctgcagcctggccgagctgctggagctggccaagggaaatgccaccctgctgctgaacctgcgggaccccccccgggagcacccctaccgcagcagcttcatcaacgtgaccctggaggccgtgctgcacagcggcttcccccagcaccaggtgatgtggctgcccagccggcagaggcccctggtgaggaaggtggcccctggcttccagcagaccagcggcagcaaggaggccgtggccagcctgcggcggggccacatccagaggctgaacctgcgctacacccaggtgtcccggcaggagctgcgggactatgcctcctggaacctgtctgtgaacctgtacacagtgaatgccccctggctgttcagcctgctgtggtgtgccggcgtgcccagcgtgaccagtgacaacagccacgccctgagccaggtgcccagccccctgtggatcatgcccccagatgagtactgcctgatgtgggtgacagctgacctggtgtccttcaccctgattgtgggcatctttgtgctgcagaagtggaggctgggcggcatccgcagctacaaccctgagcagatcatgctgtctgctgctgtgcggaggaccagcagagatgtgtccatcatgaaggagaagctgatcttcagcgagatcagtgatggagtggaggtgtctgatgtgctgtctgtgtgcagcgacaacagctatgacacctacgccaacagcacagccacccctgtgggcccccggggcggcggcagccacaccaagaccctcatcgagaggtctggaagatag

SEQ ID NO: 220215 - DNA, 1461 bp, Artificial Sequence
  derived and/or modified sequence
atggtgcgccaccagcccctgcagtactatgagccccagctgtgcctgagctgcctgaccggcatctacggctgccgctggaagcgctaccagaggagccatgatgacaccaccccaggcacagcccccttcctgcacgtgggcgctgtggccgctgtgaccatgctgtcctggatcgtggccggccagtttgcccgggcagagaggaccagcagccaggtgaccatcctgtgcaccttcttcaccgtggtgtttgccctgtacctggcccccctgaccatcagcagcccctgcatcatggagaagaaggacctgggccccaagccagccctgattggccacagaggagcccccatgctggcccctgagcacaccctgatgtccttcaggaaggccctggagcagaagctgtatggcctgcaggccgacatcaccatcagcctggatggagtgcccttcctgatgcatgacaccaccctgcggaggaccaccaacgtggaggaggagttccctgagctggcccggcggcctgcctccatgctgaactggaccaccctgcagaggctgaatgccggccagtggttcctgaagacagaccccttctggacagccagcagcctgagccccagcgaccaccgggaggcccagaaccagagcatctgcagcctggccgagctgctggagctggccaagggaaatgccaccctgctgctgaacctgcgggaccccccccgggagcacccctaccgcagcagcttcatcaacgtgaccctggaggccgtgctgcacagcggcttcccccagcaccaggtgatgtggctgcccagccggcagaggcccctggtgaggaaggtggcccctggcttccagcagaccagcggcagcaaggaggccgtggccagcctgcggcggggccacatccagaggctgaacctgcgctacacccaggtgtcccggcaggagctgcgggactatgcctcctggaacctgtctgtgaacctgtacacagtgaatgccccctggctgttcagcctgctgtggtgtgccggcgtgcccagcgtgaccagtgacaacagccacgccctgagccaggtgcccagccccctgtggatcatgcccccagatgagtactgcctgatgtgggtgacagctgacctggtgtccttcaccctcatcgtgggcatctttgtgctgcagaagtggaggctgggcggcatccgcagctacaaccctgagcagatcatgctgtctgctgctgtgcggaggaccagcagagatgtgtccatcatgaaggagaagctgatcttcagcgagatcagtgatggagtggaggtgtctgatgtgctgtctgtgtgcagcgacaacagctatgacacctacgccaacagcacagccacccctgtgggcccccggggcggcggcagccacaccaagaccctgattgaaagaagtggccgctag

SEQ ID NO: 220216 - DNA, 408 bp, Artificial Sequence
  derived and/or modified sequence
atggtgcgccaccagcccctgcagtactatgagccccagctgtgcctgagctgcctgaccggcatctacggctgccgctggaagcgctaccagaggagccatgatgacaccaccccctgggagcggctgtggttcctgctgctgaccttcaccttcggcctgaccctgacctggctgtacttctggtgggaggtgcacaatgactatgatgagttcaactggtacctgtacaacaggatgggctactggagcgactggcctgtgcccatcctggtgaccacagctgctgcctttgcctacatcgccggcctgctggtgctggccctgtgccacatcgctgtgggccagcagatgaacctgcactggctgcacaaggccagcagcggcctgcccctgagccccctgtag

SEQ ID NO: 220217 - DNA, 1404 bp, Artificial Sequence
  derived and/or modified sequence
atgtctgctgtggcccagctgtgggaggatgagtgggaggtgctgctgatcagcctgcagggcacagcccccttcctgcacgtgggcgctgtggccgctgtgaccatgctgtcctggatcgtggccggccagtttgcccgggcagagaggaccagcagccaggtgaccatcctgtgcaccttcttcaccgtggtgtttgccctgtacctggcccccctgaccatcagcagcccctgcatcatggagaagaaggacctgggccccaagccagccctgattggccacagaggagcccccatgctggcccctgagcacaccctgatgtccttcaggaaggccctggagcagaagctgtatggcctgcaggccgacatcaccatcagcctggatggagtgcccttcctgatgcatgacaccaccctgcggaggaccaccaacgtggaggaggagttccctgagctggcccggcggcctgcctccatgctgaactggaccaccctgcagaggctgaatgccggccagtggttcctgaagacagaccccttctggacagccagcagcctgagccccagcgaccaccgggaggcccagaaccagagcatctgcagcctggccgagctgctggagctggccaagggaaatgccaccctgctgctgaacctgcgggaccccccccgggagcacccctaccgcagcagcttcatcaacgtgaccctggaggccgtgctgcacagcggcttcccccagcaccaggtgatgtggctgcccagccggcagaggcccctggtgaggaaggtggcccctggcttccagcagaccagcggcagcaaggaggccgtggccagcctgcggcggggccacatccagaggctgaacctgcgctacacccaggtgtcccggcaggagctgcgggactatgcctcctggaacctgtctgtgaacctgtacacagtgaatgccccctggctgttcagcctgctgtggtgtgccggcgtgcccagcgtgaccagtgacaacagccacgccctgagccaggtgcccagccccctgtggatcatgcccccagatgagtactgcctgatgtgggtgacagctgacctggtgtccttcaccctgattgtgggcatctttgtgctgcagaagtggaggctgggcggcatccgcagctacaaccctgagcagatcatgctgtctgctgctgtgcggaggaccagcagagatgtgtccatcatgaaggagaagctgatcttcagcgagatcagtgatggagtggaggtgtctgatgtgctgtctgtgtgcagcgacaacagctatgacacctacgccaacagcacagccacccctgtgggcccccggggcggcggcagccacaccaagaccctcatcgagaggtctggaagatag

SEQ ID NO: 220218 - DNA, 222 bp, Artificial Sequence
  derived and/or modified sequence
atggtgcgccaccagcccctgcagtactatgagccccagctgtgcctgagctgcctgaccggcatctacggctgccgctggaagcgctaccagaggagccatgatgacaccaccccctgggagcggctgtggttcctgctgctgaccttcaccttcggcctgaccctgacctggctgtacttctggtgggaggtgcacaatgactatgatgagttcaactag

SEQ ID NO: 220219 - DNA, 1818 bp, Artificial Sequence
  derived and/or modified sequence
atggtgcggcaccagcccctgcagtactacgagccccagctgtgcctgagctgtctcacaggcatttatgggtgccggtggaaacgataccagcgatcccatgacgacactacgccttgggagagactctggtttctgctgctgacattcaccttcggtttgactctaacatggctgtacttctggtgggaagtgcacaatgattacgacgagttcaactggtatttgtacaaccgcatgggctactggagcgactggcctgttccaatactcgtgactactgctgccgcgttcgcctatattgccggccttctggtgctggcgctgtgtcacattgcggttggccagcaaatgaacctgcactggctgcacaagatcggcctcgtagttatcctcgctagcaccgtggttgccatgagcgccgtggcccagctctgggaagacgaatgggaagtcttgttgatatcactgcagggcaccgcgcccttccttcatgtgggcgcagttgccgcggtgacaatgctgtcctggatcgttgccggacagtttgcccgggctgagcgtacgtcctcccaagtcaccatactttgtaccttcttcactgtagtgtttgcactctatttagcgcccctgacaatttctagtccatgtattatggagaaaaaagacctgggccccaaacccgccctgatcggccataggggtgcaccgatgctcgctcccgagcatactctcatgagctttcggaaagctctggaacagaagctgtatggactgcaggctgacatcacgatatctctggatggggtcccattcctaatgcacgataccacactccgcaggacaactaacgtggaagaggagttcccagagctggcccgaaggcccgcgtcaatgctcaactggacaaccctgcagaggctgaatgcaggccagtggttccttaaaaccgaccccttctggaccgctagctcactttctcccagcgaccatagagaggctcagaaccagtccatctgctctcttgccgaactgttggagctcgctaaaggtaacgccaccttgcttctcaacttgagggatccacctagggagcatccatatcgatcttccttcatcaatgtaaccctggaggccgtccttcacagcggcttccctcagcaccaggtcatgtggctccccagtcggcaacgcccactggtgcgcaaagtggcccccgggttccaacagacctctggcagcaaggaggcagtggcatccttgcgccggggtcacatccagaggcttaatttaagatacacacaggtgagcagacaagaactcagagattacgcctcttggaatttgagcgttaacctctacacagtcaatgctccttggctgttcagccttttatggtgtgctggagttccgtctgtcacctcagacaatagccacgcgctttctcaagtacctagccccctctggattatgccacctgacgaatactgtttaatgtgggtgactgcagacctcgtaagtttcacattaatcgtggggatctttgtgctccagaagtggcgtttggggggcatacgctcctacaatcccgaacagatcatgttgagcgctgctgtgaggaggaccagtagagatgtatccattatgaaagaaaagctgattttctccgaaatctccgatggggtcgaagtctctgacgttctcagcgtgtgctctgacaacagttacgatacatatgcgaactccactgccactcctgtcggacctagaggtggaggcagtcacacaaaaaccctgattgagcgcagcggccgctag

SEQ ID NO: 220220 - DNA, 1461 bp, Artificial Sequence
  derived and/or modified sequence
atggtgcggcaccagcccctgcagtactacgagccccagctgtgcctgagctgcctgaccggaatctacggatgccggtggaaacgttatcagcgctctcacgacgacaccacccctggtaccgcacctttcctccacgtgggtgcagtcgcagcagtgactatgctgtcttggattgttgccggtcagtttgctcgggcggagcgtacatctagtcaggttactatcctatgtacctttttcacggtggtgttcgccttgtaccttgccccacttactatctcatctccgtgcatcatggagaaaaaggacctgggccccaagcccgctctgatcggacacagaggcgcccccatgctagcccctgaacacacacttatgtcattccggaaggctttggagcaaaaactgtatgggttacaagccgacattacaatttccctggacggggtccccttccttatgcacgacactacacttcggagaactacaaacgtggaggaggagtttcccgagctggctcgccgccctgcctcgatgctgaattggaccaccttacagcgcctgaatgccgggcagtggtttctgaaaacggatccgttctggaccgctagcagtttaagcccttctgaccatagagaagcccagaaccagtccatatgctcactggcagaactgctggaactagctaagggaaacgctactctgcttctcaatctaagggaccccccgcgcgagcatccctatcggtcctcttttattaatgtcaccctggaagctgtcttacactcaggttttccgcaacatcaggtcatgtggctgccttcaaggcagcggccactggtccggaaggtcgcacctggttttcaacagacttccggcagcaaggaggcagtcgcgtcactgaggcgtggacatattcagaggctgaatttgagatatactcaggtgtcacgccaagagcttagggattatgcatcctggaacctgtctgtgaacctgtacaccgtcaacgcaccttggctcttctcactgctgtggtgcgccggggttccctctgtgacaagcgataattctcatgccctctctcaggtgcccagccctctctggatcatgccacctgacgaatattgtctcatgtgggtaaccgccgatttagtgtcctttaccctcatcgtggggattttcgtgctccagaaatggcggcttggcgggattcggtcctataatcccgaacaaattatgttgtctgcagctgtgcgccgaacctctagggatgtgtccatcatgaaagaaaagctaattttcagtgaaatctcagatggcgttgaagtatcagacgttctaagtgtctgctctgataattcttacgacacatacgcaaattccacggcaacacccgtgggaccacggggcgggggctctcatacaaaaacattaattgagcgctctggcagatag

SEQ ID NO: 220221 - DNA, 408 bp, Artificial Sequence
  derived and/or modified sequence
atggtgcggcaccagcccctgcagtactacgagccccagctgtgcttgtcatgcctgactggcatctatgggtgcaggtggaaacgttatcagagaagccacgacgatacgactccatgggaacggttatggttcttactgttgactttcacattcggactgaccttgacatggctctatttttggtgggaggtgcataatgattatgatgaatttaattggtatctgtacaacagaatgggatactggtcagattggccagtgcccatactggtaaccactgcggcagccttcgcttacattgccggcttactcgtgctcgccctgtgtcatatcgctgtgggtcagcagatgaatttgcactggctccacaaggcctcttccggtctgcctctgtctcccctgtag

SEQ ID NO: 220222 - DNA, 1404 bp, Artificial Sequence
  derived and/or modified sequence
atgagcgccgtggcccagctgtgggaggacgagtgggaggtgctgctcataagcctccagggcaccgctccatttctgcacgtaggagccgtggcagccgtgaccatgctttcttggatcgtggccggccagttcgcccgggcagagaggacttcgagccaggtgaccatactttgcactttcttcactgtagtttttgccttgtaccttgcgccactgaccatctccagtccatgtataatggagaaaaaagatctagggcccaagccagctcttattggacataggggcgcgcccatgttagctcccgagcacactttaatgagcttcaggaaggcactggaacaaaaactgtacggcctgcaggccgatattacaataagcttggacggggtacccttccttatgcacgacaccaccttgcgcaggacaacgaatgtagaggaagagttcccagagctagccaggaggcccgccagcatgctgaattggactacactgcagcgtctcaatgcgggccagtggttcctgaagactgacccgttttggaccgcaagctctctgtcgccttctgatcatagagaagcacaaaatcagtccatctgttccctggccgagctgctcgaacttgcgaaagggaacgccacactgcttttgaatcttagagatcccccgcgggagcatccataccgttcatcgttcataaatgtcacattggaagcagtgcttcacagtggcttcccccaacatcaagtgatgtggctgcccagcagacagagaccactggtccggaaggtcgcccccggcttccagcagaccagtgggagtaaggaagctgtggcgtctttgcgtcggggccacatacagcgtctgaatctgagatatactcaggtgtcacgacaggagctgagagactatgcgtcttggaatctgagtgttaacctgtatacagtgaatgcaccatggctgtttagcttgctgtggtgtgctggagtaccgagcgtcaccagcgataattcgcacgcactctcccaagtgccaagcccactttggatcatgcctcccgatgagtactgtctcatgtgggtaactgcagacctcgttagtttcaccctaatcgtcggtatatttgtgctgcaaaaatggaggctgggaggcattcgctcttacaacccggaacaaatcatgctgagcgctgcagtacggcgtacctcgcgtgacgtgtcaatcatgaaggagaaactcattttctcagaaatttctgacggagtggaggtgagcgacgtgttaagcgtgtgttccgacaactcctacgacacctacgctaattctacagccacccctgtggggccccgcggcgggggctcccataccaaaacgctgatcgagcgaagtgggcggtag

SEQ ID NO: 220223 - DNA, 1818 bp, Artificial Sequence
  derived and/or modified sequence
atggtgcggcaccagcccctgcagtactacgagccccagctgtgcttgtcatgtctgactggaatctacgggtgcaggtggaaaaggtatcagcgcagccatgacgacacaaccccctgggagcggttgtggttccttctgttgacctttacgttcggcctcacgctcacctggctatatttttggtgggaggtgcacaacgattacgacgagttcaactggtatctctataaccgcatggggtattggtctgactggcctgttcctatcctcgttactacggccgccgcctttgcgtacatcgccgggctgttggtgctggcattgtgtcatatcgcagtgggccagcaaatgaatctccactggcttcataaaataggcctggtggtgatacttgcctccacagtggttgcaatgtccgccgtggctcaactgtgggaggacgagtgggaggtgctacttatttccctgcagggaacagcccctttcctccacgtcggcgccgtggccgccgtcacaatgctctcttggattgtggctggccagtttgcgcgcgcagagcgaacttcgagtcaggtgaccatactctgcacctttttcactgtggtgttcgccctctatctcgccccactcacaatcagtagtccatgcattatggagaagaaggatctggggccgaaacccgccctgataggccaccgaggagcgcctatgctcgccccagagcacacgctgatgtcttttaggaaagccttagagcagaaactctacggcttacaggctgatatcaccatctccctggacggcgtaccttttttgatgcatgatactaccctccggcggacgactaatgtggaagaagagtttccagaacttgcacgccgcccagccagcatgctcaattggactacactgcagaggctcaacgccggtcagtggttcttaaagacagacccattttggaccgcttccagcctgtccccatcagaccaccgagaggcccaaaatcagtctatttgcagcctcgccgaactccttgagttggccaagggaaatgcgaccctgttgctgaatctgcgcgaccctccccgcgaacatccttaccgaagctctttcattaacgtcactctggaggctgtgctgcatagtggattccctcagcaccaagtgatgtggctcccatcacgacagcgcccgctggtccggaaagtagctcctggtttccagcagacctccggctctaaggaggccgttgctagcctgcgacgtggacatatacaacgcttaaatttgcgatacactcaggtgtcacgacaggagctacgagactacgcctcttggaacctgtccgtgaatttgtacacagtgaatgctccttggctgtttagcttgctgtggtgtgccggcgtgcctagtgtcacatccgacaactctcacgccctcagccaggtcccaagcccgctgtggatcatgccaccagatgaatattgcctgatgtgggtcaccgccgatcttgtgagcttcacactgattgtcggaatttttgtgctgcagaaatggcgtctgggcggtatccgatcttataacccagagcaaataatgctgtcggctgccgttcggagaacttctagagatgtctccattatgaaggaaaaattgatcttcagcgagattagtgacggtgtcgaggtgagcgacgtattgtcagtatgctccgataactcttatgatacctacgcgaattcaacagcaactccagttggacctcggggcggcggaagtcatactaagaccctcatcgagagatctgggcgctag

SEQ ID NO: 220224 - DNA, 222 bp, Artificial Sequence
  derived and/or modified sequence
atggtgcggcaccagcccctgcagtactacgagccccagctgtgcctttcatgtctgaccggaatatatggttgtagatggaagcgttaccagaggtcccacgatgatactaccccctgggagcggctgtggtttctgctgctcactttcactttcggcctgacgctgacgtggctgtacttctggtgggaagttcacaacgactacgacgagttcaactag

SEQ ID NO: 220225 - DNA, 1461 bp, Artificial Sequence
  derived and/or modified sequence
atggtgcggcaccagcccctgcagtactacgagccccagctgtgcctgagctgccttaccggaatttacggctgcagatggaagcgctaccagaggagccacgatgacacgacgcccggcacagcccccttccttcacgtgggggcggtggccgcagtcacaatgctgtcgtggatcgtcgcaggccagttcgctcgcgcggagcgaacatcctcccaggtcactattttgtgtacattttttaccgtggtgttcgctctgtatctagctccccttaccatctcctcaccgtgcatcatggagaagaaagacttggggcccaaacctgccctgatcggacatcggggagcacctatgctggcccccgagcacacactcatgtctttccggaaggcgctagagcaaaagttatacggacttcaagccgacatcacgatttctcttgatggggttcctttcctcatgcatgatactacactcagaaggactacgaacgtggaggaagagtttcctgagctggcccgcaggcctgcctctatgctcaattggactacattgcagcgcctgaacgcgggccagtggttcttaaagaccgacccattttggactgcatctagtctttcccccagcgatcaccgtgaagcacaaaaccagagcatttgttctctagccgagctactggaactggccaaggggaacgccacactgctgcttaatctgagggaccccccacgagagcatccctatagatccagcttcatcaatgttactctagaggctgttcttcactcagggtttcctcaacatcaggtcatgtggctaccatcccgccaacgccccttagtgcgcaaggttgctcccggcttccaacagacaagtggatccaaagaggcagtcgcctctcttcggcgcggacacatccaaagacttaacctgcgttacacacaggtgagccggcaggagctcagagattatgcttcttggaacctatccgtcaatctctacacagtgaacgccccctggctgttcagtctgctgtggtgtgctggcgtgcccagcgtgacatcagacaactcacacgccctctctcaagttcccagcccgctctggatcatgcctccagacgagtactgtctcatgtgggttacagcggacttggtgtcattcacactgatcgtggggatattcgtgctccagaaatggcgactggggggcattagatcatacaaccctgagcaaatcatgctgtccgctgctgtgaggcggaccagccgggacgtcagcatcatgaaagagaagctcattttcagcgagatcagtgatggcgtcgaagtgtccgatgttctttctgtgtgttctgacaactcttacgatacttacgccaattcaaccgccacccccgtcggtccccgggggggaggatcacataccaagaccctgatcgaaagaagtggccgctag

SEQ ID NO: 220226 - DNA, 1818 bp, Artificial Sequence
  derived and/or modified sequence
atggtgcgacaccagcccctacagtactatgagccccaactgtgcctgtcatgcctgacaggcatttatggatgccgctggaagcgttaccaaagaagtcacgacgacacaaccccgtgggagcgcctgtggtttctccttctgacattcaccttcggcttgacccttacatggctgtatttctggtgggaggttcataatgattacgatgagttcaactggtatctttacaatcgcatgggctactggagcgattggcccgtcccaattctggtgaccaccgcagctgcctttgcttacattgcaggattgctggtcctggcgctctgccatatcgctgtggggcaacagatgaaccttcactggctgcataagataggattggttgtcattctggcatccacagttgtggctatgtcggcagtcgcacaactctgggaagatgagtgggaagtgctactgatttccctgcagggaaccgcccctttcctgcacgtcggagccgtagccgcagtcacaatgctctcgtggattgtggccggtcagtttgccagagccgagaggacatcgtctcaagttaccatcttgtgtacctttttcactgtcgtattcgcactgtatctggcgccactgactataagttctccttgtatcatggaaaaaaaagacctgggacctaagcccgctcttatcggacaccggggtgcacctatgctggcacccgagcacacactgatgtctttcagaaaggccttggagcagaagctttacggtctgcaggccgacatcaccattagcttggacggcgtgcctttcctcatgcacgatacaacattacgacgtaccaccaacgtggaagaggaattccctgaactcgccaggcgtcctgcctcaatgctcaactggacaacattacagagactgaacgctggtcagtggttcctgaagactgatccgttctggacagcctctagcctcagcccaagtgatcaccgagaggcacagaatcagtcgatttgtagcctcgctgagttgctggaacttgctaagggtaatgccactctgctgctaaatctccgcgacccaccccgtgagcatccatatagatcctcctttataaatgtcaccctggaagcggtcttgcactctgggttcccgcagcaccaggtaatgtggcttccttctagacagcgacccctggtcagaaaggtggctccgggttttcagcagacttcgggttccaaagaggcagtagcttctttgcgtagagggcatattcaaagacttaatcttcgctacacccaggtgagccgacaggagctgcgggactatgccagttggaacctttccgtcaacctgtacacagtcaacgctccgtggttgttcagtctgctatggtgtgcaggcgtgccaagcgtgacttcagacaactcccacgccctgtcacaggtaccttctccactttggatcatgcctcctgacgaatattgcttgatgtgggttacagcggaccttgttagcttcaccttaatagtcgggatctttgtcctgcagaagtggcgcctcgggggaatccggtcatacaatccagaacagattatgttatccgcagccgtccggcgtacttcgagggacgtgagtataatgaaagaaaagctcattttttccgagataagtgatggggttgaggttagcgatgttctgtcagtctgttctgataactcatatgatacctatgctaactcaacagctacccctgttggtccgaggggaggcggaagtcataccaagacactcattgagcgctccggacgatag

SEQ ID NO: 220227 - DNA, 1461 bp, Artificial Sequence
  derived and/or modified sequence
atggtcagacaccaacccctccagtattatgaacctcagttgtgcctatcgtgtctgacaggaatatacggatgccgttggaagcgttaccagcggtcacatgatgataccacccccggaacggcccctttcctgcacgttggagcggtcgccgctgtgactatgctaagctggatcgtggccggacagtttgcaagggctgagcgtacttccagtcaggtaactattctgtgtaccttttttacggtggtattcgcactgtatttagccccactcactatcagcagtccttgtataatggagaaaaaagacttgggaccgaagcctgcgctaatcggtcatagaggcgctcccatgttggctcctgagcacactctgatgtccttcagaaaagctctcgagcaaaaactgtacggcctccaggcagatatcacaatcagcctagacggcgtacctttcctaatgcatgacacaactcttaggagaacgactaatgtagaagaagagtttcctgaactggcccgtaggcctgcaagcatgctgaattggacaactctccagaggttaaacgcgggtcagtggtttctcaaaaccgatcctttctggactgcatcatcactgtccccctcggatcaccgggaggcgcagaaccagtctatatgctctctggctgaactcctggagctcgcgaaagggaacgccacactgctgcttaacctccgggaccccccacgtgagcatccatacaggtcatctttcataaatgtcacactagaggccgtactacactctgggtttccgcagcatcaagttatgtggctcccgtccaggcagagaccgcttgttcggaaagtggccccaggctttcagcagacatcagggagtaaagaggccgtcgcctctttgagacgaggacatatccaacggctcaacctcaggtacacccaagtgagccgccaggaactgagagactatgcgagttggaatctgtcagtcaacctctacactgtgaatgcaccatggctcttctctctgctctggtgcgccggagtacctagcgtgaccagtgacaattcacacgctttgtcccaggtgcccagccccctctggattatgccgccagacgagtattgcctgatgtgggttaccgccgaccttgtttccttcacacttatagtgggaatttttgtgcttcagaaatggagactggggggtattcggtcctacaatccagaacagataatgttgagcgccgctgttagacgtacaagtcgagacgtttctatcatgaaagaaaagctgatcttcagcgagatttcagatggagtagaggtatctgacgttctgagtgtgtgtagtgacaactcatatgacacctatgctaatagcactgccacccccgtcggccctcggggagggggttctcatactaagacactgattgagcggagcggcaggtag

SEQ ID NO: 220228 - DNA, 408 bp, Artificial Sequence
  derived and/or modified sequence
atggtgcggcaccagccgctgcagtactatgaacctcagctatgtctgtcttgtttgacaggaatttatggttgtaggtggaagaggtatcaacggagccacgatgatactacaccgtgggagcgactctggttcctgctgctgaccttcactttcggattaactctgacatggctgtacttttggtgggaggttcataatgattatgatgaatttaactggtacctctataaccggatgggttactggtctgactggccagttcccatcctagtgaccacagcagcagcattcgcctatattgcgggactgttggtgctcgccctctgccacatcgcagttggacagcagatgaatctacattggctgcacaaggcttccagcgggcttccactgtcgcccctctag

SEQ ID NO: 220229 - DNA, 1404 bp, Artificial Sequence
  derived and/or modified sequence
atgtcagccgtggcccagttatgggaggacgagtgggaagtgctgctcataagtttgcagggcaccgccccatttctgcatgtgggagcagttgcagccgtaacaatgctttcatggatcgtggccggacaatttgcgcgtgcagaacgaacaagttcccaggtaacgatcctgtgcacattctttactgtggtgtttgcactgtaccttgcccctcttactatatccagcccctgtatcatggagaagaaggacctgggcccaaaaccagcactcattggtcacaggggggcacccatgctggctcctgagcatacattgatgagcttcagaaaagcgctggaacaaaaactgtacggcttgcaggctgatataactatttccctggacggggtacccttcctaatgcacgataccactctacgtagaacaactaatgtggaggaggaattccctgagctggcaagacggcctgcaagcatgctaaactggaccacccttcagcggctgaatgccggtcagtggtttctcaaaactgatcccttttggacagcctctagcctttctccctccgaccacagggaggcacagaatcagtccatctgctcattagccgaactcctggaactggccaaaggaaacgctacgctgctgctaaacctcagggaccccccacgcgaacatccttatcgatcatcttttataaatgtgactctcgaggcagtgctgcactctggctttccacagcaccaggtgatgtggcttccctcccggcaacgcccattggtcagaaaggtggcccctggcttccaacagacgagcgggagtaaagaagcagtggctagcctgcgccgtggacatattcagcggcttaacctccggtacactcaagtgagcaggcaggaactcagggattatgcctcttggaacttaagcgtaaatctgtataccgtgaatgcgccttggttgttctctcttttgtggtgtgccggagtgccttctgtcacctccgataatagtcacgcactgagccaggtgcccagtcccctgtggattatgccacccgatgagtactgccttatgtgggtgaccgccgacctcgtttcattcaccctgatcgtgggaatcttcgtgctccagaagtggagactgggaggcattcgttcttacaatccagagcagattatgctgagtgctgctgtcaggagaaccagtcgggatgtgtcaattatgaaggaaaagctgattttttctgaaatttccgacggagttgaggtcagcgacgtgctgtcagtgtgctccgataacagttacgacacctacgccaattctactgctaccccggtaggacccagaggtggaggatctcacacgaaaaccctgatagagcgctctggcagatag

SEQ ID NO: 220230 - DNA, 1818 bp, Artificial Sequence
  derived and/or modified sequence
atggtccgccaccagcccttacagtactatgagcctcagttgtgtctgtcctgtctcaccggtatctatgggtgtaggtggaagcgctaccagcggtcgcacgatgacaccacgccctgggagagactgtggttccttctactgaccttcaccttcggactgaccctgacatggctctacttttggtgggaggtacacaatgattacgatgagttcaactggtacctgtacaacaggatgggttactggtccgattggccagtcccgatcttggtgaccaccgctgctgcttttgcctacatcgcagggttacttgtactcgccttatgccatattgcggttgggcagcaaatgaacctgcactggttgcacaagattgggcttgtggtgatcttggctagcactgtcgtcgctatgtctgccgttgctcagctttgggaagacgagtgggaggttctgctgatatcgcttcaaggtaccgcacctttcttacacgtcggcgctgtggcagccgtcactatgttgtcttggatcgtcgctggccagttcgccagggcggagaggacgagtagccaggtgacgatcctgtgtaccttcttcactgtggtcttcgccttatatttagcacctctgaccatctcgtccccttgtatcatggagaaaaaagatctcggacccaaacccgcactgattggtcatcgtggagctcccatgctcgcccctgaacacacactgatgagctttaggaaggctttagaacaaaagctttacggacttcaggcagatatcacaatttcgctggatggagtgccctttctcatgcatgacacgacattgcgtcgtaccacaaacgtagaagaagaattccccgagcttgcaagacgccctgccagcatgctgaattggaccactctccagcgcctaaatgcagggcagtggtttctgaagaccgatccattttggaccgcttccagcctgagcccgtccgatcaccgtgaggctcagaaccaatcaatttgtagtcttgctgagctgctggagttggctaagggaaatgccactctgttgctgaacctgagggaccctccgcgagagcatccctatcgcagctccttcattaatgtgacactggaagccgtgttacattctggcttcccccagcaccaggtgatgtggctccctagtagacagcggcctttggtgagaaaagtagcaccagggttccaacagacgtcaggcagcaaagaggcagtagcatcactccgcagaggtcacattcagaggctaaatctgcgctacacccaggtatctcggcaggaactgcgtgactacgcttcttggaacctgtcagtaaatctctacaccgtgaatgcaccctggctgttctctcttctctggtgcgccggagttccttcggtgactagcgacaatagccacgctctgtcacaggtccccagccccctatggataatgcctcccgatgagtattgcctgatgtgggtcaccgccgaccttgttagcttcaccttgattgtaggaatatttgtgttacagaagtggcggctgggtgggattcggtcatacaacccggagcagataatgctcagcgctgctgttagacggacttctagggatgtctccattatgaaggaaaaactcatcttctctgagatttccgatggcgttgaagtgagtgacgttctgtccgtgtgcagcgataactcatacgacacgtacgctaactctaccgctacacccgtaggacccagaggaggcggttcccacaccaagaccctaatcgagagatctggccgatag

SEQ ID NO: 220231 - DNA, 222 bp, Artificial Sequence
  derived and/or modified sequence
atggtgcggcatcagccattacaatattatgaaccccagctctgcttgtcgtgcctcacgggcatatatggatgtaggtggaaaaggtaccagcgaagccatgacgacaccaccccgtgggaacgattatggttcctgcttctcacgttcacctttggactgaccctgacgtggctctatttctggtgggaagttcataatgattatgatgagttcaactag

SEQ ID NO: 220232 - DNA, 1461 bp, Artificial Sequence
  derived and/or modified sequence
atggtacgtcatcagcctctccaatattacgagccccagttgtgtctttcatgcttaaccggtatatacggatgtcgctggaagcgttatcaaaggtcccacgacgacaccaccccaggcaccgccccttttttacacgtgggcgcagtcgcagccgtgacaatgctgtcctggatcgtagctggccagttcgcacgcgcagaacggacttcttcacaggtgacaattctttgcactttctttaccgttgtttttgccctttatctcgctcctctgacgatcagttccccatgcattatggagaaaaaggatctgggacctaaaccggctcttatcggccaccgtggcgcaccaatgctcgcccctgagcataccctgatgtcctttaggaaagctctggaacagaagctttacggcctgcaagcggacattactatctccctcgatggtgtaccctttctgatgcatgacacaaccttaagaagaactaccaatgttgaggaggagtttcccgagctcgcgcgacggccagcttctatgctgaattggactacattgcaacgattgaacgccggtcagtggtttttgaaaaccgatccattctggacagcgagctcactgtcgccatctgatcatcgcgaagcccagaaccagtccatctgctccctcgctgaactcctcgaattggccaagggtaacgcaaccttgctcctaaaccttcgagacccgccacgcgagcatccttatagaagcagctttataaatgtgaccctcgaagccgtactgcatagcggattcccccagcaccaggttatgtggctcccaagtcggcaaagacccctagttagaaaggtagcccctggctttcagcagacatctggaagcaaagaggcagtggcgtcactgagaagaggccatatccagcgactcaatttgagatacacccaggtgagtaggcaagaactccgggactacgcatcatggaatctctcggtgaacctttataccgtgaatgcaccttggctctttagtcttctctggtgtgccggagtcccttcagttacttcagacaattcgcacgctctttctcaggtcccctctcccctttggattatgcctcccgacgaatactgcctgatgtgggtaactgccgatctggtgtcctttactctgattgtggggatattcgtactccagaaatggcgtttggggggaatccggtcctataatccggagcagatcatgctcagcgcagctgtgagacggacgtctagagacgtgtctattatgaaggagaagttgatcttctctgaaatctcggatggggtagaagtctcggatgtcctgtcagtgtgcagtgacaactcttacgatacatatgcaaactcaacggccacccctgtaggccctcggggaggagggagtcacactaagacgctgattgagcggtccgggaggtag

SEQ ID NO: 220233 - DNA, 1818 bp, Artificial Sequence
  derived and/or modified sequence
atggtgagacaccagcccctgcagtactacgagccccagctgtgcctgagctgcctgaccggcatctacggctgcagatggaagagataccagagaagccacgacgacaccaccccctgggagagactgtggttcctgctgctgaccttcaccttcggcctgaccctgacctggctgtacttctggtgggaggtgcacaacgactacgacgagttcaactggtacctgtacaacagaatgggctactggagcgactggcccgtgcccatcctggtgaccaccgccgccgccttcgcctacatcgccggcctgctggtgctggccctgtgccacatcgccgtgggccagcagatgaacctgcactggctgcacaagatcggcctggtggtgatcctggccagcaccgtggtggccatgagcgccgtggcccagctgtgggaggacgagtgggaggtgctgctgatcagcctgcagggcaccgcccccttcctgcacgtgggcgccgtggccgccgtgaccatgctgagctggatcgtggccggccagttcgccagagccgagagaaccagcagccaggtgaccatcctgtgcaccttcttcaccgtggtgttcgccctgtacctggcccccctgaccatcagcagcccctgcatcatggagaagaaggacctgggccccaagcccgccctgatcggccacagaggcgcccccatgctggcccccgagcacaccctgatgagcttcagaaaggccctggagcagaagctgtacggcctgcaggccgacatcaccatcagcctggacggcgtgcccttcctgatgcacgacaccaccctgagaagaaccaccaacgtggaggaggagttccccgagctggccagaagacccgccagcatgctgaactggaccaccctgcagagactgaacgccggccagtggttcctgaagaccgaccccttctggaccgccagcagcctgagccccagcgaccacagagaggcccagaaccagagcatctgcagcctggccgagctgctggagctggccaagggcaacgccaccctgctgctgaacctgagagacccccccagagagcacccctacagaagcagcttcatcaacgtgaccctggaggccgtgctgcacagcggcttcccccagcaccaggtgatgtggctgcccagcagacagagacccctggtgagaaaggtggcccccggcttccagcagaccagcggcagcaaggaggccgtggccagcctgagaagaggccacatccagagactgaacctgagatacacccaggtgagcagacaggagctgagagactacgccagctggaacctgagcgtgaacctgtacaccgtgaacgccccctggctgttcagcctgctgtggtgcgccggcgtgcccagcgtgaccagcgacaacagccacgccctgagccaggtgcccagccccctgtggatcatgccccccgacgagtactgcctgatgtgggtgaccgccgacctggtgagcttcaccctgatcgtgggcatcttcgtgctgcagaagtggagactgggcggcatcagaagctacaaccccgagcagatcatgctgagcgccgccgtgagaagaaccagcagagacgtgagcatcatgaaggagaagctgatcttcagcgagatcagcgacggcgtggaggtgagcgacgtgctgagcgtgtgcagcgacaacagctacgacacctacgccaacagcaccgccacccccgtgggccccagaggcggcggcagccacaccaagaccctgatcgagagaagcggcagatag

SEQ ID NO: 220234 - DNA, 1461 bp, Artificial Sequence
  derived and/or modified sequence
atggtgagacaccagcccctgcagtactacgagccccagctgtgcctgagctgcctgaccggcatctacggctgcagatggaagagataccagagaagccacgacgacaccacccccggcaccgcccccttcctgcacgtgggcgccgtggccgccgtgaccatgctgagctggatcgtggccggccagttcgccagagccgagagaaccagcagccaggtgaccatcctgtgcaccttcttcaccgtggtgttcgccctgtacctggcccccctgaccatcagcagcccctgcatcatggagaagaaggacctgggccccaagcccgccctgatcggccacagaggcgcccccatgctggcccccgagcacaccctgatgagcttcagaaaggccctggagcagaagctgtacggcctgcaggccgacatcaccatcagcctggacggcgtgcccttcctgatgcacgacaccaccctgagaagaaccaccaacgtggaggaggagttccccgagctggccagaagacccgccagcatgctgaactggaccaccctgcagagactgaacgccggccagtggttcctgaagaccgaccccttctggaccgccagcagcctgagccccagcgaccacagagaggcccagaaccagagcatctgcagcctggccgagctgctggagctggccaagggcaacgccaccctgctgctgaacctgagagacccccccagagagcacccctacagaagcagcttcatcaacgtgaccctggaggccgtgctgcacagcggcttcccccagcaccaggtgatgtggctgcccagcagacagagacccctggtgagaaaggtggcccccggcttccagcagaccagcggcagcaaggaggccgtggccagcctgagaagaggccacatccagagactgaacctgagatacacccaggtgagcagacaggagctgagagactacgccagctggaacctgagcgtgaacctgtacaccgtgaacgccccctggctgttcagcctgctgtggtgcgccggcgtgcccagcgtgaccagcgacaacagccacgccctgagccaggtgcccagccccctgtggatcatgccccccgacgagtactgcctgatgtgggtgaccgccgacctggtgagcttcaccctgatcgtgggcatcttcgtgctgcagaagtggagactgggcggcatcagaagctacaaccccgagcagatcatgctgagcgccgccgtgagaagaaccagcagagacgtgagcatcatgaaggagaagctgatcttcagcgagatcagcgacggcgtggaggtgagcgacgtgctgagcgtgtgcagcgacaacagctacgacacctacgccaacagcaccgccacccccgtgggccccagaggcggcggcagccacaccaagaccctgatcgagagaagcggcagatag

SEQ ID NO: 220235 - DNA, 408 bp, Artificial Sequence
  derived and/or modified sequence
atggtgagacaccagcccctgcagtactacgagccccagctgtgcctgagctgcctgaccggcatctacggctgcagatggaagagataccagagaagccacgacgacaccaccccctgggagagactgtggttcctgctgctgaccttcaccttcggcctgaccctgacctggctgtacttctggtgggaggtgcacaacgactacgacgagttcaactggtacctgtacaacagaatgggctactggagcgactggcccgtgcccatcctggtgaccaccgccgccgccttcgcctacatcgccggcctgctggtgctggccctgtgccacatcgccgtgggccagcagatgaacctgcactggctgcacaaggccagcagcggcctgcccctgagccccctgtag

SEQ ID NO: 220236 - DNA, 1404 bp, Artificial Sequence
  derived and/or modified sequence
atgagcgccgtggcccagctgtgggaggacgagtgggaggtgctgctgatcagcctgcagggcaccgcccccttcctgcacgtgggcgccgtggccgccgtgaccatgctgagctggatcgtggccggccagttcgccagagccgagagaaccagcagccaggtgaccatcctgtgcaccttcttcaccgtggtgttcgccctgtacctggcccccctgaccatcagcagcccctgcatcatggagaagaaggacctgggccccaagcccgccctgatcggccacagaggcgcccccatgctggcccccgagcacaccctgatgagcttcagaaaggccctggagcagaagctgtacggcctgcaggccgacatcaccatcagcctggacggcgtgcccttcctgatgcacgacaccaccctgagaagaaccaccaacgtggaggaggagttccccgagctggccagaagacccgccagcatgctgaactggaccaccctgcagagactgaacgccggccagtggttcctgaagaccgaccccttctggaccgccagcagcctgagccccagcgaccacagagaggcccagaaccagagcatctgcagcctggccgagctgctggagctggccaagggcaacgccaccctgctgctgaacctgagagacccccccagagagcacccctacagaagcagcttcatcaacgtgaccctggaggccgtgctgcacagcggcttcccccagcaccaggtgatgtggctgcccagcagacagagacccctggtgagaaaggtggcccccggcttccagcagaccagcggcagcaaggaggccgtggccagcctgagaagaggccacatccagagactgaacctgagatacacccaggtgagcagacaggagctgagagactacgccagctggaacctgagcgtgaacctgtacaccgtgaacgccccctggctgttcagcctgctgtggtgcgccggcgtgcccagcgtgaccagcgacaacagccacgccctgagccaggtgcccagccccctgtggatcatgccccccgacgagtactgcctgatgtgggtgaccgccgacctggtgagcttcaccctgatcgtgggcatcttcgtgctgcagaagtggagactgggcggcatcagaagctacaaccccgagcagatcatgctgagcgccgccgtgagaagaaccagcagagacgtgagcatcatgaaggagaagctgatcttcagcgagatcagcgacggcgtggaggtgagcgacgtgctgagcgtgtgcagcgacaacagctacgacacctacgccaacagcaccgccacccccgtgggccccagaggcggcggcagccacaccaagaccctgatcgagagaagcggcagatag

SEQ ID NO: 220237 - DNA, 222 bp, Artificial Sequence
  derived and/or modified sequence
atggtgagacaccagcccctgcagtactacgagccccagctgtgcctgagctgcctgaccggcatctacggctgcagatggaagagataccagagaagccacgacgacaccaccccctgggagagactgtggttcctgctgctgaccttcaccttcggcctgaccctgacctggctgtacttctggtgggaggtgcacaacgactacgacgagttcaactag

SEQ ID NO: 220238 - protein, 1113 aa, Artificial Sequence
  derived and/or modified sequence
MGPRKKSVKTCIMNNEIPEEMTADETKDYMNQLSHEVLCHIFRYLPLQDIMCMECLSRKLKEAVTLYLRVVRVVDLCAGRWWEYMPSGFTDASFLTLLKKMPDVEQLYGLHPRYLERRRVRGHEAFSIPGVLEALQACPNLVGVETSHLELVESIWTYMPHVHILGKFRNRNGAFPIPPENKLKIPIGAKIQTLHLVGVNVPEIPCIPMLRHLYMKWVRLTKPQPFKDFLCISLRTFVMRNCAGPTNSLKYVPLVTGLASARNLEHLEMVRVPFLGGLIQHVVEDSWRSGGFRNLHTIVLGACKNALEVDLGYLIITAARRLHEVRIQPSLTKDGVFSALKMAELEFPQFETLHLGYVDEFLLQSRMANADLVKYGLADVVENPGIITDIGMKAVNEVFSCIKYLAIYNCPHLHNPYNWISDHSRWTRLVDINLVRCHALKLDSFGQFIELLPSLEFISLDQMFREPPKGCARVGLSAGTGIGVSSALVSNQNSNNDDNNAQNNNANIHDNNHHHPDDSDEENDFRQDLQPGEQQFAADALNEMEDIVQEDGEVVAESGNNTPAHSQAIIPVDVDEEQAGPSGLQRVVKPTSITVHDSESDDEEDSLELQEVWIPKNGTRRYSEREEKTGESVQSRELSVSGKGKTPLRKRYNSHQMGQSKQFPLEESSCEKGCQVTSEQIKADMKAARDIPEKKKNKDVYPSCSSTTASTVGNSSSHNTASQSPDFVRTVNSGGSSEPSPTEVDVSRQCACSPGGSEDSEAMEEGDAESSVCPRCCCHRPQESQRRTSRCSDEERPSTSRACVVNGPDEVAKTKPRHAMKRKRTADKSTSTSDPVIEDDHVQVLVLKSKNLVGVTMTNCGITDLVLKDCPKMMFIHATRCRVLKHLKVENAPIVNRFDYAQCKKLNMDQVLDQILRMPPERNRIIYLRPMQQVDTLTLEQKLFSGPYPYHICIIHEFSNPPNVRNKVRIRSWMDTIANINQELIKYEFFPEATRSEEDLKKYPKYPWGREIYTLEGVVDGAPYSMISDFPWLRSLRAAEPNSFARYDFEDDEESTIYAPRRKGQLSADICMETIGEEISEMRQMKKGVFQRVVAIFIHYCDVNGEPVEDDYI

SEQ ID NO: 220239 - DNA, 4132 bp, Artificial Sequence
  derived and/or modified sequence
ccctctcaaccacaataacaggcggagggtcggcgtaggtactttgaactcaagtaaacaaaagggaagattttctcgttgatactggagactgcacaacaatggggccacgaaagaaaagtgtgaaaacatgtatcatgaataatgaaattccagaagaaatgacagcagatgaaacaaaggactatatgaatcaactttcacatgaagtactttgccatatttttaggtacctccctctgcaggatatcatgtgtatggaatgtctttcccggaagctaaaggaagcagtgaccctatatctgcgagttgtgagagttgtagatctctgtgcagggcggtggtgggaatacatgccaagtggctttacagatgccagttttctaacactattaaagaagatgccagatgttgaacagctatatggccttcaccctcgataccttgagaggcgaagagtaaggggccatgaggcttttagcattccaggagtcctagaagctttgcaggcatgcccaaacttagtgggtgtggaaacttctcatttggagttggtagaatccatttggacatatatgccccatgttcatattttggggaaatttcgtaatcgtaatggagcttttccaattcctcctgaaaataaactgaaaattcctataggagccaaaattcaaactttacatttagttggggtgaatgttcctgaaattccttgtatcccaatgctaaggcacctttatatgaagtgggtaagactcactaaaccacagccatttaaagacttcctttgtatcagcttaagaactttcgtcatgaggaactgtgcaggacccacaaattccttgaaatatgtccctttagtaacaggcttagcctctgcccgaaacttggaacacttagaaatggttcgagttcctttccttggaggtcttatccaacatgttgttgaagacagttggagatcaggtggttttagaaatttgcacactattgttctgggagcttgcaaaaatgctcttgaagtagatcttggttacctcatcattactgctgcccgtaggttacatgaagttcggatccagccttccctaaccaaagatggtgtcttttctgccctaaagatggcagagttggagtttccccagtttgaaacccttcatctaggatatgtagatgagtttttgctacagagcagaatggctaatgcggatctggtgaagtatggtttggctgatgtggtagaaaatcctggtatcatcactgatatagggatgaaagcagtcaatgaagttttttcctgtatcaaatatctggcaatttacaattgccctcatctacacaacccatacaattggatctcagaccactcaagatggactcgattggttgatatcaacctagtacggtgccatgctttgaagctggactcttttggccagtttattgaattattacccagcctagagtttatttcactggatcagatgtttcgtgaaccacccaagggttgtgctcgagttggtctgagtgcaggcacaggaattggtgtttcatcagctcttgttagcaaccagaactccaacaatgacgataataatgcccagaataacaatgccaacatccacgacaacaatcaccatcatccagatgactcagacgaggagaatgactttcggcaagatctgcagccaggagagcagcagtttgcagctgacgcattaaatgagatggaagacatcgtccaagaagatggagaggtggtggccgagagtggaaataatactccagctcacagccaggcaattattcctgtggatgttgatgaggaacaagcaggacccagtggtcttcagcgtgtagtaaaaccaacctcaattactgttcatgattcagagagtgatgatgaagaagatagtctagaactccaagaagtctggattcctaagaacggtactcggcgttactctgaacgtgaagaaaaaactggagagtcagtgcagtccagagaattgtcagtaagtggaaaaggcaagactccacttcgaaagaggtacaactcccatcagatgggccagtcgaagcagtttcccctcgaggaaagcagctgtgagaaaggctgtcaggtcaccagtgagcagatcaaagccgatatgaaagcagctagggatattcctgaaaagaaaaaaaacaaggatgtttatcccagctgcagcagcaccaccgccagcacagtgggaaactccagctcacacaacactgcttctcaaagccccgactttgtaaggacggtgaacagcggcggctcttccgagcctagccctacagaagtggatgtgtccaggcagtgtgcctgctcccccggtgggtcagaggactctgaggccatggaggagggagatgcagagagttctgtctgccccagatgctgctgtcacaggccccaggaatcccaaaggagaactagcaggtgttctgatgaggaacgtccttcaaccagccgagcctgtgttgtgaatggcccggatgaagtagccaaaacaaagccacgtcacgccatgaaacggaagcggacagcagataaatccactagtacaagtgatcctgtgatcgaggatgaccatgtgcaggttcttgtattaaaatccaagaatcttgttggagtcactatgaccaattgtggaatcacagatctagtgctaaaagactgtccaaagatgatgttcatccatgctaccaggtgcagggtactaaaacatttaaaggtagaaaatgcaccaattgtaaaccgatttgactatgcacagtgcaagaaactgaacatggatcaggtactagaccagatactaagaatgccacccgagagaaaccgcatcatatacctacgcccaatgcagcaggtggacactctaactttggagcagaagctatttagtggtccctacccctatcacatctgtattatccatgaattcagtaaccctcccaatgtccggaataaggtgcgcattcgcagctggatggacactatagcaaacatcaatcaagagctcattaaatatgaattcttccctgaagccactcgaagtgaagaagacttaaagaaataccccaagtacccctgggggagagaaatctatactttagaaggtgttgtggatggagctccatattccatgatttctgacttcccttggctgaggtcattacgagctgcagagcccaacagcttcgctcgatacgactttgaagacgatgaagaaagcactatctatgctcctagaaggaaaggacagctgtctgcagacatctgtatggaaacaataggagaggaaatttcagagatgcgtcagatgaagaagggtgtatttcagcgagtagtggcaatttttatccactattgtgatgtcaatggagagccagttgaagatgactacatttaattggtccctcctcctttccagctattttgtcagaaagcaagtagggccatccagctgccagagtgctccacagggacttgaggcatgcagttgggaggtcctggctcggtttgctatatagggaatatataaggaacatcgaaattgtatacaaagatttgtacataaaaaatatacaaagacgcttcctaaagtaccaactttatatcatatgtttatacaatttaatttaaaaattcattttaaggaagacagataatttgaaagacttttgtttttcttgacttaattcatgaagtatcattttttgactgagtctccatttacttcattcttaatgattattgtcatccctttaaatctgtgcctttttcttcttgagcgaagctgtttgagtaaacctgttgaagagtgtttgtgtcttttgtgcttttttgttgttattaaaacaccaactaaaccttatagtcaagacaaggctctatgtttctgtacaaagctgtagttctttcttagtattatagttgccatgtttcttaaaatcaagtaaaaagacttatgagcttaaaaaaaagtgagtttgagagggaaatggaaaagtttccagagtatttctagtaatttatttccacattgaattgtgtatatgctttatcttgaatataaaataaaagtttattaaaaacttt

SEQ ID NO: 220240 - DNA, 3342 bp, Artificial Sequence
  derived and/or modified sequence
atggggccaagaaaaaagtccgttaagacatgcatcatgaataacgaaatccccgaggagatgactgccgacgaaacaaaagactacatgaaccagttgtctcatgaagtattgtgtcacatctttcgttaccttcccctacaggatatcatgtgcatggaatgtctttcacggaaactcaaagaagccgtgacattgtatctccgggtcgtgagggtagtcgatctatgtgctggaaggtggtgggaatatatgccctccggtttcacagacgccagctttctgacactgttgaaaaagatgcccgacgtggaacaactatatggtctgcatcccagatacctggagcgtaggcgagtacggggacacgaggctttttcaattccaggcgtgttggaggccctccaggcgtgtccgaatctcgttggtgtggaaacgagccacctagagctagttgagagcatttggacgtacatgccacacgtgcacatcttaggcaaattccgtaatagaaacggtgccttccccattcctccagaaaacaagctcaagatccctataggcgcaaagattcagactctccacctggtgggagtgaatgtcccagaaatcccctgcatccccatgctgcgtcacctgtacatgaagtgggttagacttacaaagccccaaccgttcaaggacttcttgtgtatcagcttacgcacattcgtgatgcggaattgcgctgggccaacaaacagtttgaaatatgtacccttagtgacaggcctcgccagtgccagaaacttggaacatctggaaatggttagagtgccttttcttggaggccttatccaacacgttgtggaggactcttggagatctggcggcttccgaaacctgcacacaatcgtgcttggggcctgcaaaaacgctctggaggttgacttggggtacctgatcatcacggccgcgcgccgtctccacgaagtgagaattcagccgagtctgacaaaagacggtgtgttcagcgcactcaaaatggctgaactggagttcccccagttcgaaacccttcacttaggttatgtagacgaattcctcttacagtctcggatggccaacgcagacctcgtcaaatacggactagccgacgtggtggagaatccagggattatcaccgatattgggatgaaggccgtgaacgaggtgttctcttgcataaagtacctggcaatttacaattgcccacacctccataacccatataattggatctctgaccactcgagatggacgaggctggtggatatcaacctagtgcgttgccacgccctcaagctcgatagcttcggtcagttcatcgagctcctgcctagtcttgagtttataagtctcgatcagatgtttcgggagccccccaaagggtgcgcaagggtgggtttgtcggcaggtactgggattggagtcagctctgctctggtttctaatcaaaattctaataacgacgacaataacgcgcaaaataacaacgccaacattcatgataacaaccaccatcaccccgacgacagcgacgaagagaatgacttccggcaggatttgcagccaggcgagcagcagtttgccgctgacgcactgaatgaaatggaggatattgttcaggaggacggcgaggtggttgctgaaagtgggaacaatactcctgcccattcccaggccatcatccccgttgacgtggatgaagagcaggcagggcctagtggactgcagcgcgtcgtgaaacctacttccattactgtccatgattctgaatctgatgatgaggaggactcactggagctgcaggaagtctggattcctaagaatggaactcgccggtattccgagagggaggaaaagacaggggagtccgttcaaagtcgggagctgtctgtaagcggcaaggggaagacacccctcagaaagcggtataactctcaccagatggggcaaagtaagcagtttcctctggaggaaagcagctgtgagaaagggtgccaggtaacaagcgagcagattaaagccgacatgaaagcagccagagacatcccagaaaaaaaaaaaaacaaagatgtgtacccaagctgttcatcaacaactgctagtactgtagggaactcctcttcccacaacacagctagccaatctcctgactttgtgcggacggtgaatagtggagggtcatctgaacccagccccaccgaagtggacgtttcgcgccaatgcgcgtgcagcccgggcggtagcgaggattcagaagccatggaagagggagacgctgagtcctcagtctgtccacggtgctgctgtcacaggccgcaggagagccagaggagaacatctagatgcagtgacgaggaacgcccatcgacatccagggcctgcgtcgtaaatgggcctgatgaggtggcaaagacaaagcccagacacgctatgaaacgcaagagaaccgcagacaaatctacctcaacctccgaccctgtgatagaggacgaccacgtgcaggttctcgtgctcaagtcaaaaaacctggtgggcgtgactatgacaaattgtgggatcacagatttggtgctcaaagactgtcctaaaatgatgttcattcatgccactcggtgtcgcgttctgaagcacctgaaggtggagaacgcccctatcgtgaaccgatttgactatgcccaatgcaaaaagcttaacatggatcaggtcttagatcaaattttgcgcatgcctcctgaaagaaaccgtataatctacctccggccaatgcaacaggttgatacactgacccttgagcaaaagctgttttccggcccctacccatatcacatttgtatcatacacgagttttctaaccctcctaatgtccgcaataaagtaagaatccggagttggatggacactattgcaaacatcaaccaggagctgatcaagtatgagttcttcccggaggctacacgttccgaggaggacctcaagaagtaccccaaatacccatggggacgggagatctacaccctggagggcgtggtggatggagccccctatagcatgatcagtgatttcccatggctccgcagccttagggccgccgagccaaactcctttgcacgatatgactttgaagatgatgaggagtccaccatctatgccccgagaagaaagggtcagttgtccgctgacatctgtatggaaactataggtgaggagattagcgaaatgcgacagatgaaaaagggcgttttccagcgagtggtggctattttcatccattattgtgatgttaacggagagccagtagaggatgactatatttag

SEQ ID NO: 220241 - DNA, 3342 bp, Artificial Sequence
  derived and/or modified sequence
atgggccccaggaagaagtctgtgaagacctgcatcatgaacaatgagatccctgaggagatgacagcagatgagaccaaggactacatgaaccagctgagccatgaggtgctgtgccacatcttccgctacctgcccctgcaggacatcatgtgcatggagtgcctgagcaggaagctgaaggaggccgtgaccctgtacctgcgggtggtgcgggtggtggacctgtgtgccggccgctggtgggagtacatgcccagcggcttcacagatgccagcttcctgaccctgctgaagaagatgccagatgtggagcagctgtatggcctgcacccccgctacctggagcggcggcgggtgcggggccacgaggccttcagcatccctggggtgctggaggccctgcaggcctgccccaacctggtgggcgtggagaccagccacctggagctggtggagagcatctggacctacatgcctcatgtgcacatcctgggcaagttcaggaacagaaatggagccttccccatccccccagagaacaagctgaagatccccatcggggccaagatccagaccctgcacctggtgggcgtgaatgtgcctgagatcccctgcatccccatgctgcggcacctgtacatgaagtgggtgcggctgaccaagccccagcccttcaaggacttcctgtgcatcagcctgcggacctttgtgatgaggaactgtgccggccccaccaacagcctgaagtatgtgcccctggtgacaggcctggccagcgccaggaacctggagcacctggagatggtgcgggtgcccttcctgggcggcctcatccagcacgtggtggaggacagctggaggtctgggggcttcaggaacctgcacaccatcgtgctgggcgcctgcaagaatgccctggaggtggacctgggctacctgatcatcacagctgcccggcggctgcacgaggtgcgcatccagcccagcctgaccaaggatggagtcttcagcgccctgaagatggccgagctggagttcccccagtttgagaccctgcacctgggctacgtggatgagttcctgctgcagagcaggatggccaatgctgacctggtgaagtatggcctggctgatgtggtggagaaccctggcatcatcacagacatcggcatgaaggctgtgaatgaggtgttcagctgcatcaagtacctggccatctacaactgcccccacctgcacaacccctacaactggatcagtgaccacagccgctggacccggctggtggacatcaacctggtgcgctgccacgccctgaagctggacagctttggccagttcatcgagctgctgcccagcctggagttcatcagcctggaccagatgttccgggagccccccaagggctgtgcccgggtgggcctgtctgctggcaccggcatcggcgtgagcagcgccctggtgagcaaccagaacagcaacaatgatgacaacaatgcccagaacaacaatgccaacatccatgacaacaaccaccaccacccagatgacagtgatgaggagaatgacttccggcaggacctgcagcctggagagcagcagtttgctgctgatgccctgaatgagatggaggacatcgtgcaggaggatggagaggtggtggccgagagcggcaacaacaccccagcccacagccaggccatcatccctgtggatgtggatgaggagcaggccggccccagcggcctgcagagggtggtgaagcccaccagcatcaccgtgcatgacagcgagagtgatgatgaggaggacagcctggagctgcaggaggtgtggatccccaagaatggcacccggcgctacagcgagcgggaggagaagacaggagagagcgtgcagagccgggagctgtctgtgtctgggaagggcaagacccccctgaggaagcgctacaacagccaccagatgggccagagcaagcagttccccctggaggagagcagctgtgagaagggctgccaggtgaccagcgagcagatcaaggctgacatgaaggccgcccgggacatccctgagaagaagaagaacaaggatgtgtaccccagctgcagcagcaccacagccagcacagtgggcaacagcagcagccacaacacagccagccagagcccagactttgtgaggacagtgaacagcggcggcagcagcgagcccagccccacagaggtggatgtgtcccggcagtgtgcctgcagccctgggggcagcgaggacagcgaggccatggaggagggagatgctgagagctctgtgtgcccccgctgctgctgccaccggccccaggagagccagaggaggaccagccgctgcagtgatgaggagcggcccagcaccagccgggcctgtgtggtgaatggaccagatgaggtggccaagaccaagcccaggcatgccatgaagaggaagaggacagctgacaagagcaccagcaccagtgaccctgtgattgaagatgaccacgtgcaggtgctggtgctgaagagcaagaacctggtgggcgtgaccatgaccaactgtggcatcacagacctggtgctgaaggactgccccaagatgatgttcatccacgccacccgctgccgggtgctgaagcacctgaaggtggagaatgcccccatcgtgaacagatttgattatgcccagtgcaagaagctgaacatggaccaggtgctggaccagatcctgaggatgcctcctgagaggaaccgcatcatctacctgcggcccatgcagcaggtggacaccctgaccctggagcagaagctgttcagcggcccctacccctaccacatctgcatcatccacgagttcagcaaccccccaaatgtgaggaacaaggtgcgcatccgctcctggatggacaccatcgccaacatcaaccaggagctgatcaagtatgagttcttccctgaggccaccaggtctgaggaggacctgaagaagtaccccaagtacccctggggccgggagatctacaccctggagggcgtggtggatggagccccctacagcatgatcagtgacttcccctggctgcggagcctgcgggctgctgagcccaacagctttgcccgctatgactttgaagatgatgaggagagcaccatctatgcccccaggaggaagggccagctgtctgctgacatctgcatggagaccatcggggaggagatcagcgagatgaggcagatgaagaagggcgtcttccagagggtggtggccatcttcatccactactgtgatgtgaatggagagcctgtggaggatgactacatctag

SEQ ID NO: 220242 - DNA, 3342 bp, Artificial Sequence
  derived and/or modified sequence
atgggcccccggaagaagagcgtgaagacctgcatcatgaacaacgagattcccgaggaaatgactgcagatgaaaccaaagactatatgaatcagctctcccatgaggtcttgtgtcacatctttcgctacctgcccctgcaagacataatgtgcatggaatgtttgagtaggaagttgaaggaagccgtaactctgtacctcagggtcgtgcgtgtggtcgatctgtgcgccggtcgctggtgggaatacatgccttccggtttcacggatgcctcctttcttacccttcttaagaaaatgcctgacgtcgagcaactgtacggtcttcacccccggtatctcgagagaaggagggtcagaggacacgaagcctttagcatccctggtgtcctagaggccctgcaggcttgccctaacttggtgggcgtggagacgagtcacttagagctggtcgaaagcatttggacttacatgccccacgttcatatcctcggaaagtttcgtaaccggaatggcgcttttcccatccctcctgagaataaacttaagatcccaattggcgcaaagattcaaacactgcacctcgtcggcgtgaatgtgcccgagattccttgtatcccgatgttgcgacacctgtacatgaaatgggtgagattaacaaaacctcagccatttaaagatttcttgtgtattagtctgagaacttttgtgatgcgaaattgcgccgggccaaccaatagtcttaagtacgtacctctcgtcactgggttggctagcgccagaaacctggagcaccttgagatggtgagagtgccctttctggggggactcatccagcacgtggtcgaagattcatggcgtagcggcgggttcaggaacctgcatacaatcgttcttggagcatgtaagaatgccctggaggtggatttaggctatctcattatcaccgctgctcggcgtctacacgaagtcagaatccaaccaagcttaaccaaggacggtgtcttttcagccttgaagatggcagagctggagttcccgcagttcgagacccttcacctgggatacgtggacgaattcctacttcagtccagaatggcaaacgcggaccttgtgaagtacggcttggcagatgtggttgaaaaccctgggatcattactgatataggtatgaaggctgtgaatgaagtgttctcctgtattaagtacctggcgatctacaattgtccccatttgcataacccgtataattggatctcagaccacagtcgttggaccaggctggttgatatcaatctcgttcgttgccatgccctgaaactggactcatttggacaatttatagagctgctccctagcctggaattcatctcacttgaccagatgtttcgggaacctcccaagggatgcgctcgcgttggattgtctgcaggtacaggcattggcgtgtcatcagcgcttgtgagcaaccagaattccaataacgatgacaacaacgcgcagaacaataatgcaaacatccatgacaataatcatcaccaccctgacgatagcgacgaggagaacgattttagacaggacttgcagccaggggaacagcagttcgccgcagacgctttgaatgagatggaggacatagtgcaggaggatggcgaggtggtggctgaatccggcaataacaccccagctcactctcaagcaatcataccagttgacgtcgatgaagagcaggccggcccgagcggtctacagcgggtggtgaagccaacttcgattacagtgcatgactcggaaagcgacgacgaagaagattccctggagctccaagaggtgtggattcctaagaacggcactagaaggtacagcgagagagaggagaaaactggggaatcagtccagagcagagagttgagcgtctccggcaaggggaagacccccttaaggaaaaggtataactcacaccaaatggggcagtccaaacagtttccgctggaggagtcctcctgtgagaaaggttgccaagtcacgtccgaacagattaaggctgatatgaaagctgctagggacattccagagaagaaaaaaaacaaggatgtctacccatcatgtagcagcacaactgctagtacggtgggaaactcatcctcccataacacagcctcacagtctcccgactttgtccgcacagtaaattcggggggctcatccgagccaagccccactgaggtcgatgtgtccagacagtgcgcctgttcccccggcggaagcgaggatagtgaggcaatggaggaaggagacgcagagtcctctgtttgtcccaggtgctgctgtcaccgccctcaggagtcccagcgccggacctcgcggtgttccgatgaggaaaggccgagtacatccagggcatgcgttgtgaatggccctgacgaggtggcaaagactaagccaaggcacgcgatgaagcgaaagcgcacggcagataagagcacatcgacatccgatcccgtgatcgaggatgatcatgttcaagttcttgtcctgaagtccaaaaaccttgtgggtgttacaatgacaaattgtggtataacggatcttgtccttaaagactgtccgaaaatgatgtttatccatgcaacgcggtgccgggtgctcaaacaccttaaagtcgaaaatgcccctattgtcaatagatttgactacgcccaatgcaagaaacttaatatggaccaggtgcttgatcagatattgcgcatgcctcccgagaggaatcgcattatctacttgcggcctatgcagcaggtggatactctgacactcgagcagaagctgttctccggaccgtacccatatcacatctgcatcattcatgagttcagcaatcctcccaatgtccggaataaggtgcgaattagatcctggatggacacaattgccaacataaaccaggaactgatcaaatatgagttctttcctgaagccacccggtccgaagaagacctgaagaagtatcctaaatacccatggggtcgcgagatctatacactggaaggtgtggtggatggcgcgccatactcaatgattagcgattttccatggttaaggtcccttcgagccgcagagccaaactcatttgctcggtacgactttgaggacgatgaggagtcaactatatacgctccaagaaggaagggccaactgagcgcggacatatgcatggagactataggcgaggagatttctgaaatgaggcagatgaagaaaggcgtattccagcgcgtggtggctatttttattcattattgcgacgtgaatggcgagccagtggaggacgactacatctag

SEQ ID NO: 220243 - DNA, 3342 bp, Artificial Sequence
  derived and/or modified sequence
atggggccacgaaagaaatctgttaagacctgtattatgaataatgagatcccagaggagatgactgccgacgagactaaggattacatgaatcagctttcccatgaagttctctgccacattttccggtatcttcccctccaggatatcatgtgcatggaatgtctgtccaggaagctcaaagaggccgtgaccctctacctgagggtggtgagagtggtagatctttgtgcaggtaggtggtgggagtacatgccatccggatttacagacgccagctttttaacactgcttaagaagatgcctgatgtggaacagctctacgggcttcaccccagatatttagaacggagacgcgtgcgaggtcacgaggccttctctatccctggagtactcgaggcactgcaggcttgtcccaaccttgtcggagtggagacctctcatctggagctggtggagtcgatctggacatatatgccacatgttcacatattgggcaagttcaggaaccgcaatggtgcattccctattccgccagaaaacaagctgaagattcccattggcgcaaagattcaaaccctgcacttggtgggcgtgaatgtgcctgagattccctgcatccccatgcttcggcatttgtatatgaagtgggtgcgattgacgaagccccagcccttcaaggattttttatgtatctctctgagaactttcgtgatgcgtaattgcgccggtcccaccaattcacttaaatatgttccactggtaacaggtctcgcttctgctcggaacctggaacatctagaaatggtgcgtgtgccttttctgggagggttaatacagcatgttgtggaagatagctggagatccggcggatttcgtaacctgcacactattgtgctgggcgcatgtaaaaatgcccttgaggttgatttaggatacttgatcattaccgctgcccgacgcctccatgaggtgcgcatacagcctagcttgactaaggatggtgtgttctcagctctcaaaatggcagagctggagtttccccagttcgagacactacatctggggtatgtcgacgagtttctcctgcagtccagaatggccaatgccgaccttgttaagtacggtcttgcagacgtcgttgagaatcccggaattatcacggatataggcatgaaggccgtgaatgaggtcttttcttgcattaagtacttggccatatacaattgcccacatctgcacaatccttacaactggatctcggatcactctaggtggactcggcttgttgatataaatctggtacggtgtcacgccctcaagctggacagctttggtcagttcatcgagctgctgccaagcttggagttcataagtctcgaccaaatgttcagggagcctcccaagggctgcgccagggtgggcctgagtgccggaaccgggattggcgtaagtagcgccctggtgtcaaatcaaaattccaacaacgatgacaacaatgcccagaataataacgccaatatccatgataacaaccatcaccaccctgatgattcggacgaggagaatgacttcagacaagacctacagcctggcgagcagcagtttgccgcagatgccttgaatgagatggaagatatcgtgcaagaggatggggaagtagtagctgagagtggaaataatacaccggctcactcccaagctataatacccgtcgatgtggacgaggaacaggcgggtcctagtgggcttcagcgagtcgttaaacccacttcaataacggtgcacgatagtgaaagcgacgacgaggaggactctttagagttacaggaagtttggatccctaaaaacggcacccgtcgttactccgagcgggaggagaagacaggagaaagcgtccaatctagggagctgtcagtgagtggcaaaggtaagaccccgcttcgaaaacgttacaactcccaccaaatgggccagtcaaagcagttccccctagaggagtcctcttgtgagaaagggtgccaagtgacttcggagcaaatcaaggctgacatgaaggccgcacgagatatcccggagaagaaaaaaaacaaggacgtgtatccgtcatgttcctctacgacagcttctacggtaggcaactcgagctcacacaacaccgcctctcaatccccagatttcgttcgcactgtcaattctggaggatccagcgagccctcaccgaccgaggtggatgtgagtaggcaatgtgcctgtagcccaggcggatccgaggacagcgaagccatggaagagggcgatgcagagtctagtgtttgtccacgctgttgctgtcaccggccacaggagtctcagaggagaacctctcgctgcagtgatgaagaacgtccttcgactagcagagcctgtgtggtgaatggtcccgacgaggtggcgaaaaccaagcccaggcatgctatgaagcggaaacgaaccgcagataagagtacatctaccagcgatcccgtcattgaagatgaccacgtgcaagtactggtccttaagtcaaagaacttggtcggagtcacgatgacaaattgcggtatcaccgacctggtgttgaaagattgtccaaaaatgatgttcattcacgcaacccgctgccgggttttaaagcatcttaaagtcgaaaacgccccaatagtgaatagattcgactatgcacagtgcaaaaagctgaatatggatcaggtcttggaccaaatcctgcggatgccgcctgagagaaatcgcattatttacctcagaccaatgcagcaggtggataccctcacactcgaacagaaactttttagcggaccgtatccatatcacatttgtatcatccatgagttttccaatcctccgaacgtgaggaacaaggtgcggatcaggagctggatggacacaattgctaacatcaaccaggagctgataaagtacgagtttttccctgaggctactcggagcgaagaggatcttaagaaatacccgaaatacccttggggcagagagatctacacgctagagggtgtcgtggatggcgctccttattccatgatctcggatttcccatggcttcgcagcctgcgggcagctgagccaaattcattcgctcgctatgactttgaagacgacgaagaatccaccatttatgcccctcgcaggaagggccagctatcagccgacatctgtatggagaccataggcgaggagatcagcgagatgcgccaaatgaaaaagggggtgtttcagcgggttgtcgccatcttcatacactattgtgatgtaaacggggaaccagtggaggacgactacatatag

SEQ ID NO: 220244 - DNA, 3342 bp, Artificial Sequence
  derived and/or modified sequence
atgggccccagaaagaagagcgtgaagacctgcatcatgaacaacgagatccccgaggagatgaccgccgacgagaccaaggactacatgaaccagctgagccacgaggtgctgtgccacatcttcagatacctgcccctgcaggacatcatgtgcatggagtgcctgagcagaaagctgaaggaggccgtgaccctgtacctgagagtggtgagagtggtggacctgtgcgccggcagatggtgggagtacatgcccagcggcttcaccgacgccagcttcctgaccctgctgaagaagatgcccgacgtggagcagctgtacggcctgcaccccagatacctggagagaagaagagtgagaggccacgaggccttcagcatccccggcgtgctggaggccctgcaggcctgccccaacctggtgggcgtggagaccagccacctggagctggtggagagcatctggacctacatgccccacgtgcacatcctgggcaagttcagaaacagaaacggcgccttccccatcccccccgagaacaagctgaagatccccatcggcgccaagatccagaccctgcacctggtgggcgtgaacgtgcccgagatcccctgcatccccatgctgagacacctgtacatgaagtgggtgagactgaccaagccccagcccttcaaggacttcctgtgcatcagcctgagaaccttcgtgatgagaaactgcgccggccccaccaacagcctgaagtacgtgcccctggtgaccggcctggccagcgccagaaacctggagcacctggagatggtgagagtgcccttcctgggcggcctgatccagcacgtggtggaggacagctggagaagcggcggcttcagaaacctgcacaccatcgtgctgggcgcctgcaagaacgccctggaggtggacctgggctacctgatcatcaccgccgccagaagactgcacgaggtgagaatccagcccagcctgaccaaggacggcgtgttcagcgccctgaagatggccgagctggagttcccccagttcgagaccctgcacctgggctacgtggacgagttcctgctgcagagcagaatggccaacgccgacctggtgaagtacggcctggccgacgtggtggagaaccccggcatcatcaccgacatcggcatgaaggccgtgaacgaggtgttcagctgcatcaagtacctggccatctacaactgcccccacctgcacaacccctacaactggatcagcgaccacagcagatggaccagactggtggacatcaacctggtgagatgccacgccctgaagctggacagcttcggccagttcatcgagctgctgcccagcctggagttcatcagcctggaccagatgttcagagagccccccaagggctgcgccagagtgggcctgagcgccggcaccggcatcggcgtgagcagcgccctggtgagcaaccagaacagcaacaacgacgacaacaacgcccagaacaacaacgccaacatccacgacaacaaccaccaccaccccgacgacagcgacgaggagaacgacttcagacaggacctgcagcccggcgagcagcagttcgccgccgacgccctgaacgagatggaggacatcgtgcaggaggacggcgaggtggtggccgagagcggcaacaacacccccgcccacagccaggccatcatccccgtggacgtggacgaggagcaggccggccccagcggcctgcagagagtggtgaagcccaccagcatcaccgtgcacgacagcgagagcgacgacgaggaggacagcctggagctgcaggaggtgtggatccccaagaacggcaccagaagatacagcgagagagaggagaagaccggcgagagcgtgcagagcagagagctgagcgtgagcggcaagggcaagacccccctgagaaagagatacaacagccaccagatgggccagagcaagcagttccccctggaggagagcagctgcgagaagggctgccaggtgaccagcgagcagatcaaggccgacatgaaggccgccagagacatccccgagaagaagaagaacaaggacgtgtaccccagctgcagcagcaccaccgccagcaccgtgggcaacagcagcagccacaacaccgccagccagagccccgacttcgtgagaaccgtgaacagcggcggcagcagcgagcccagccccaccgaggtggacgtgagcagacagtgcgcctgcagccccggcggcagcgaggacagcgaggccatggaggagggcgacgccgagagcagcgtgtgccccagatgctgctgccacagaccccaggagagccagagaagaaccagcagatgcagcgacgaggagagacccagcaccagcagagcctgcgtggtgaacggccccgacgaggtggccaagaccaagcccagacacgccatgaagagaaagagaaccgccgacaagagcaccagcaccagcgaccccgtgatcgaggacgaccacgtgcaggtgctggtgctgaagagcaagaacctggtgggcgtgaccatgaccaactgcggcatcaccgacctggtgctgaaggactgccccaagatgatgttcatccacgccaccagatgcagagtgctgaagcacctgaaggtggagaacgcccccatcgtgaacagattcgactacgcccagtgcaagaagctgaacatggaccaggtgctggaccagatcctgagaatgccccccgagagaaacagaatcatctacctgagacccatgcagcaggtggacaccctgaccctggagcagaagctgttcagcggcccctacccctaccacatctgcatcatccacgagttcagcaacccccccaacgtgagaaacaaggtgagaatcagaagctggatggacaccatcgccaacatcaaccaggagctgatcaagtacgagttcttccccgaggccaccagaagcgaggaggacctgaagaagtaccccaagtacccctggggcagagagatctacaccctggagggcgtggtggacggcgccccctacagcatgatcagcgacttcccctggctgagaagcctgagagccgccgagcccaacagcttcgccagatacgacttcgaggacgacgaggagagcaccatctacgcccccagaagaaagggccagctgagcgccgacatctgcatggagaccatcggcgaggagatcagcgagatgagacagatgaagaagggcgtgttccagagagtggtggccatcttcatccactactgcgacgtgaacggcgagcccgtggaggacgactacatctag

SEQ ID NO: 220245 - DNA, 1956 bp, Artificial Sequence
  derived and/or modified sequence
atgctgagactgcagatgaccgacggccacatcagctgcaccgccgtggagttcagctacatgagcaagatcagcctgaacaccccccccggcaccaaggtgaagctgagcggcatcgtggacatcaagaacggcttcctgctgctgaacgacagcaacaccaccgtgctgggcggcgaggtggagcacctgatcgagaagtgggagctgcagagaagcctgagcaagcacaacagaagcaacatcggcaccgagggcggccccccccccttcgtgcccttcggccagaagtgcgtgagccacgtgcaggtggacagcagagagctggacagaagaaagaccctgcaggtgaccatgcccgtgaagcccaccaacgacaacgacgagttcgagaagcagagaaccgccgccatcgccgaggtggccaagagcaaggagaccaagaccttcggcggcggcggcggcggcgccagaagcaacctgaacatgaacgccgccggcaacagaaacagagaggtgctgcagaaggagaagagcaccaagagcgagggcaagcacgagggcgtgtacagagagctggtggacgagaaggccctgaagcacatcaccgagatgggcttcagcaaggaggccagcagacaggccctgatggacaacggcaacaacctggaggccgccctgaacgtgctgctgaccagcaacaagcagaagcccgtgatgggcccccccctgagaggcagaggcaagggcagaggcagaatcagaagcgaggacgaggaggacctgggcaacgccagacccagcgcccccagcaccctgttcgacttcctggagagcaagatgggcaccctgaacgtggaggagcccaagagccagccccagcagctgcaccagggccagtacagaagcagcaacaccgagcagaacggcgtgaaggacaacaaccacctgagacacccccccagaaacgacaccagacagcccagaaacgagaagccccccagattccagagagacagccagaacagcaagagcgtgctggagggcagcggcctgcccagaaacagaggcagcgagagacccagcaccagcagcgtgagcgaggtgtgggccgaggacagaatcaagtgcgacagaccctacagcagatacgacagaaccaaggacaccagctaccccctgggcagccagcacagcgacggcgccttcaagaagagagacaacagcatgcagagcagaagcggcaagggccccagcttcgccgaggccaaggagaaccccctgccccagggcagcgtggactacaacaaccagaagagaggcaagagagagagccagaccagcatccccgactacttctacgacagaaagagccagaccatcaacaacgaggccttcagcggcatcaagatcgagaagcacttcaacgtgaacaccgactaccagaaccccgtgagaagcaacagcttcatcggcgtgcccaacggcgaggtggagatgcccctgaagggcagaagaatcggccccatcaagcccgccggccccgtgaccgccgtgccctgcgacgacaagatcttctacaacagcggccccaagagaagaagcggccccatcaagcccgagaagatcctggagagcagcatccccatggagtacgccaagatgtggaagcccggcgacgagtgcttcgccctgtactgggaggacaacaagttctacagagccgaggtggaggccctgcacagcagcggcatgaccgccgtggtgaagttcatcgactacggcaactacgaggaggtgctgctgagcaacatcaagcccatccagaccgaggcctgggaggaggagggcacctacgaccagaccctggagttcagaagaggcggcgacggccagcccagaagaagcaccagacccacccagcagttctaccagccccccagagccagaaactag

SEQ ID NO: 220246 - DNA, 1956 bp, Artificial Sequence
  derived and/or modified sequence
atgctgagacttcagatgactgacggtcacatatcttgtactgcagtcgaattcagttacatgtcaaagatatccctaaatactccccctggcaccaaggtaaaactgagcggtatcgtcgacattaagaacggcttcttgttgctgaatgatagcaataccactgtgctcggaggcgaagtagagcatttaattgagaagtgggagctgcagcgttccctatccaagcacaaccggtcgaatatcggcacggagggaggtccacctccattcgtaccttttgggcagaaatgtgtgtcccatgtccaggttgacagccgagaactcgatcgcagaaaaacattacaggtgactatgccggtgaagcctaccaacgacaacgatgagttcgaaaaacagcgtactgctgctattgctgaggtggctaagtccaaggagactaagacattcggtgggggcggcggcggagcaagaagcaatcttaatatgaacgctgccgggaatcgaaatagggaggtactgcagaaagaaaagtccaccaagagcgagggaaagcacgagggagtgtatcgtgaactcgttgacgaaaaagcactgaaacatataactgagatgggcttttctaaggaagcaagtagacaggctctgatggataacggcaataatcttgaagcggcgttgaacgtcctgctgacaagcaataaacagaaaccagtgatggggccacccctaaggggccgcggaaaaggccgggggcggatccggtcggaggatgaagaagaccttggcaacgcacgcccttcggcacccagcaccctgtttgacttcctggaaagcaagatgggcaccttgaatgtggaggagcctaagtcccaaccccagcaactgcaccaggggcagtataggagtagcaataccgaacagaacggcgtaaaagataataaccatctgcgccaccccccccgcaatgacacacggcagcccagaaacgaaaaaccccccagattccagcgtgactctcagaactcaaaatcagtactggagggatcaggcctgccacggaatagaggttcagaaagaccctccacgtctagcgtgtcagaggtttgggccgaggatagaattaagtgcgatcgcccgtattcccggtatgaccggacgaaagatacatcctacccactcggatcacaacacagtgacggcgcattcaaaaagagagataactctatgcagtcccgtagcggaaagggaccaagtttcgctgaagccaaagagaacccactgccccaggggagcgtcgactacaataatcagaagcgcggcaaaagagaatcacagacttctattccagattacttctacgatagaaagtcccagaccattaataacgaggctttctccgggatcaaaatcgaaaagcacttcaacgtgaatacagattaccaaaacccagtacggagcaacagtttcatcggcgtccccaatggagaagtggaaatgccactgaagggaagacgaatcggacccatcaagcctgctggacccgtcactgccgtaccctgcgacgataagattttttacaatagtggcccaaagcggcgaagcggcccaattaagccagaaaagattcttgagtcttcgattcctatggagtatgccaagatgtggaagcccggggacgagtgttttgccctctattgggaagataataagttttaccgggccgaggtggaggccctccactcctccggaatgaccgccgtggtgaagtttatcgattatggaaattacgaggaggtcttactgagcaatataaagcctatccagactgaagcatgggaagaggagggcacttacgaccaaaccctcgagtttcggcgtgggggggatggacagccgcgaagatccacgaggcctacgcagcagttctaccagccacctcgagctagaaattag

SEQ ID NO: 220247 - DNA, 1956 bp, Artificial Sequence
  derived and/or modified sequence
atgctgagattgcagatgactgatggccacattagttgtactgcggtcgagttttcttacatgtctaagatctcattaaacactcccccaggaaccaaggtgaagctgtcgggcatcgtggatattaagaacggtttccttctgctaaacgatagtaataccactgtactgggaggagaagtcgagcacctgatcgagaagtgggaactccagagaagcctgagtaaacataatcgtagcaacataggaacggagggcgggcctccacccttcgtgccctttggacaaaagtgtgtctctcatgtccaggtcgattcgcgcgagctggataggaggaagacacttcaggtaaccatgcccgtgaagcctaccaatgataacgacgagttcgaaaagcagcgaacagcggccattgccgaagtggccaaaagtaaagaaaccaaaacttttggtggggggggtggaggagcacgctccaacctgaacatgaacgcagctgggaatcggaaccgggaagtgctgcagaaggagaaaagcaccaaaagtgagggcaagcacgagggggtatatagagaactagttgatgagaaggcactgaaacatattaccgagatggggttcagcaaggaagcaagccggcaggcccttatggacaatggtaataacttggaggcggcactgaacgtcctgctgacatcaaataaacagaagccagtgatgggaccaccattacgcggcaggggcaagggaagaggccgtatcagatctgaagacgaggaggatttaggcaacgccagacccagtgccccgtccacactttttgactttttagaatccaaaatgggcaccttgaatgttgaggagcctaagagccaaccccagcaactgcatcaaggccagtacaggagctctaacactgaacaaaacggagtcaaggacaacaatcatcttaggcaccctccgaggaatgacacacgccaaccacgtaatgagaaaccccctcggttccaacgggatagccagaattccaagagcgtgctggaaggtagtggtcttccccgcaatcgcggatccgagaggccatcaacaagcagtgtcagcgaagtgtgggccgaggatcgtattaagtgcgacagaccttactcacgctatgaccgcaccaaagatacctcatacccactgggctcccaacactccgacggtgccttcaagaagagggataactcaatgcagtcacgctccggcaagggcccaagtttcgcagaagccaaagaaaatcctctgcctcagggctctgtggactacaataatcagaagcgcggtaaacgagaatcacagacgtcaatcccggattacttctatgacaggaaaagtcagactatcaataacgaagccttctctggcatcaaaattgaaaagcatttcaatgttaacacagattaccaaaatcccgtgcgatcaaattcttttatcggtgtgcctaacggcgaggttgagatgcccctgaagggcaggcgaattgggcctatcaagcctgccggccctgttaccgccgtgccctgcgacgataagatcttctacaattcagggccaaaacgaaggtcgggccccataaaacctgagaagattctggagtccagtataccaatggagtatgcaaagatgtggaagcctggcgatgagtgttttgctctatactgggaggataataagttctaccgcgccgaagtggaggccctgcacagttctggaatgacagctgtggtaaagttcattgactacggcaattacgaggaagtgctcctttcaaacattaagccgattcagactgaggcctgggaagaggaaggcacatatgaccagactcttgagtttcggaggggtggcgacggacagcctcgacgcagcacgcggccaacacaacagttctatcagccccctcgggctcggaactag

SEQ ID NO: 220248 - DNA, 1956 bp, Artificial Sequence
  derived and/or modified sequence
atgctgagactgcagatgactgacggacatatcagctgtaccgcagtggaatttagctacatgtctaagatcagcctgaatactccccccgggactaaggtcaagctgtcaggaatcgtggatatcaagaacggttttctgttacttaatgattctaataccacagtcctaggaggcgaggtagagcatctcatagagaaatgggaacttcagagatccttaagtaaacacaatcgctctaacatcggtaccgaaggcggcccacctccttttgttccttttggccagaagtgcgtgtctcatgtgcaggttgactcccgtgaactcgaccgcagaaagacgctgcaggtgacaatgccggtcaagcccaccaacgacaacgacgagttcgaaaagcagcgcaccgctgcaattgccgaagtggccaaatctaaggaaactaagacatttggcggtgggggaggcggggctcgcagcaacctcaatatgaatgcagccggcaaccgcaatcgcgaagtgctgcagaaagaaaaatctaccaagagtgagggaaagcacgaaggcgtttaccgagagctagtagacgaaaaggccctgaaacacatcactgagatggggttttctaaagaggccagccgacaagctcttatggataatggtaacaatctggaggcggcccttaacgtgctgttgacctccaacaagcagaagcccgtcatgggcccccccctgcgcggccgtggtaaagggcgaggccgaatccgcagcgaagatgaagaggacctgggaaacgcacggcccagtgcccccagcaccctgtttgactttctcgagtcgaaaatgggtaccctcaatgtggaagagccaaagtcacagccccagcaactgcatcaaggtcagtaccgatctagcaacactgagcagaatggcgttaaagacaacaatcaccttcgtcacccacccaggaatgatacccggcaacctaggaacgaaaaacctcctaggttccaacgggatagtcagaattccaagagcgtacttgaaggctccggactcccaaggaatcggggctctgaacggccgagtacgagttccgtgagcgaggtgtgggccgaagaccggatcaagtgtgaccgaccttacagccgttacgaccggacgaaggatacgtcgtatcctttaggaagtcagcattccgacggagcttttaagaaaagagacaattccatgcagagccgctcaggaaaaggcccatccttcgccgaggcaaaggagaatcccttacctcagggctccgttgattacaacaaccagaagcgcgggaaaagagagtcccagacgtctataccagattacttttacgatcgtaagtctcagacaatcaataacgaagccttcagcggcatcaagatcgagaagcatttcaatgtgaacaccgattatcaaaaccccgtgaggtctaattcttttatcggcgtgccaaacggagaagtggagatgcccctaaaaggacgcaggatcggaccaattaagccggccggccccgtgacagccgtgccctgcgacgataagattttttataatagcggacccaagaggagaagtggtcccataaaacctgaaaaaatccttgagtcctctatacctatggaatatgcaaagatgtggaaaccaggcgatgaatgtttcgccctatattgggaggacaacaaattctatcgtgccgaagtcgaagcattgcattctagcggcatgacagctgtggtgaagttcatcgactacggaaattacgaggaagtcctgctgtccaacatcaagccaatccagaccgaggcatgggaggaagaagggacttacgaccagactctcgagtttagaagaggcggtgatgggcagccgagacgctccacaagaccaacacagcagttctatcagccaccgcgagcgcggaattag

SEQ ID NO: 220249 - DNA, 1956 bp, Artificial Sequence
  derived and/or modified sequence
atgctgcggctgcagatgacagatggccacatcagctgcacagctgtggagttctcctacatgagcaagatcagcctgaacaccccacctggcaccaaggtgaagctgtctggaattgtggacatcaagaatggcttcctgctgctgaatgacagcaacaccaccgtgctgggcggggaggtggagcacctgattgagaagtgggagctgcagaggagcctgagcaagcacaacagaagcaacatcggcacagagggcggccccccaccatttgtgcccttcggccagaagtgtgtgagccacgtgcaggtggacagccgggagctggacaggaggaagaccctgcaggtgaccatgcctgtgaagcccaccaatgacaatgatgaatttgagaagcagaggacagctgccatcgccgaggtggccaagagcaaggagaccaagaccttcggcggcggcggcggcggggcccggagcaacctgaacatgaatgctgctggcaacagaaaccgggaggtgctgcagaaggagaagagcaccaagtctgagggcaagcatgagggcgtgtaccgggagctggtggatgagaaggccctgaagcacatcacagagatgggcttcagcaaggaggccagccggcaggccctgatggacaatggaaacaacctggaggccgccctgaatgtgctgctgaccagcaacaagcagaagcctgtgatgggcccccccctgcggggccggggcaagggccggggccgcatccgctcagaagatgaggaggacctgggcaatgcccggcccagcgcccccagcaccctgtttgacttcctggagagcaagatgggcaccctgaatgtggaggagcccaagagccagccccagcagctgcaccagggccagtaccgcagcagcaacacagagcagaatggagtgaaggacaacaaccacctgcggcaccccccaagaaatgacacccggcagcccagaaatgagaagcccccacgcttccagagggacagccagaacagcaagtctgtgctggagggcagcggcctgcccaggaacagaggcagcgagcggcccagcaccagctctgtgtctgaggtgtgggccgaggaccgcatcaagtgtgaccggccctacagccgctatgacaggaccaaggacaccagctaccccctgggcagccagcacagtgatggagccttcaagaagagggacaacagcatgcagagccgcagcggcaagggccccagctttgctgaggccaaggagaaccccctgccccagggctctgtggactacaacaaccagaagaggggcaagcgggagagccagaccagcatcccagactacttctatgacaggaagagccagaccatcaacaatgaggccttcagcggcatcaagattgagaagcacttcaacgtgaacacagactaccagaaccctgtgcgcagcaacagcttcatcggcgtgcccaatggagaggtggagatgcccctgaagggcagaagaattggccccatcaagccagctggccctgtgacagctgtgccctgtgatgacaagatcttctacaacagcggccccaagagaagaagtggccccatcaagccagagaagatcctggagagcagcatccccatggagtatgccaagatgtggaagccaggagatgaatgttttgccctgtactgggaggacaacaagttctacagagctgaggtggaggccctgcacagcagcggcatgacagctgtggtgaagttcatcgactatggcaactatgaggaggtgctgctgagcaacatcaagcccatccagacagaggcctgggaggaggagggcacctatgaccagaccctggagttcagaagaggaggagatggccagccccggcgcagcacccggcccacccagcagttctaccagcccccccgggccaggaactag

SEQ ID NO: 220250 - DNA, 1956 bp, Artificial Sequence
  derived and/or modified sequence
atgctgcggctgcagatgaccgacggccacatcagctgcaccgccgtcgagttcagctatatgagtaaaatctcactcaatactccacccgggactaaagtcaaattatctgggatagtggacataaagaatggctttttgctgctaaacgattcaaatacaactgtgctggggggggaagtggagcatttaattgagaaatgggagttacagaggagtctctcaaaacacaaccgttctaatattgggacagagggggggcctcctcctttcgtgccatttgggcagaagtgcgtgagtcatgtacaggtggatagtagggaactggatcggcgaaaaaccttgcaggttacaatgcccgtgaagcccactaatgacaacgacgaatttgagaaacagaggaccgctgccatcgctgaggttgccaaaagcaaagaaacaaaaacttttggggggggcgggggcggggcacggtctaatctgaacatgaatgccgccgggaataggaatcgcgaggtgctgcagaaggaaaagtccaccaaaagcgaaggcaaacacgagggggtttaccgagaacttgtggatgaaaaagccttaaagcacatcactgagatgggtttttcaaaagaggctagccgccaggctctgatggacaatggtaataatctagaagcggcattaaacgtgctgctgacaagcaacaagcaaaagccagttatggggccaccactccgagggcgcggaaaaggacgcggccgcatccgctcggaggacgaagaggatctgggcaacgcacgcccaagcgcaccctcaaccctgtttgatttcctggaatctaaaatgggaactctcaacgtggaggagcctaagagccagccacagcaactgcaccagggccagtatagatccagcaatacggaacagaacggagtgaaggacaataaccatctgcgacacccacctcgaaacgacacgcgccaaccaagaaatgagaaacccccccgattccagcgcgattcccagaattcaaagagtgtgctggaagggtctggactgcctagaaaccgaggaagcgagcgccccagcacctccagcgtctccgaggtgtgggccgaggacagaattaaatgtgacagaccctacagtcgatatgatcggacaaaggatacatcctacccactgggctcccagcattccgacggtgctttcaagaagagagacaactctatgcaatcaaggtcgggtaaagggcctagtttcgccgaagccaaggagaatccacttccccaggggagtgtggactacaacaatcagaaacgtggcaagcgggaatcacagaccagtatcccagattacttctacgaccggaagtctcagacgattaataacgaggccttctcaggaattaagattgagaaacacttcaatgtgaacaccgattaccaaaacccagtgagatcaaactcttttatcggcgttcccaacggagaggtcgagatgcctctgaaaggccgcagaattggccctatcaagcccgcaggaccggtaacagccgtgccatgtgacgacaaaatcttctataacagtgggccaaagcggcggtctggaccaattaaacccgaaaagatcttggagtctagcattcctatggagtacgctaaaatgtggaagcctggggacgagtgctttgctttgtactgggaagataacaaattttacagggcggaggtggaagcccttcattcgtccggcatgaccgctgtagtgaaattcatcgactacggcaattatgaggaggtcctgctttcaaacatcaaaccaattcaaacagaggcatgggaagaggaaggcacttacgatcagactctggagttcaggagaggaggagatggccagccacgacgctccaccaggcctactcaacagttttaccagccaccaagagccagaaactag

SEQ ID NO: 220251 - DNA, 1956 bp, Artificial Sequence
  derived and/or modified sequence
atgctgcggctgcagatgaccgacggccacatcagctgcaccgccgtagaattttcctacatgagtaaaatcagcctgaatactccgccaggtacgaaggtaaagctgtcagggattgtcgacatcaaaaatgggtttcttctcctcaatgattctaatactacggtcctggggggcgaggtagagcacctcatcgagaaatgggagctgcagagaagtctgtccaagcataaccgttcgaacatcggaacggagggcgggcctccaccattcgtgccattcgggcagaagtgcgtctcccatgttcaggtcgacagccgagagttggacaggagaaaaacattacaagtgactatgcctgtgaagcccaccaatgacaatgatgagtttgaaaagcaacgaaccgcggctattgctgaagttgctaagtccaaggagacaaagacatttggcggcggcggcggaggtgcacggtcgaatctgaacatgaatgctgcaggaaatagaaatagagaagtgttacagaaggagaagtctacaaagtcagaaggcaaacacgaaggagtctatagagagctagtagacgagaaggccctgaaacatatcaccgagatggggttcagcaaggaagctagtcgacaagctttgatggacaatgggaacaaccttgaggccgcactgaacgtccttctgacttcaaacaagcaaaagcctgtgatgggaccccccctgcgtgggcggggcaaggggcggggtcggatccggagtgaagatgaggaggacctcggcaatgccaggcctagcgctcctagcaccttgttcgattttctggaaagcaaaatgggaacgctcaatgtagaggagccaaaaagccagcctcagcagctgcaccaggggcagtacaggtcctcaaacacagagcaaaacggggttaaggacaataaccacttgagacaccccccaaggaacgacaccagacaaccgcgaaacgaaaagccaccccgttttcagcgagactcccagaactccaagtctgttttagagggctccggactgcctcggaaccgcggctccgagagaccatcaacctccagcgtctccgaggtatgggcagaagacaggatcaagtgtgaccggccttatagcagatacgacagaactaaagacacctcctaccctctggggtcacagcatagcgacggtgcgttcaagaagagggacaattcgatgcagtcacgcagcggaaaagggccatcatttgcagaggccaaagagaatccactcccccaggggagtgtggactacaacaaccagaaacgaggaaagcgtgagtcacagacttccataccggactatttctacgatagaaagtcccagaccattaataatgaggccttcagcggcataaaaattgagaaacatttcaatgtgaacaccgattaccaaaaccccgtccggtcaaacagcttcatcggcgtacccaacggggaggttgaaatgccgctgaagggccgcaggattggtcccattaaacccgcggggccagtgacagcagtaccctgtgacgacaagattttttataattcaggcccaaagcgcagaagtggacctattaaaccagaaaaaatcctggagtcttctatacccatggaatacgcaaaaatgtggaagcccggagatgaatgctttgcattgtactgggaagataataaattctacagagctgaagtggaggcactgcacagcagcggcatgaccgctgtagtgaagtttatagattacgggaactacgaggaggtgctcttaagcaatattaagccaatacagaccgaagcttgggaggaggagggaacatatgaccagacgctggaattcagaagaggcggggacggtcagccacgccggtccaccagacccacgcagcaattttaccagcccccgcgtgccaggaactag

SEQ ID NO: 220252 - DNA, 1956 bp, Artificial Sequence
  derived and/or modified sequence
atgctgcggctgcagatgaccgacggccacatcagctgcaccgccgtggagttttcatacatgtccaagatatctctcaacaccccccctggaacgaaggtcaagcttagcggaatagtggatatcaagaatggcttcctcttgctgaacgacagcaataccacagtgctgggcggggaggtggagcacttgattgagaagtgggaattgcagcggagcctttctaagcacaacagatccaacatcgggacggagggtggaccgcctccttttgttcctttcgggcagaagtgtgtgtcacatgtgcaagttgacagtcgtgagctcgaccgacgcaagaccttgcaagtcacaatgccagttaagcccactaacgataacgacgaatttgagaagcaacgcacagctgcaattgccgaggtcgcgaaaagtaaagaaaccaagactttcgggggcggcggcggaggagcccggtctaacctgaacatgaacgccgccgggaaccgcaatcgcgaggtgctgcaaaaagagaaaagtaccaaaagtgagggaaagcacgagggggtgtatagagaactggttgacgagaaagctttgaagcatattactgagatggggttcagtaaggaggccagtcgccaggccctcatggacaacggcaataatctggaagcagccctgaacgtcctgctaacgtcaaacaagcagaagccggtgatggggcctcctctgaggggcagaggcaagggcaggggccgaatcaggtccgaggatgaggaggatctgggaaacgctcgaccctcagcgccctcaacattgtttgacttcctggaatcaaaaatgggtaccctgaacgtagaagagccgaaatcccagccccagcagctccaccagggccaataccggtctagtaatacagaacagaacggcgttaaggacaacaatcacttgcggcatccacctcggaatgatacaaggcaaccgcgcaacgagaagcccccccggttccagcgcgacagtcagaactccaagtctgtcctggagggcagcgggctgccccgtaatagaggatcggagcgcccttctacctcttctgtgagcgaggtgtgggctgaagataggattaagtgtgacagaccctattccaggtatgaccgcaccaaggatacatcctaccccttaggtagtcagcactccgatggggccttcaagaaacgggataactccatgcagtccaggagtggcaagggaccgtccttcgccgaagctaaagagaaccccctaccgcagggaagcgtcgactataataatcagaagcgcggtaagagggaatcccagacttccatcccggactacttctatgaccgaaagagccagacaatcaataacgaggccttcagcggcatcaaaattgagaagcacttcaatgtcaatacagactatcaaaatcccgtcaggagcaattccttcatcggtgttcctaacggtgaagtggagatgccacttaaggggcgcaggattggccccattaaaccagcgggccccgtgactgcagttccctgtgatgataaaattttctataactccgggcctaaacgtcggagtggaccaataaagcctgaaaagatcctcgagtcctccattccaatggaatatgcaaaaatgtggaagcctggagatgaatgcttcgctctctactgggaggataacaagttctacagagccgaggtcgaagctctgcattccagcgggatgacagcagtcgtcaaattcatagattacggaaattatgaggaagtcctgcttagtaacataaaacctatccaaacagaagcatgggaggaggagggaacctacgatcaaactctcgagtttagacgtggcggagatggccagccacgcaggtcaaccagaccaacccagcagttctaccaaccgcctcgcgcccgcaactag

SEQ ID NO: 220253 - DNA, 1956 bp, Artificial Sequence
  derived and/or modified sequence
atgctgcgcctccagatgacagacggtcatattagctgcactgcagtcgagtttagctacatgagtaagatttcactcaacaccccacccggaacgaaggtgaaactgtccggaatcgtggatatcaagaacgggtttttactcctgaacgacagtaatacaacggtgctgggcggagaagtcgagcacctcatagagaaatgggagctccagagatcactttcgaaacataacaggtcaaacatcggaactgaggggggtccacccccattcgttccattcggtcaaaagtgcgtatcccacgttcaggtcgacagccgggagctcgataggaggaaaactctgcaagtgacaatgccggtgaaaccaacaaacgacaatgacgagttcgagaagcaacgcacggcagccatcgcagaagtcgctaaatctaaagaaaccaagactttcggaggtgggggagggggagcgcgatctaatctgaatatgaatgctgccggtaatcgcaatagagaagtgctacagaaggaaaaaagcactaaaagtgaaggaaaacacgagggcgtgtatagggaacttgtggatgagaaagcactaaagcacatcacagagatgggtttctctaaggaggcatctaggcaagctctgatggacaatgggaataatttggaggccgctctaaacgtcctgttgacttctaataagcagaagcctgtgatgggccctcccctgaggggcagaggtaaggggagaggcagaattaggtctgaggacgaagaggaccttggtaatgccaggccatcagctccctctactttatttgatttcctcgaatcaaagatgggaacactgaacgtggaggaacccaaatctcagccccagcaactgcatcagggacagtacagatcctcgaacactgaacagaacggtgtgaaagataataatcatctgaggcaccctccacgtaacgacacccgacagccaaggaatgagaagccacctaggttccagagggatagtcagaacagtaagagcgtgctggaaggatctggacttcctcggaatagaggatccgaacggccaagcactagtagtgtgtcagaggtttgggcggaggacagaattaagtgcgatcgtccatactctaggtatgacaggacgaaggatacctcctatccactcggctcccagcacagcgatggggcatttaagaaaagagataattccatgcagtcaaggagcgggaaggggccttcttttgctgaggcaaaggagaaccctctccctcagggcagcgtggattacaataaccagaaaagaggaaagcgcgagtcccagacaagcatccccgattacttctatgaccggaagagtcagaccattaacaacgaggcattttcaggaataaaaattgaaaaacacttcaacgtgaatactgactaccaaaaccccgtaaggtccaactcgtttatcggcgtgccaaatggggaagtggaaatgccactcaaggggcgtagaattggaccaattaaaccggctggacccgtgactgcggttccatgcgatgataaaatcttttataactctggccctaaacggcgaagtggaccaatcaaaccagagaagatcctggagagttccattcccatggaatatgcaaagatgtggaagcctggtgatgaatgctttgcgctgtattgggaagacaataaattctatcgagccgaggtggaagccctgcacagctctgggatgacagccgtggtgaagttcatcgactacgggaattatgaggaagttttactgtcaaacatcaagcccattcagaccgaggcctgggaagaggaaggaacctacgatcagacgcttgaatttcggaggggtggtgatggacaacctcgacggtccacaagacccacccagcagttctatcagccgccacgagctagaaactag

SEQ ID NO: 220254 - DNA, 1956 bp, Artificial Sequence
  derived and/or modified sequence
atgttgcggttgcaaatgaccgatggacacatatcttgcaccgccgtggaatttagctacatgtctaagatcagtcttaacactcctccaggcactaaagttaaactgtctggcattgtagacatcaaaaacggtttccttctcctgaatgactcaaacaccacagtgcttggcggagaggtggagcatctcattgaaaaatgggagctgcaacgaagcctttcgaaacacaacaggtccaacataggaaccgaaggaggaccccctccgttcgtgcccttcgggcagaaatgtgtgagccatgtccaagtagattcccgagagttagatcggagaaagactctccaggtaacgatgccagtgaagcccacaaacgacaacgatgaatttgagaaacagcggactgcagctattgcagaagtcgcaaagagcaaggagaccaagacattcggcggaggaggcggaggcgctaggagcaacctgaatatgaacgccgctggcaaccgcaaccgtgaagtcctccagaaggagaaatcaacaaagtccgaaggaaagcatgagggagtttaccgcgaattagtggatgaaaaggccctgaagcatattacagagatggggttttccaaggaagcaagcaggcaggctctgatggacaacggcaacaatttggaagctgctcttaatgttctcctgaccagcaataagcagaaaccagttatgggtcccccactgagaggacggggaaaagggaggggtcgcatccgctctgaggacgaggaggacctggggaatgctcgtccttctgcccctagcacactttttgattttttagagagtaagatggggaccctgaacgtggaggagcccaagtcccaaccacagcaactgcaccaggggcagtaccggtcaagcaacaccgaacagaatggtgtgaaagataacaaccatctgaggcatcctcccaggaacgataccagacagccaagaaacgaaaaacccccacgctttcagagggactcccaaaattcgaaatctgtgctggaagggtcaggtctgccccgaaacagaggctcagaacgaccgtccacaagctcagtatcggaagtttgggccgaagaccgcatcaagtgcgacagaccttattccaggtatgacagaacaaaagacacctcataccctctcggctcacagcacagcgacggagcgtttaagaaacgggataactccatgcaatctagatccggcaagggaccttcttttgctgaggccaaggagaatcccctgccacaagggtcggtggactataacaatcagaagcgcggaaagagggaaagtcagaccagtataccggattatttttacgatcgaaagagtcagactataaataatgaggccttttccgggatcaagatcgaaaagcatttcaatgtcaataccgactatcaaaatcctgtgaggtccaactcattcatcggtgtgcctaacggggaggttgaaatgcccctcaagggacgacggatcggtcccatcaaacctgcgggtccagtaaccgccgtgccatgcgacgacaaaatcttctataacagcggaccgaagcggagatctgggccaatcaaaccagagaagatactcgaaagttcaattccaatggagtatgctaagatgtggaagcccggtgatgagtgcttcgctctctactgggaggacaacaagttttatagagccgaagtagaagccctgcacagcagcggaatgaccgctgtcgtgaaattcatcgattatgggaactatgaagaggtactcctatccaacattaaaccaatccagaccgaagcttgggaggaggaagggacatacgatcagaccctcgagttcagacgcggtggtgatggtcaaccacggcgatctactcgcccaacacagcagttctatcagccacctagggcaagaaattag

SEQ ID NO: 220255 - DNA, 1956 bp, Artificial Sequence
  derived and/or modified sequence
atgctgaggttgcagatgactgacggtcacatctcctgtacagctgtcgaattttcatacatgagcaaaatttcattgaacacacctcccggaacaaaggtgaagctgtctggtattgtggacatcaagaacggattcttgcttcttaatgactccaatacaacagtgcttggcggagaggtggaacatcttatagaaaagtgggagctacagagatcattatcaaaacataacaggagtaacatcgggacagagggaggccctcccccattcgtgccattcgggcagaagtgcgtgtcacacgtacaggtggactcgcgcgaacttgatcgccgaaagactctgcaggtcacgatgccagtaaagccaacaaatgataatgacgaattcgagaagcagcgcactgccgctatcgcagaagtggccaagtccaaagaaacaaagacttttgggggtggagggggaggggctaggagcaacctgaacatgaatgccgctgggaacaggaacagggaagtcttacagaaagagaagagcactaaatcagaaggcaagcacgagggcgtttatcgggagctggtggacgaaaaggccctgaagcacatcactgagatggggtttagcaaagaggctagcaggcaggccctcatggacaacggcaataatcttgaggctgctctgaacgtcctacttacatccaataagcagaaaccggtgatgggtccccctctcaggggcaggggcaaggggagaggacgcatccggtctgaggacgaggaggatcttgggaatgccaggcctagtgccccatcaactctatttgacttccttgagtcgaaaatgggtaccctgaatgtggaggagcccaagtcccaacctcagcagctgcaccagggacaatacagatcgtccaacacagagcagaacggagttaaggacaacaaccacttgcgccacccccctagaaacgatactcggcagcctcgaaacgagaagccaccaagatttcagcgtgactcacagaattcaaaaagcgttctggagggtagcggcctccctcggaatcgtggctctgaaaggccctcaacctccagcgtgtctgaggtgtgggcagaagaccgtatcaagtgtgatcgaccatattccaggtacgatcggactaaggacacctcttacccattaggcagtcaacacagcgatggcgcttttaagaaacgggataatagtatgcagtcccggagcgggaagggcccatcttttgctgaggctaaggaaaaccccttgccccagggcagcgtggattacaataaccagaaaagaggtaaacgtgagtcacagacatctattcccgattacttctatgatagaaagagtcagacgatcaacaacgaggccttctccgggattaagatcgagaagcatttcaacgtcaatacagactatcaaaaccccgtcagatctaactcctttatcggggtgccaaatggggaagtggagatgccactaaagggcagacgcatcgggccaatcaaacccgctggtcccgtgaccgccgtcccttgcgacgacaaaattttttacaacagcgggccaaaaaggcgttccggacccattaaaccggaaaagatccttgagtcttccatccccatggaatacgcgaaaatgtggaaacccggagacgaatgcttcgctctctactgggaagacaacaagttttaccgcgcagaagtcgaagcactgcattcaagtggaatgactgccgttgtgaagttcatagactatggcaattacgaagaagttctactgtcaaatatcaaaccaatccagactgaggcgtgggaggaggaagggacctacgaccaaaccctggagtttcggcgagggggagatggtcaacctcgcagatccacccgtcccacgcagcaattttatcagcctcctagagcgcgaaattag

SEQ ID NO: 220256 - protein, 216 aa, Artificial Sequence
  derived and/or modified sequence
MTLAAYKEKMKELPLVSLFCSCFLADPLNKSSYKYEGWCGRQCRRKDESQRKDSADWRERRAQADTVDLNWCVISDMEVIELNKCTSGQSFEVILKPPSFDGVPEFNASLPRRRDPSLEEIQKKLEAAEERRKYQEAELLKHLAEKREHEREVIQKAIEENNNFIKMAKEKLAQKMESNKENREAHLAAMLERLQEKDKHAEEVRKNKELKEEASR

SEQ ID NO: 220257 - DNA, 651 bp, Artificial Sequence
  derived and/or modified sequence
atgaccctggccgcctacaaggagaagatgaaggagctgcccctggtgagcctgttctgcagctgcttcctggccgaccccctgaacaagagcagctacaagtacgagggctggtgcggcagacagtgcagaagaaaggacgagagccagagaaaggacagcgccgactggagagagagaagagcccaggccgacaccgtggacctgaactggtgcgtgatcagcgacatggaggtgatcgagctgaacaagtgcaccagcggccagagcttcgaggtgatcctgaagccccccagcttcgacggcgtgcccgagttcaacgccagcctgcccagaagaagagaccccagcctggaggagatccagaagaagctggaggccgccgaggagagaagaaagtaccaggaggccgagctgctgaagcacctggccgagaagagagagcacgagagagaggtgatccagaaggccatcgaggagaacaacaacttcatcaagatggccaaggagaagctggcccagaagatggagagcaacaaggagaacagagaggcccacctggccgccatgctggagagactgcaggagaaggacaagcacgccgaggaggtgagaaagaacaaggagctgaaggaggaggccagcagatag

SEQ ID NO: 220258 - DNA, 651 bp, Artificial Sequence
  derived and/or modified sequence
atgacactcgcagcttacaaggagaagatgaaggagttacctctcgtaagtctgttttgtagttgcttcctcgcagacccacttaacaagagctcgtacaagtacgaaggctggtgcgggcgccagtgtaggcgaaaagacgaatcccagcggaaggatagcgcggactggcgggagcgaagggctcaggctgacacagtggatctcaactggtgcgtcattagcgatatggaagttattgagttaaacaagtgcacctctgggcaatcatttgaggtgatcctgaagcctccatccttcgatggggtcccagaatttaatgcctccctgccgaggcgcagggacccatctttagaggagatccagaagaagctggaagctgccgaggagcggcgtaaataccaagaggctgaactgctgaaacatctggccgagaaacgcgagcacgaacgcgaggtgatacagaaggctattgaggagaataacaattttataaaaatggccaaggagaagctggcccagaagatggagtcaaataaggaaaatcgagaagcgcatctcgcagcaatgctggaacgactgcaggagaaggacaagcatgccgaggaggtaagaaagaataaagaactcaaagaggaagcttcccggtag

SEQ ID NO: 220259 - DNA, 651 bp, Artificial Sequence
  derived and/or modified sequence
atgaccctggccgcctacaaggagaagatgaaggagctgcccctggtgtccctcttctgcagctgcttcctggccgaccccctgaacaagagcagctacaagtatgagggctggtgtggccggcagtgcaggaggaaggatgagagccagaggaaggacagcgctgactggagggagcggcgggcccaggccgacacagtggacctgaactggtgtgtgatcagtgacatggaggtgattgagctgaacaagtgcaccagcggccagagctttgaagtcatcctgaagcccccatcctttgatggagtgcctgagttcaatgccagcctgcccaggagaagagaccccagcctggaggagatccagaagaagctggaggccgctgaggagaggaggaagtaccaggaggccgagctgctgaagcacctggccgagaagcgggagcacgagcgggaggtgatccagaaggccatcgaggagaacaacaacttcatcaagatggccaaggagaagctggcccagaagatggagagcaacaaggaaaatcgggaggcccacctggccgccatgctggagcggctgcaggagaaggacaagcatgctgaggaggtgaggaagaacaaggagctgaaggaggaggccagcaggtag

SEQ ID NO: 220260 - DNA, 651 bp, Artificial Sequence
  derived and/or modified sequence
atgaccctggccgcctacaaggagaagatgaaggagctgcccctggttagcttattctgctcctgtttcttagcagatcctctgaacaagtcttcatacaagtatgagggctggtgtgggaggcaatgccggcgtaaggacgaaagccagagaaaggatagcgccgactggcgggagagacgtgcacaagccgacacagtggaccttaactggtgtgtgatcagcgacatggaagtgatagagctgaacaaatgtacaagtggtcagagctttgaagtcatcctgaagccaccctcttttgacggcgtcccagagtttaatgcctccctgccacggcgccgggatccaagcctcgaggaaattcaaaaaaagctggaggcagcagaggaacgcagaaaataccaggaggctgagcttctaaaacatctcgcagagaagagggaacatgaacgtgaagtcatccagaaggccatagaagagaacaataattttattaaaatggcgaaagagaagctcgctcagaaaatggaatccaacaaagaaaaccgcgaagcgcatcttgccgccatgctggaacgcctgcaggaaaaagataagcatgctgaagaggtcagaaaaaacaaggaactgaaagaggaggcttctcgttag

SEQ ID NO: 220261 - DNA, 651 bp, Artificial Sequence
  derived and/or modified sequence
atgaccttggccgcttataaagaaaaaatgaaggagctgccgctggttagcctgttctgctcatgtttcttagcggaccccttaaacaagagcagctataagtacgagggatggtgtgggaggcagtgtcgaagaaaagacgagtctcaacgaaaggactctgcagattggagggagcggcgagcccaagctgataccgtggacttgaattggtgtgtgatttccgacatggaggtgatcgaactgaacaagtgcacatccggccagtcgtttgaagtgatcctgaagcctccctcatttgatggcgtgccagaatttaacgcaagtctacctaggaggcgtgatccttcgcttgaggaaattcaaaaaaaactcgaggcagcagaagaaagaagaaaataccaggaggcagagctgctgaaacacctggccgaaaaaagagaacatgaacgagaggtgatacaaaaggccatcgaagaaaataataactttattaaaatggcaaaggaaaaattggcccaaaagatggaaagtaacaaagaaaatagagaagctcacttggccgcaatgttggaaaggctgcaagaaaaggacaagcacgccgaggaagtacggaaaaacaaagaactgaaggaagaagccagccgctag

SEQ ID NO: 220262 - DNA, 2288 bp, Artificial Sequence
  derived and/or modified sequence
gaggaagagagcagctcgcttctaactggactgcacgttggtgacagcgtcccaagctggtgacagacccactctgtaactttcagctagattcagccaccagatcccagaaacatgacccttgctgcctacaaagagaagatgaaggagctcccgctggtgtccttgttctgctcctgcttcctggccgatcccctgaataagtcgtcctacaaatatgaaggctggtgtgggagacagtgtaggaggaaggatgaaagccagcggaaagacagtgctgactggagagaaagaagagctcaggcagacacggtggacctgaattggtgcgtcatttccgacatggaagtcatcgagctgaacaaatgcacctcgggccaatcctttgaagtcatcctgaagccaccctcctttgatggggttcccgagttcaacgcctccctgccaaggcggcgagacccatccctggaagagatccagaagaaactagaagcggctgaggagcgaaggaagtaccaggaagcggagctcctgaaacacctagcagagaaacgggaacatgagagagaggtgatccaaaaggccattgaggaaaacaacaacttcatcaagatggctaaggaaaaactggcccagaagatggaatccaacaaggagaacagggaggcccacctcgccgccatgttggaacggctgcaagagaaggacaagcacgccgaggaggtgcggaaaaacaaggagctgaaggaagaggcctccaggtaaagcctagaggccaaagaactttccaggtcagccggacagctccagcagctccacgttccaggcagcctcgcccgccggctgcgctcccagcactggggtttggggggaggggggtggccaaggggcgtttcctctgcttttggtgtttgtacatgttaagaattgaccagtgaagccatcctatttgtttccggggaacaatgacggggtgggagaggggagaggagagagtttgggaaagggagatggagaagaactcaaggacattgcaaccctgcccggcgcagatctgattttcacatctctacctggacattgagcctccaggcaccatgttgaggagagatgaaaaccagggcggtagaacttcagggtgaaggacagagtcctgggtggggcagcggctgcagggcgcaccagagaacccagccagaggggttgtgagtaccagtggtgttgcttccaccctgcagcaggtgggatgaggtctgtgtgtgtgtgtgaaccatcattttttgatcatcatgaccaatgaaacattgactccaagtgtccagttctttatttcccaaatgtgtcctttgggtaattgttaaaaagttctcgaaacctggctttcatccatctgatggcagatgcccctttgcttccttaattctgccattcaagcatctggagcctgggtgaggtgggttgaatcaggccagcctttggcataattgaaaggttttctcttctgttttttaaaatcccctctgtgggctaatctttattggatagcatgcactaaattgatgagaaaagaaactcaatcttcctttcaatgaactgacatcctaatatggtccccaagatgcactgtaagaaggaatttgtcttagtcacaaccgttcagactgctgtaacaaaataccttagactaagtaattgataacagaaattgattgctcacagttttggaggctgggaagtccaatatcaaggtgccagcagattcagtgtctggtgagggcttgccatctgcttcaaagatgatgcctttttgctgcatcctcacatggcagaagggaagggcaaaagggcttccttgagccttttctttaaggcactaatcccattcatgaaggtggagtcctcatgatctcacctcttaaggccctatctcttaattctgtagtgtcgggattaggattcaacctgtatattgggggagacagcaacattcacaccatagcagaagtcctccatgctttgggggtttgagattctaggtagattagaaaatacgagcaaggaaataaagtgtttgctagtagaaggcaaaggaggcatccagacccagcagtcttggtctccaggacactgaaccatggctggaaaagaagctctcctcctcccttcccctgcaaacatgagtgcaggggctgcctgtgttaaccgggtcccaggacctcttcccactctgctctgcacactgtgtagttttttacagctttgcaaataaaccctttggtatagccttt

SEQ ID NO: 220263 - protein, 172 aa, Artificial Sequence
  derived and/or modified sequence
MRRQPAKVAALLLGLLLECTEAKKHCWYFEGLYPTYYICRSYEDCCGSRCCVRALSIQRLWYFWFLLMMGVLFCCGAGFFIRRRMYPPPLIEEPAFNVSYTRQPPNPGPGAQQPGPPYYTDPGGPGMNPVGNSMAMAFQVPPNSPQGSVACPPPPAYCNTPPPPYEQVVKAK

SEQ ID NO: 220264 - DNA, 519 bp, Artificial Sequence
  derived and/or modified sequence
atgagaagacagcccgccaaggtggccgccctgctgctgggcctgctgctggagtgcaccgaggccaagaagcactgctggtacttcgagggcctgtaccccacctactacatctgcagaagctacgaggactgctgcggcagcagatgctgcgtgagagccctgagcatccagagactgtggtacttctggttcctgctgatgatgggcgtgctgttctgctgcggcgccggcttcttcatcagaagaagaatgtaccccccccccctgatcgaggagcccgccttcaacgtgagctacaccagacagccccccaaccccggccccggcgcccagcagcccggccccccctactacaccgaccccggcggccccggcatgaaccccgtgggcaacagcatggccatggccttccaggtgccccccaacagcccccagggcagcgtggcctgcccccccccccccgcctactgcaacacccccccccccccctacgagcaggtggtgaaggccaagtag

SEQ ID NO: 220265 - DNA, 519 bp, Artificial Sequence
  derived and/or modified sequence
atgaggcggcaacccgctaaggtggctgctctcctgctgggcctcctgctggaatgtaccgaggctaaaaagcattgctggtactttgagggtctctaccccacttactacatctgcaggtcatacgaggattgctgcgggtcccgctgctgtgtgagggctctttctatccaacggctctggtatttttggttcttgctgatgatgggggttctgttctgttgcggagctggattcttcataagaagaagaatgtaccctccaccccttatcgaagagccagctttcaatgtttcctacactaggcagccccccaaccctgggcctggagcacagcaacccgggcccccctactatacagatcccggtggccccggaatgaacccggtgggtaatagtatggctatggcctttcaggtccctcccaactcgcctcagggctctgtggcttgccctccaccacctgcatactgcaacacacccccccctccttacgagcaggtggtgaaggcaaagtag

SEQ ID NO: 220266 - DNA, 519 bp, Artificial Sequence
  derived and/or modified sequence
atgaggcggcagcctgccaaggtggccgccctgctgctgggcctgctgctggagtgcacagaggccaagaagcactgctggtactttgagggcctgtaccccacctactacatctgccgctcctatgaggactgctgcggcagccgctgctgcgtgcgggccctgagcatccagaggctgtggtacttctggttcctgctgatgatgggcgtgctcttctgctgcggggccggcttcttcatcagaagaaggatgtaccccccacccctgattgaggagcccgccttcaacgtgtcctacacccggcagccccccaaccctggccctggggcccagcagcccggccccccctactacacagaccccggcggccctggcatgaaccctgtgggcaacagcatggccatggccttccaggtgccccccaacagcccccagggctctgtggcctgccccccacctccagcctactgcaacaccccacctccaccctatgagcaggtggtgaaggccaagtag

SEQ ID NO: 220267 - DNA, 519 bp, Artificial Sequence
  derived and/or modified sequence
atgcggcggcagcccgccaaggtggccgccctgctgctgggcctgctgctggagtgcaccgaggccaagaagcactgctggtactttgagggcttatacccaacatattacatctgtcggtcatacgaggactgctgtggctctagatgctgtgtgcgagccctgagcatccagcgtctctggtatttttggtttctgctaatgatgggagtactgttctgctgcggtgccggattcttcattagacggaggatgtacccgccccctctgatagaagaaccagcttttaatgtctcatacacacggcagccgcctaaccctgggcccggagcccagcagccagggccgccttactacactgatcccggcggccccggcatgaaccctgtgggcaatagcatggctatggcctttcaggtccctcctaatagcccacagggaagtgtggcatgccctcctccccctgcctactgcaacaccccaccccccccatatgagcaggtggttaaggccaagtag

SEQ ID NO: 220268 - DNA, 519 bp, Artificial Sequence
  derived and/or modified sequence
atgagaagacaacccgctaaggtcgctgcactgctgctgggcctgcttctagaatgcacagaagctaaaaaacactgctggtatttcgaaggtctgtaccctacttattacatctgtcggtcctatgaggactgctgcggctcaagatgctgtgtgcgggcactgtccatccagaggctgtggtacttttggtttttgttgatgatgggtgtgctcttttgctgtggggctggcttttttattaggagacgcatgtacccaccacccttgatagaggaaccggctttcaatgtatcctacaccaggcaaccccctaatcctggaccaggggctcaacagcccggtcccccatactatacagatcccggtggtcccggaatgaaccctgtgggcaattcgatggctatggccttccaggtccctccaaactccccacaaggctcagtggcttgccctccccctcctgcttattgtaataccccccctccgccttacgaacaggtcgtaaaagcaaagtag

SEQ ID NO: 220269 - protein, 323 aa, Artificial Sequence
  derived and/or modified sequence
MGNLLKVLTREIENYPHFFLDFENAQPTEGEREIWNQISAVLQDSESILADLQAYKGAGPEIRDAIQNPNDIQLQEKAWNAVCPLVVRLKRFYEFSIRLEKALQSLLESLTCPPYTPTQHLEREQALAKEFAEILHFTLRFDELKMRNPAIQNDFSYYRRTISRNRINNMHLDIENEVNNEMANRMSLFYAEATPMLKTLSNATMHFVSENKTLPIENTTDCLSTMTSVCKVMLETPEYRSRFTSEETLMFCMRVMVGVIILYDHVHPVGAFCKTSKIDMKGCIKVLKEQAPDSVEGLLNALRFTTKHLNDESTSKQIRAMLQ

SEQ ID NO: 220270 - protein, 94 aa, Artificial Sequence
  derived and/or modified sequence
MGNLLKVLTREIENYPHFFLDFENAQPTEGEREIWNQISAVLQDSESILADLQAYKGAGPEIRDAIQNPNDIQLQEKAWNAVCPLVVRLKRFYE

SEQ ID NO: 220271 - protein, 87 aa, Artificial Sequence
  derived and/or modified sequence
MGNLLKVLTREIENYPHFFLDFENAQPTEGEREIWNQISAVLQDSESILADLQAYKGAGPEIRDAIQNPNDIQLQEKAWNAVCPLVV

SEQ ID NO: 220272 - DNA, 972 bp, Artificial Sequence
  derived and/or modified sequence
atgggcaacctgctgaaggtgctgaccagagagatcgagaactacccccacttcttcctggacttcgagaacgcccagcccaccgagggcgagagagagatctggaaccagatcagcgccgtgctgcaggacagcgagagcatcctggccgacctgcaggcctacaagggcgccggccccgagatcagagacgccatccagaaccccaacgacatccagctgcaggagaaggcctggaacgccgtgtgccccctggtggtgagactgaagagattctacgagttcagcatcagactggagaaggccctgcagagcctgctggagagcctgacctgccccccctacacccccacccagcacctggagagagagcaggccctggccaaggagttcgccgagatcctgcacttcaccctgagattcgacgagctgaagatgagaaaccccgccatccagaacgacttcagctactacagaagaaccatcagcagaaacagaatcaacaacatgcacctggacatcgagaacgaggtgaacaacgagatggccaacagaatgagcctgttctacgccgaggccacccccatgctgaagaccctgagcaacgccaccatgcacttcgtgagcgagaacaagaccctgcccatcgagaacaccaccgactgcctgagcaccatgaccagcgtgtgcaaggtgatgctggagacccccgagtacagaagcagattcaccagcgaggagaccctgatgttctgcatgagagtgatggtgggcgtgatcatcctgtacgaccacgtgcaccccgtgggcgccttctgcaagaccagcaagatcgacatgaagggctgcatcaaggtgctgaaggagcaggcccccgacagcgtggagggcctgctgaacgccctgagattcaccaccaagcacctgaacgacgagagcaccagcaagcagatcagagccatgctgcagtag

SEQ ID NO: 220273 - DNA, 285 bp, Artificial Sequence
  derived and/or modified sequence
atgggcaacctgctgaaggtgctgaccagagagatcgagaactacccccacttcttcctggacttcgagaacgcccagcccaccgagggcgagagagagatctggaaccagatcagcgccgtgctgcaggacagcgagagcatcctggccgacctgcaggcctacaagggcgccggccccgagatcagagacgccatccagaaccccaacgacatccagctgcaggagaaggcctggaacgccgtgtgccccctggtggtgagactgaagagattctacgagtag

SEQ ID NO: 220274 - DNA, 264 bp, Artificial Sequence
  derived and/or modified sequence
atgggcaacctgctgaaggtgctgaccagagagatcgagaactacccccacttcttcctggacttcgagaacgcccagcccaccgagggcgagagagagatctggaaccagatcagcgccgtgctgcaggacagcgagagcatcctggccgacctgcaggcctacaagggcgccggccccgagatcagagacgccatccagaaccccaacgacatccagctgcaggagaaggcctggaacgccgtgtgccccctggtggtgtag

SEQ ID NO: 220275 - DNA, 972 bp, Artificial Sequence
  derived and/or modified sequence
atggggaaccttctgaaggtgctgacacgggaaatcgaaaattacccccacttcttcttggacttcgagaatgcccagcctaccgaaggtgagcgcgagatttggaatcaaatctctgctgttctccaagacagtgagtccatattggccgacctgcaggcttacaaaggggcaggccccgagatccgggacgccattcagaatccgaacgacattcagctacaggagaaggcatggaacgcggtttgccccctcgtcgtgaggctcaagagattctatgagttcagcatcaggctggagaaggccctgcagtcgctgttggagtctctgacttgtccaccgtacaccccgacccagcacctggaaagagaacaggcccttgctaaggagtttgccgaaatcttgcactttaccctccgattcgacgagctgaaaatgagaaatcctgctatacaaaacgacttttcctactacaggcgaactattagccgaaatcggatcaacaacatgcaccttgacattgaaaatgaggtcaataacgagatggcaaaccgcatgagcctgttttacgctgaggctacgccaatgctgaagactctgtccaatgctacaatgcacttcgtatcagagaacaaaaccctgccaatcgaaaacaccaccgactgcctctcaaccatgacatcagtgtgcaaggtaatgctggagacccccgagtaccggtcaaggttcacgagtgaagagacccttatgttttgcatgcgtgtcatggtgggcgtcatcattctttatgaccacgtgcacccggtgggggccttctgtaaaactagcaagatcgacatgaaaggatgcatcaaagtgctgaaggagcaggctcccgattctgtggaaggcctgctgaacgcgctcagattcaccaccaaacatctcaacgacgaatcaaccagcaaacagatccgagccatgctccaatag

SEQ ID NO: 220276 - DNA, 972 bp, Artificial Sequence
  derived and/or modified sequence
atgggcaacttactaaaagtgttgacacgagaaatcgagaactacccgcatttttttttggattttgaaaatgcccagcccactgagggtgagcgtgaaatatggaaccagatcagcgccgtgctgcaggacagcgaatcaatactcgcagacctgcaggcttacaagggggcgggtccagagataagagatgctatacagaaccccaacgatatccagctccaggagaaagcctggaatgccgtttgccccctggtggtgcggttgaagaggttttacgaattctcgataaggctcgaaaaggcacttcagtctttgctcgagagcctgacctgtcctccttacaccccaacccaacatctcgaacgtgaacaggccttggcaaaggaatttgcagaaatactgcactttacactgcggtttgatgaactgaaaatgagaaacccggcaatccagaacgattttagttactatcgacgaactatttcccggaatcgcatcaacaatatgcacttggacattgagaacgaagtaaacaacgagatggcaaaccgcatgtcactcttttacgcagaggcaacccccatgctgaagacacttagtaacgccactatgcatttcgtgtcggaaaacaagaccttacccatagagaataccaccgattgcctctcaaccatgacgtccgtgtgcaaggtgatgttggagacgccagaatacagatctcggttcacttctgaggagactttaatgttctgcatgagagttatggtcggagttatcatcttatacgatcatgtgcacccggtaggagcattttgcaagacaagtaaaatcgacatgaagggttgtattaaggtcctgaaagagcaggctcccgatagcgttgaggggttgttgaatgctctgcgttttactacaaagcatttgaacgacgagtctactagcaaacagatccgcgctatgctccagtag

SEQ ID NO: 220277 - DNA, 972 bp, Artificial Sequence
  derived and/or modified sequence
atgggaaacctccttaaagttctgactcgggaaatcgagaattatccgcattttttcctcgactttgagaacgcacagccaaccgagggagagagagagatttggaaccaaatatccgccgtgctgcaggattccgagtctatcctggcagacctgcaggcgtacaagggtgctggcccagagattagagacgccattcaaaaccccaatgacatccagttacaagaaaaggcttggaatgccgtgtgtccactagtggttaggctcaaaaggttttatgaattttccatcaggctcgaaaaggctctccaatctcttttggagagtttgacctgcccaccctataccccgactcagcatctagagagggaacaagccctggccaaggaatttgccgaaatcctccatttcacactgcggttcgacgagctaaagatgcggaaccccgccatccaaaacgactttagctattatcggaggacaatctctagaaacaggataaacaacatgcacctggatatcgaaaacgaagtaaacaacgaaatggcaaatcgcatgtccctcttctacgctgaggccacaccgatgctcaagactcttagtaacgccactatgcatttcgtgtcggaaaataagactctaccaatcgaaaacacaacagattgtctttcaacaatgacgtcagtatgtaaggttatgttggaaacgcctgagtatagaagccgctttacctctgaggagacactgatgttctgcatgcgcgtcatggtgggagtcatcattctctacgatcatgtgcatccagtcggagcattctgtaaaacatcaaagatagacatgaaggggtgtatcaaggtgctgaaagaacaggcccctgactcagtagagggcctgctcaatgccttgcgtttcacaacgaaacacttaaatgacgagagtacaagcaaacagatcagagctatgttgcagtag

SEQ ID NO: 220278 - DNA, 285 bp, Artificial Sequence
  derived and/or modified sequence
atggggaatctcctgaaggtgctgacaagagagatagaaaactacccccacttctttcttgacttcgaaaatgctcaacccaccgaaggggagagggagatatggaaccagataagcgccgtgctccaagactcagagtcaatcctggccgatctgcaggcttataagggcgctggccccgaaattagggacgcaattcagaatcctaacgacatccaactgcaggagaaggcatggaacgcagtgtgtccactggttgtgaggctcaagcgtttctacgagtag

SEQ ID NO: 220279 - DNA, 264 bp, Artificial Sequence
  derived and/or modified sequence
atgggcaatttgctgaaggtgctgactcgcgagatcgagaattatcctcatttcttcctcgacttcgaaaacgcgcagccaactgaaggcgaaagggaaatctggaatcagataagcgctgtactacaagacagtgaatccatactggcagacctgcaggcatataagggtgccgggcctgagatccgcgacgctatccagaaccccaatgacatccagctacaggagaaggcttggaacgctgtatgtcctctagtggtctag

SEQ ID NO: 220280 - DNA, 1120 bp, Artificial Sequence
  derived and/or modified sequence
acacatcttcactcttgcactagtttttggtgttatcttctgctatcctgtcttgaagctctttttcagctagataccttgacttttctgaaaaactaaaaccagaagcatttcacgaagctaagcacaggacagaaggtttgctgggatgggaaacctgctcaaagtccttaccagggaaattgaaaactatccacactttttcctggattttgaaaatgctcagcctacagaaggagagagagaaatctggaaccagatcagcgccgtccttcaggattctgagagcatccttgcagacctgcaggcttacaaaggcgcaggcccagagatccgagatgcaattcaaaatcccaatgacattcagcttcaagaaaaagcttggaatgcggtgtgccctcttgttgtgaggctaaagagattttacgagttttccattagactagaaaaagctcttcagagtttattggaatctctgacttgtccaccctacacaccaacccaacacctggaaagggaacaggccctggcaaaggagtttgccgaaattttacattttacccttcgattcgatgagctgaagatgaggaacccggctattcagaatgacttcagctactacagaagaacaatcagtcgcaaccgcatcaacaacatgcacctagacattgagaatgaagtcaataatgagatggccaatcgaatgtccctcttctatgcagaagccacgccaatgctgaaaacccttagcaatgccacaatgcactttgtctctgaaaacaaaactctgccaatagagaacaccacagactgcctcagcacaatgacaagtgtctgtaaagtcatgctggaaactccggagtacagaagtaggtttacgagtgaagagaccctgatgttctgcatgagggtgatggtgggagtcatcatcctctatgaccatgtccaccctgtgggagctttctgcaagacatccaagatcgatatgaaaggctgcataaaagttttgaaggagcaggccccagacagtgtggaggggctgctaaatgccctcaggttcactacaaagcacttgaacgatgaatcaacttccaaacagattcgagcaatgcttcagtag

SEQ ID NO: 220281 - DNA, 4670 bp, Artificial Sequence
  derived and/or modified sequence
agaggcgtactcggcggcggcggagcgggcggcagagcagggcggcggcgactcgcagggtaccaccatcttaaggacagaaaagctacaggactctaggaggccaccgtcctgatttgggaagtccaacttactttggccagacagcagctaagctggttcatcccatcagcctggattggtgaaactgaatcacaggagatatttccaggtttgctgggatgggaaacctgctcaaagtccttaccagggaaattgaaaactatccacactttttcctggattttgaaaatgctcagcctacagaaggagagagagaaatctggaaccagatcagcgccgtccttcaggattctgagagcatccttgcagacctgcaggcttacaaaggcgcaggcccagagatccgagatgcaattcaaaatcccaatgacattcagcttcaagaaaaagcttggaatgcggtgtgccctcttgttgtgaggctaaagagattttacgagttttccattagactagaaaaagctcttcagagtttattggaatctctgacttgtccaccctacacaccaacccaacacctggaaagggaacaggccctggcaaaggagtttgccgaaattttacattttacccttcgattcgatgagctgaagatgaggaacccggctattcagaatgacttcagctactacagaagaacaatcagtcgcaaccgcatcaacaacatgcacctagacattgagaatgaagtcaataatgagatggccaatcgaatgtccctcttctatgcagaagccacgccaatgctgaaaacccttagcaatgccacaatgcactttgtctctgaaaacaaaactctgccaatagagaacaccacagactgcctcagcacaatgacaagtgtctgtaaagtcatgctggaaactccggagtacagaagtaggtttacgagtgaagagaccctgatgttctgcatgagggtgatggtgggagtcatcatcctctatgaccatgtccaccctgtgggagctttctgcaagacatccaagatcgatatgaaaggctgcataaaagttttgaaggagcaggccccagacagtgtggaggggctgctaaatgccctcaggttcactacaaagcacttgaacgatgaatcaacttccaaacagattcgagcaatgcttcagtagagctctgctcaaagaagaggatctatgtgctgacctcagaagatgtatatgtttacataatttaatacagattgatgttaatacttgtgtatttacataaccgtttccttcttgtcactgaaatatatggaccttaatttgtatcctgactgactcaacccagcagagcataaattgacttgagagccttacctttgatgtctgaaatgaaacccccttctccaaaggcaaaattcggagactttgatctttgctactggagtcctttaacaacatctataacgataaaaaattcctaattgtttgtggtagtattttaattctagatgtgttatctctctgggaagtatagtttatagaaacacaaaatatttgatttcctgtgtcggctcagctacaagaaacacaactgttatcttgacagaggaagagaggaatccaagaaaaatgcatgtggagaattaaacccaagtgtttcgaattcagcacaccccctctctgtcctcagactgcagtccacacgtgcaacttttctgtttgcacgtgttttattaatcagcatactccttttctgtttggatttatatccctctaatgttctcctttaatttcacatgaaaaaaaaatctcctgtatttttttcagttagtgggagagcagcagaaatagatagatgtgctgttgccactggactgatgaaggtggctgtcttggaactgggagacaggtcctcagaggtgcactcaggcaacaggacagccatctctctgcttcagccctctgcctacagggattagggaaatggagctctggctttgaagttatttgtgagtttagcaaccttccagttacctgcagagttctgggtgcacagccacccctcataagagccctgttctctgaagaccattcatatgagaacaaaggtctaggatactgcattagttaccagaaaactaggggaatttagagggaaaaaaaatccatgttttctatttcccaggtttttaaaaagtagctcttccccaaccccgttgctagcttgttgcaatataaaagccctggtgcacctgaatttactcctggccttactaatgattcataatgtgatcttgagaaatgtgtttaagctttctgagtcttaacctccttgtctctaaaatgggcaattaaaacaatcttcaagagccctgtaaggttaatgccgataaaatgactgactccgcccttcttccttagtacgtagtatccagcaagcatttgccccaccttgtcttgttgatgaacaatattatgaagcctgcagtcattctctctgtacatcagagcttagttcgaatggaatcatgaaaatctctgattctgacctcctaaggaaaaatgaaacccagaggatgtggtcatacaggatggctcccatgtgggcctagaacccaggatgcttcactcttgactccatgctcttccttttataccatgtggctgtgaatacatactatgggatgggattcaacccttctaagtaaatcctcagtctggtctatattgttacttgcctgtttccactagaaggagtcacccaggcatttagtgaatgataatcctagaagttgagtctgagtacatcagagtttggcattatttgcaacatcccaggaatgagctataagactccattgctttctggactttagtgaccagctgatcttcccttggatcctccaataaaggggaaaaaatacttgtcttatgttgttttagcaagggagttcagccaagtgacaggaaagattccctggtctgcatctaaacattagtcaacagaaggaaaaggctcttttccttggagattttcaagttgaaaaagtacagctgcttggatggagtttctctcatcagaatagaaatatgctaggtggtcttcaagacctttttgaacctacagattctaaaccttagaggaagccagaatatgtgatcataccaggtgaggaaagttaggagatattcatcttaagagatatcctatttggcagtcacatgttacacttgagcaacaattgtctaggctagaaatatagaaccacacaatatttatcatcattgggtcaatttctccccctctatcaagtgaggagattaaggcttaaagaaaggaaaggacttgccagccaccacagggctcatgaggggcttgaacccatgtcgtgtgtctctaccacagctgactctcagctggctaatggagaaaatgtgaggaattacctgtcaaattagattgagctcagagtaaatagatgagcacatttataactctaaattagactttctatcaaatgggaccaaacatatggaaggggctgctgtcctgcctcaatttagccaagacttgtcttgtctcaaagccaagactcagcagtacatggattctgagaagtccagggtctgaattgttgtctctgattactggaaggacaggttaactgaatgtctgtgatcactaacaggtgatgggctttgtgcccactccagagatattgtgggagacaaattcttttaacagcctgtcctcccggcatcaggagtcattgaacaatcatggattgttgtgtttgggatttttttttttttggctttgtttttggtttttgtgtgtgtgtgtgtgtgctgcatgcacatgcgtccaagacttacgggtggtttaggggaaagtgctagcaacagtgtcaatgtcattgttaactatatttcatatttgaggtctcattgttttcaaataaacagtgttttccatgactgagatatttatttttgggaaagcaacgaggtaaaaattatgtttctcagatgcactgctactttggcgttattactgtgttctcagaaactcgttgtgcaccactaggaattagtagtagaaaaaaaaaaacaataacaaaaaaaaaaaacaactggaaatggatgtcttcacattaggggtggagtattaacaaccagaaagaaagtttggatattaccttttaactactagttaacatcatgcttgatcaacatttgctcctagttatcaccattaaattaagaccttaatggtaaactgaggttactgatgcatcatcacatttaagtaaaaataatttcatgttttccccaaagaaaaattaagcctcccaatcttaggatccaattgtgcagtagaattcagagacttctcattcaatcttgtatcctatgcagctacaaatattttttaaatgttagtaataaacattggaattttgtcttaaagagttcaaaaccttggaacccagttttctcactacgtctataaaggccattacagacccaaggctgttttgcagttttcatatgttgtttgctgaagtcattgtaattttttttgcctgctttgcctttttttctacaggagttttgagtgtgaaatgaaaattaaagtttggtacatatatttaaaaa

SEQ ID NO: 220282 - DNA, 1386 bp, Artificial Sequence
  derived and/or modified sequence
gtactcggcggcggcggagcgggcggcagagcagggcggcggcgactcgcagggtaccaccatcttaaggacagaaaagctacaggactctaggaggccaccgtcctgatttgggaagtccaacttactttggccagacagcagctaagctggttcatcccatcagcctggattggtgaaactgaatcacaggagatatttccaggcccagtgtaaggaatcatggtcaggagtcatgaaaaaaatgccaacacactgagatggccacacatcttcactcttgcactagtttttggtgttatcttctgctatcctgtcttgaagctctttttcagctagataccttgacttttctgaaaaactaaaaccagaagcatttcacgaagctaagcacaggacagaaggtttgctgggatgggaaacctgctcaaagtccttaccagggaaattgaaaactatccacactttttcctggattttgaaaatgctcagcctacagaaggagagagagaaatctggaaccagatcagcgccgtccttcaggattctgagagcatccttgcagacctgcaggcttacaaaggcgcaggcccagagatccgagatgcaattcaaaatcccaatgacattcagcttcaagaaaaagcttggaatgcggtgtgccctcttgttgtgaggctaaagagattttacgagttttccattagactagaaaaagctcttcagagtttattggaatctctgacttgtccaccctacacaccaacccaacacctggaaagggaacaggccctggcaaaggagtttgccgaaattttacattttacccttcgattcgatgagctgaagatgaggaacccggctattcagaatgacttcagctactacagaagaacaatcagtcgcaaccgcatcaacaacatgcacctagacattgagaatgaagtcaataatgagatggccaatcgaatgtccctcttctatgcagaagccacgccaatgctgaaaacccttagcaatgccacaatgcactttgtctctgaaaacaaaactctgccaatagagaacaccacagactgcctcagcacaatgacaagtgtctgtaaagtcatgctggaaactccggagtacagaagtaggtttacgagtgaagagaccctgatgttctgcatgagggtgatggtgggagtcatcatcctctatgaccatgtccaccctgtgggagctttctgcaagacatccaagatcgatatgaaaggctgcataaaagttttgaaggagcaggccccagacagtgtggaggggctgctaaatgccctcaggttcactacaaagcacttgaacgatgaatcaacttccaaacagattcgagcaatgcttcagtag

SEQ ID NO: 220283 - DNA, 544 bp, Artificial Sequence
  derived and/or modified sequence
agaaggggcaggggcgaccgtgctggggcgggtccgcaccagctcctgggagcagagagcagagccgggcaaagagatggggttgtccaggctaggcagggtaccaccatcttaaggacagaaaagctacaggactctaggaggccaccgtcctgatttgggaagtccaacttactttggccagacagcagctaagctggttcatcccatcagcctggattggtgaaactgaatcacaggagatatttccaggtttgctgggatgggaaacctgctcaaagtccttaccagggaaattgaaaactatccacactttttcctggattttgaaaatgctcagcctacagaaggagagagagaaatctggaaccagatcagcgccgtccttcaggattctgagagcatccttgcagacctgcaggcttacaaaggcgcaggcccagagatccgagatgcaattcaaaatcccaatgacattcagcttcaagaaaaagcttggaatgcggtgtgccctcttgttgtgaggctaaagagattttacgag

SEQ ID NO: 220284 - DNA, 579 bp, Artificial Sequence
  derived and/or modified sequence
ttaatagggtgggcagaaagggactgggagcgagactgggttcagaatctcaagtaatttggagtgtgcctagggattgggatgatttggctgggcattaatttgaagatccttttgtgacacgcctggcccctcagccacagtcaaaagcagggtaccaccatcttaaggacagaaaagctacaggactctaggaggccaccgtcctgatttgggaagtccaacttactttggccagacagcagctaagctggttcatcccatcagcctggattggtgaaactgaatcacaggagatatttccaggtttgctgggatgggaaacctgctcaaagtccttaccagggaaattgaaaactatccacactttttcctggattttgaaaatgctcagcctacagaaggagagagagaaatctggaaccagatcagcgccgtccttcaggattctgagagcatccttgcagacctgcaggcttacaaaggcgcaggcccagagatccgagatgcaattcaaaatcccaatgacattcagcttcaagaaaaagcttggaatgcggtgtgccctcttgttgtgag

SEQ ID NO: 220285 - DNA, 972 bp, Artificial Sequence
  derived and/or modified sequence
atgggcaacctgctgaaggtgctgacccgggagattgagaactacccccacttcttcctggactttgaaaatgcccagcccacagaaggagagcgggagatctggaaccagatctctgctgtgctgcaggacagcgagagcatcctggccgacctgcaggcctacaagggggccggccctgagatcagagatgccatccagaaccccaatgacatccagctgcaggagaaggcctggaatgctgtgtgccccctggtggtgcggctgaagcgcttctatgagttcagcatccggctggagaaggccctgcagagcctgctggagagcctgacctgccccccctacacccccacccagcacctggagcgggagcaggccctggccaaggagtttgctgagatcctgcacttcaccctgcgctttgatgagctgaagatgagaaatcctgccatccagaatgacttctcctactacagaaggaccatcagcaggaaccgcatcaacaacatgcacctggacattgaaaatgaggtgaacaatgagatggccaacaggatgagcctcttctatgcagaggccacccccatgctgaagaccctgagcaatgccaccatgcactttgtgtctgagaacaagaccctgcccatcgagaacaccacagactgcctgagcaccatgacctctgtgtgcaaggtgatgctggagaccccagagtaccgcagccgcttcaccagcgaggagaccctgatgttctgcatgagggtgatggtgggcgtcatcatcctgtatgaccacgtgcaccctgtgggcgccttctgcaagaccagcaagattgacatgaagggctgcatcaaggtgctgaaggagcaggccccagacagcgtggagggcctgctgaatgccctgcgcttcaccaccaagcacctgaatgatgagagcaccagcaagcagatccgggccatgctgcagtag

SEQ ID NO: 220286 - DNA, 285 bp, Artificial Sequence
  derived and/or modified sequence
atgggcaacctgctgaaggtgctgacccgggagattgagaactacccccacttcttcctggactttgaaaatgcccagcccacagaaggagagcgggagatctggaaccagatctctgctgtgctgcaggacagcgagagcatcctggccgacctgcaggcctacaagggggccggccctgagatcagagatgccatccagaaccccaatgacatccagctgcaggagaaggcctggaatgctgtgtgccccctggtggtgcggctgaagcgcttctatgaatag

SEQ ID NO: 220287 - DNA, 264 bp, Artificial Sequence
  derived and/or modified sequence
atgggcaacctgctgaaggtgctgacccgggagattgagaactacccccacttcttcctggactttgaaaatgcccagcccacagaaggagagcgggagatctggaaccagatctctgctgtgctgcaggacagcgagagcatcctggccgacctgcaggcctacaagggggccggccctgagatcagagatgccatccagaaccccaatgacatccagctgcaggagaaggcctggaatgctgtgtgccccctggtggtgtag

SEQ ID NO: 220288 - DNA, 972 bp, Artificial Sequence
  derived and/or modified sequence
atgggcaacctgctgaaggtgctgacccgggagatcgagaactaccctcacttcttcttggacttcgagaacgcacagccgacagaaggggaaagggagatctggaatcagattagtgctgtgcttcaggattcagaaagcatcctggcagatctgcaggcttacaagggagctggaccagagatcagagatgccattcagaacccaaatgatatccagttacaagagaaggcctggaacgcagtgtgtcccctggtggtcagacttaaacgattctacgagttcagcattcgcctagaaaaggctctgcaaagtctgcttgaatctttgacatgcccgccctacaccccgacccagcacctggagcgtgagcaagctctggctaaagagtttgcagagatcctgcattttacactgcgcttcgacgaactgaaaatgcgtaaccccgcgattcagaacgatttcagttattatagaaggactatttctagaaatcggataaataacatgcacctcgacattgagaatgaagtcaacaatgaaatggcaaatcggatgtccttgttctacgcagaagccacgcccatgctgaagactttatcgaacgccactatgcatttcgtgtctgagaataagactctgccaatagaaaataccaccgattgcctttctaccatgacgagcgtttgcaaagtgatgctggagactccagaatatcggagccggttcacctcagaggagactctgatgttctgcatgcgggtaatggtcggcgtaatcattctctatgaccacgttcatccagtaggggccttctgcaagacatctaagatcgacatgaaagggtgtatcaaggtactgaaggaacaggcgcccgactcagttgagggacttctgaatgccctgcggtttaccacaaagcatttgaatgacgagtccacaagcaaacagatcagagcaatgttacagtag

SEQ ID NO: 220289 - DNA, 972 bp, Artificial Sequence
  derived and/or modified sequence
atgggcaacctgctgaaggtgctgacccgggagatcgagaactacccccacttctttcttgacttcgaaaatgcccagcctacagagggcgagcgcgaaatctggaaccagatcagcgcagtcctgcaagactccgagtcaattctggcagacttgcaagcctataagggggctggtcctgagattcgtgatgcaatacagaatccaaatgacattcagctgcaggaaaaggcgtggaacgccgtctgcccactggtggtacggctgaaaagattctacgaattctcaattcgcctggaaaaggctttgcagtcactcctggagtccctgacatgccccccttacacccccacacagcacctcgaaagagaacaagctctggctaaagagtttgccgagatcttacattttactctacgctttgatgagcttaagatgaggaaccctgctatccagaatgacttcagttactataggaggaccatttctcgcaaccggattaacaacatgcacctggacattgagaacgaggtgaacaacgaaatggcgaatcggatgagtcttttttatgcagaggccacccccatgcttaagactctgagcaacgctacaatgcatttcgtaagtgagaacaaaactttgcctattgagaacacgacggactgcttgagtaccatgactagcgtctgtaaggttatgcttgaaacgcctgagtatcggtcacgatttactagcgaggaaactctcatgttttgtatgcgcgtgatggtgggagtgataatactctatgaccacgtgcaccccgtgggcgctttttgtaaaacctccaagattgacatgaaggggtgcatcaaagtgcttaaggaacaagccccggatagcgtcgaaggactgttgaacgcattgcgattcaccaccaagcacctgaatgatgagtctaccagtaagcagattcgagccatgttgcagtag

SEQ ID NO: 220290 - DNA, 972 bp, Artificial Sequence
  derived and/or modified sequence
atgggcaacctgctgaaggtgctgacccgggagatcgagaactacccccatttcttcctagacttcgaaaacgctcagccaactgagggcgaacgagagatatggaaccagatctcagccgtgctccaggacagcgagtcaatcctcgctgatctccaagcttataagggtgccggcccagagattcgcgacgctatacagaacccaaatgacatccagctgcaggagaaggcctggaacgcagtatgccctttggtcgtccgactgaaaaggttttacgagttttcaatccgcctggagaaggcattacaatctctccttgagagcctgacatgcccgccttacacccccacgcaacacttggaacgcgagcaggccctcgccaaggagtttgccgaaattcttcacttcactctgaggtttgacgaattgaagatgaggaatcctgctattcagaatgattttagctactacaggcgcactatctctcggaaccggattaacaatatgcacctggacatcgagaacgaagtcaacaacgaaatggccaacaggatgtccctgttttacgctgaagccacaccaatgctaaagactctgtccaacgccaccatgcatttcgtcagtgaaaacaagacattgcctatcgaaaatacaactgactgcttgagcaccatgacaagcgtgtgcaaggtaatgctagagaccccagagtatagaagtcggttcacatctgaagaaacgttaatgttctgtatgagggtaatggtcggagtcatcattctctatgaccacgtgcaccctgtgggagcattctgtaagacatccaagatcgacatgaagggatgcatcaaagtcctcaaggagcaagcccccgattccgtggagggcttactcaatgctcttagattcaccaccaagcatctcaacgacgagtccacttctaaacagattagagctatgctgcagtag

SEQ ID NO: 220291 - DNA, 285 bp, Artificial Sequence
  derived and/or modified sequence
atgggcaacctgctgaaggtgctgacccgggagatcgagaactaccctcacttcttcttagattttgaaaatgcccagcccaccgaaggcgagcgtgaaatatggaaccaaattagcgctgtgttacaggattcagaatctatcctcgctgacctgcaggcctacaaaggagccggacccgagatcagggacgccatccagaacccaaacgacatccagctgcaggaaaaagcttggaacgccgtttgtcctctagtggtgagactgaaaagattttatgagtag

SEQ ID NO: 220292 - DNA, 264 bp, Artificial Sequence
  derived and/or modified sequence
atgggcaacctgctgaaggtgctgacccgggagatcgagaactacccacatttttttctagatttcgagaatgcacagccaacagaaggggagagagagatctggaaccagatcagtgctgtgttacaggatagcgaatccatcttagccgaccttcaggcctacaagggagccggtcccgagatccgggatgccattcagaatcctaacgacatccagctgcaggagaaagcctggaacgccgtttgccctttggtcgtgtag

SEQ ID NO: 220293 - DNA, 972 bp, Artificial Sequence
  derived and/or modified sequence
atgggaaatctcctgaaagtcctgacacgtgagatcgagaattacccacatttctttttggatttcgaaaatgcccagcctactgaaggagaaagagaaatctggaaccagatttcagcagtgctgcaggatagcgaaagcattctcgcggatcttcaagcctacaagggcgcaggcccagaaatcagggacgcaatacagaatccgaacgatattcagttgcaggagaaggcttggaatgcagtgtgtccccttgtggtgaggcttaagcgcttttacgaattctccattcggctggagaaagcgctccagtcactgctggaatctctgacttgcccaccctatacacccacacaacaccttgaacgggaacaggcgctggcaaaagagttcgcagagattctgcatttcactctccggttcgacgagttgaagatgcgcaatccagcgattcagaacgactttagctactatcgcagaactatttcaagaaacagaattaacaacatgcacttggatattgaaaatgaggtcaacaacgaaatggctaataggatgagcctcttttacgcagaagccactcccatgctcaaaaccctgagcaatgcaactatgcattttgtctctgaaaacaaaacattacccatcgagaatacaacagactgcttgagtaccatgacttccgtgtgtaaggttatgctcgagacacccgagtacagaagtcgcttcacaagtgaagagaccttgatgttttgcatgagggtgatggtaggagtgatcatattgtatgatcacgtccacccagttggagccttctgtaaaacttctaaaattgacatgaaaggatgtataaaggtcttgaaggagcaagcacctgattctgtagagggactcttaaatgccctccggtttaccactaaacaccttaacgacgaatctaccagcaagcaaatccgtgccatgttacagtag

SEQ ID NO: 220294 - DNA, 972 bp, Artificial Sequence
  derived and/or modified sequence
atgggaaatttgctgaaagttctcaccagagagatagaaaattatccgcacttctttctggactttgaaaatgcgcagccaacagagggagaaagggagatttggaatcagattagtgcagtcctccaggactccgagtccattttagccgaccttcaggcctataaaggtgccggacccgagatacgcgacgctatacagaacccgaacgatatccaattacaggagaaagcctggaatgccgtctgccctttggttgtaagactgaaaaggttctatgaattttccattaggctcgagaaggctcttcaaagcctgttagaaagcctgacatgtcctccatacactcccactcagcacttggagcgcgagcaggccctggccaaagaattcgctgagatactgcatttcacactccgcttcgatgagctgaagatgcgcaatcccgcaattcagaatgacttctcatattacaggcgtacgatttccagaaacagaatcaataatatgcatctggatattgagaacgaggtaaataatgagatggccaaccgtatgagcctgttctacgccgaagccacgcctatgctgaaaaccttgtcaaacgcaactatgcatttcgtctctgaaaataagacgctgcccatcgaaaacactacagattgtcttagtaccatgacatcagtctgtaaggtcatgctggagacccctgagtatagatcacgctttacaagtgaagaaactctgatgttttgcatgagagtgatggtgggagtgatcattctttatgaccacgtacatcccgtgggcgcattttgcaaaacaagcaagatcgacatgaagggatgtatcaaagttttaaaggagcaagctccggacagtgtggaggggttgcttaatgctttacgatttacgaccaagcatcttaatgatgagagcacaagtaagcagatcagagccatgttacagtag

SEQ ID NO: 220295 - DNA, 972 bp, Artificial Sequence
  derived and/or modified sequence
atgggcaacttattgaaggtgctgacaagggagattgagaattacccccattttttcctggacttcgagaatgcacaaccgacagagggggagcgggaaatctggaatcaaatcagtgctgtcctccaggattcagagtccatattagccgacctgcaggcctacaaaggagcaggcccagaaattagggacgcaattcaaaacccgaatgatatacaactgcaggagaaggcctggaatgccgtctgtcccttggtggtccggctgaaaaggttttacgaattttctattcgtttggagaaagcattgcagtccctcttggagtctctgacttgtcccccatacactccaacgcagcatctagagcgagaacaggccttggcaaaagagtttgctgagatcctccactttaccttgcggtttgacgagctgaagatgagaaaccctgccattcagaatgacttctcatattatagacggacaattagccgcaatcggattaataacatgcacctggacattgaaaatgaggttaataacgagatggcgaaccgcatgtcactgttctacgccgaggctacccccatgttaaaaacgctgtctaacgcaaccatgcactttgtcagtgaaaacaagacgctcccaatcgaaaacacgaccgactgtctgtctaccatgacctccgtatgcaaggtcatgctggagacgcccgaataccgcagcaggtttacctctgaagaaactctcatgttttgcatgcgcgtgatggttggcgtgatcattctgtatgatcacgtccaccctgttggagctttttgcaagacaagcaagatcgacatgaagggttgcatcaaagtcttgaaagagcaggcgcctgattctgtggaggggctgctcaatgcactacgattcactacaaaacatttaaatgatgagagcaccagtaaacagatccgcgctatgctccaatag

SEQ ID NO: 220296 - DNA, 285 bp, Artificial Sequence
  derived and/or modified sequence
atgggtaacctcctgaaggtgcttactcgagagatcgagaactacccacacttcttcttggactttgaaaatgcacaacctactgaaggcgaacgagagatttggaatcagatcagtgccgtgttacaggattcagaatcgattttggcagacttacaagcgtataagggcgctgggcctgagataagagacgcgatacagaaccctaatgacatccagctccaggagaaggcctggaacgcagtctgcccgctagtagtgcgactgaaaagattctacgagtag

SEQ ID NO: 220297 - DNA, 264 bp, Artificial Sequence
  derived and/or modified sequence
atggggaatttgctgaaggttctaactcgggaaatagaaaattacccacacttctttcttgactttgagaacgcccagccgacagaaggggagcgggagatttggaaccaaataagcgccgtgctacaggattccgagtcaattcttgctgaccttcaggcttataaaggggcaggcccagagatacgggacgcaatacaaaatccgaacgatatccagctccaggagaaggcatggaatgccgtgtgtccactcgtggtctag

SEQ ID NO: 220298 - protein, 741 aa, Artificial Sequence
  derived and/or modified sequence
MAEGSFSVQSESYSVEDMDEGSDEVGEEEMVEGNDYEEFGAFGGYGTLTSFDIHILRAFGSLGPGLRILSNEPWELENPVLAQTLVEALQLDPETLANETAARAANVARAAASNRAARAAAAAARTAFSQVVASHRVATPQVSGEDTQPTTYAAEAQGPTPEPPLASPQTSQMLVTSKMAAPEAPATSAQSQTGSPAQEAATEGPSSACAFSQAPCAREVDANRPSTAFLGQNDVFDFTQPAGVSGMAFPRPKRPAPAQEAATEGPSAASGVPQTGPGREVAATRPKTTKSGKALAKTRWVEPQNVVAAAAAKAKMATSIPEPEGAAAATAQHSAEPWARMGGKRTKKSKHLDDEYESSEEERETPAVPPTWRASQPSLTVRAQLAPRPPMAPRSQIPSRHVLCLPPRNVTLLQERANKLVKYLMIKDYKKIPIKRADMLKDVIREYDEHFPEIIERATYTLEKKFGIHLKEIDKEEHLYILVCTRDSSARLLGKTKDTPRLSLLLVILGVIFMNGNRASEAVLWEALRKMGLRPGVRHPFLGDLRKLITDDFVKQKYLEYKKIPNSNPPEYEFLWGLRARHETSKMRVLRFIAQNQNRDPREWKAHFLEAVDDAFKTMDVDMAEEHARAQMRAQMNIGDEALIGRWSWDDIQVELLTWDEDGDFGDAWARIPFAFWARYHQYILNSNRANRRATWRAGVSSGTNGGASTSVLDGPSTSSTIRTRNAARAGASFFSWIQHR

SEQ ID NO: 220299 - DNA, 2220 bp, Artificial Sequence
  derived and/or modified sequence
atggccgagggcagcttcagcgtgcagagcgagagctacagcgtggaggacatggacgagggcagcgacgaggtgggcgaggaggagatggtggagggcaacgactacgaggagttcggcgccttcggcggctacggcaccctgaccagcttcgacatccacatcctgagagccttcggcagcctgggccccggcctgagaatcctgagcaacgagccctgggagctggagaaccccgtgctggcccagaccctggtggaggccctgcagctggaccccgagaccctggccaacgagaccgccgccagagccgccaacgtggccagagccgccgccagcaacagagccgccagagccgccgccgccgccgccagaaccgccttcagccaggtggtggccagccacagagtggccaccccccaggtgagcggcgaggacacccagcccaccacctacgccgccgaggcccagggccccacccccgagccccccctggccagcccccagaccagccagatgctggtgaccagcaagatggccgcccccgaggcccccgccaccagcgcccagagccagaccggcagccccgcccaggaggccgccaccgagggccccagcagcgcctgcgccttcagccaggccccctgcgccagagaggtggacgccaacagacccagcaccgccttcctgggccagaacgacgtgttcgacttcacccagcccgccggcgtgagcggcatggccttccccagacccaagagacccgcccccgcccaggaggccgccaccgagggccccagcgccgccagcggcgtgccccagaccggccccggcagagaggtggccgccaccagacccaagaccaccaagagcggcaaggccctggccaagaccagatgggtggagccccagaacgtggtggccgccgccgccgccaaggccaagatggccaccagcatccccgagcccgagggcgccgccgccgccaccgcccagcacagcgccgagccctgggccagaatgggcggcaagagaaccaagaagagcaagcacctggacgacgagtacgagagcagcgaggaggagagagagacccccgccgtgccccccacctggagagccagccagcccagcctgaccgtgagagcccagctggcccccagaccccccatggcccccagaagccagatccccagcagacacgtgctgtgcctgccccccagaaacgtgaccctgctgcaggagagagccaacaagctggtgaagtacctgatgatcaaggactacaagaagatccccatcaagagagccgacatgctgaaggacgtgatcagagagtacgacgagcacttccccgagatcatcgagagagccacctacaccctggagaagaagttcggcatccacctgaaggagatcgacaaggaggagcacctgtacatcctggtgtgcaccagagacagcagcgccagactgctgggcaagaccaaggacacccccagactgagcctgctgctggtgatcctgggcgtgatcttcatgaacggcaacagagccagcgaggccgtgctgtgggaggccctgagaaagatgggcctgagacccggcgtgagacaccccttcctgggcgacctgagaaagctgatcaccgacgacttcgtgaagcagaagtacctggagtacaagaagatccccaacagcaacccccccgagtacgagttcctgtggggcctgagagccagacacgagaccagcaagatgagagtgctgagattcatcgcccagaaccagaacagagaccccagagagtggaaggcccacttcctggaggccgtggacgacgccttcaagaccatggacgtggacatggccgaggagcacgccagagcccagatgagagcccagatgaacatcggcgacgaggccctgatcggcagatggagctgggacgacatccaggtggagctgctgacctgggacgaggacggcgacttcggcgacgcctgggccagaatccccttcgccttctgggccagataccaccagtacatcctgaacagcaacagagccaacagaagagccacctggagagccggcgtgagcagcggcaccaacggcggcgccagcaccagcgtgctggacggccccagcaccagcagcaccatcagaaccagaaacgccgccagagccggcgccagcttcttcagctggatccagtag

SEQ ID NO: 220300 - DNA, 2226 bp, Artificial Sequence
  derived and/or modified sequence
atggccgagggcagcttcagcgtgcagagcgagagctacagcgtggaggacatggacgagggcagcgacgaggtgggcgaggaggagatggtggagggcaacgactacgaggagttcggcgccttcggcggctacggcaccctgaccagcttcgacatccacatcctgagagccttcggcagcctgggccccggcctgagaatcctgagcaacgagccctgggagctggagaaccccgtgctggcccagaccctggtggaggccctgcagctggaccccgagaccctggccaacgagaccgccgccagagccgccaacgtggccagagccgccgccagcaacagagccgccagagccgccgccgccgccgccagaaccgccttcagccaggtggtggccagccacagagtggccaccccccaggtgagcggcgaggacacccagcccaccacctacgccgccgaggcccagggccccacccccgagccccccctggccagcccccagaccagccagatgctggtgaccagcaagatggccgcccccgaggcccccgccaccagcgcccagagccagaccggcagccccgcccaggaggccgccaccgagggccccagcagcgcctgcgccttcagccaggccccctgcgccagagaggtggacgccaacagacccagcaccgccttcctgggccagaacgacgtgttcgacttcacccagcccgccggcgtgagcggcatggccttccccagacccaagagacccgcccccgcccaggaggccgccaccgagggccccagcgccgccagcggcgtgccccagaccggccccggcagagaggtggccgccaccagacccaagaccaccaagagcggcaaggccctggccaagaccagatgggtggagccccagaacgtggtggccgccgccgccgccaaggccaagatggccaccagcatccccgagcccgagggcgccgccgccgccaccgcccagcacagcgccgagccctgggccagaatgggcggcaagagaaccaagaagagcaagcacctggacgacgagtacgagagcagcgaggaggagagagagacccccgccgtgccccccacctggagagccagccagcccagcctgaccgtgagagcccagctggcccccagaccccccatggcccccagaagccagatccccagcagacacgtgctgtgcctgccccccagaaacgtgaccctgctgcaggagagagccaacaagctggtgaagtacctgatgatcaaggactacaagaagatccccatcaagagagccgacatgctgaaggacgtgatcagagagtacgacgagcacttccccgagatcatcgagagagccacctacaccctggagaagaagttcggcatccacctgaaggagatcgacaaggaggagcacctgtacatcctggtgtgcaccagagacagcagcgccagactgctgggcaagaccaaggacacccccagactgagcctgctgctggtgatcctgggcgtgatcttcatgaacggcaacagagccagcgaggccgtgctgtgggaggccctgagaaagatgggcctgagacccggcgtgagacaccccttcctgggcgacctgagaaagctgatcaccgacgacttcgtgaagcagaagtacctggagtacaagaagatccccaacagcaacccccccgagtacgagttcctgtggggcctgagagccagacacgagaccagcaagatgagagtgctgagattcatcgcccagaaccagaacagagaccccagagagtggaaggcccacttcctggaggccgtggacgacgccttcaagaccatggacgtggacatggccgaggagcacgccagagcccagatgagagcccagatgaacatcggcgacgaggccctgatcggcagatggagctgggacgacatccaggtggagctgctgacctgggacgaggacggcgacttcggcgacgcctgggccagaatccccttcgccttctgggccagataccaccagtacatcctgaacagcaacagagccaacagaagagccacctggagagccggcgtgagcagcggcaccaacggcggcgccagcaccagcgtgctggacggccccagcaccagcagcaccatcagaaccagaaacgccgccagagccggcgccagcttcttcagctggatccagcacagatag

SEQ ID NO: 220301 - DNA, 2220 bp, Artificial Sequence
  derived and/or modified sequence
atggccgaggggagcttcagtgtgcagtccgaatcatacagtgtcgaggacatggatgagggcagtgatgaggtcggcgaggaggaaatggtggaaggcaacgactacgaggaatttggagcctttgggggatacggtacactgacgtccttcgacatccatatacttcgagcatttggctccctaggccccggcctgagaatcctgtccaacgagccttgggagctcgagaaccccgtgctggcccagacactggtggaggcgctgcagctggaccccgagactctggctaacgaaactgccgctcgagccgcaaatgttgctcgcgccgccgcgagtaaccgcgcagccagagccgcagcagccgcggctcgcacagcgttttcacaagttgtggcctcacatagggtggcgacaccccaagtaagtggcgaagatacccagcccacaacgtacgctgcagaggcccagggcccaacaccagaacccccgctggcctcgccccaaactagccagatgttggttacatctaagatggccgctcctgaggctcccgccacgtccgctcagtctcagactggtagccctgcgcaggaagccgctacagagggaccctcctcggcttgcgcctttagtcaagccccttgcgcgagggaagtggatgctaaccggccatcaacagcgttccttggccagaacgatgtcttcgacttcactcagccggccggggtaagtgggatggcattccctagacctaaaaggccggctcctgcgcaagaagccgctaccgaagggcctagtgccgctagcggagtgccacaaaccggtcccggaagagaagtggctgcgacaaggcccaaaaccaccaagagcggtaaggccttagccaagactagatgggttgagccacagaatgtggttgcggctgcagccgctaaggcaaaaatggcaacaagcatccccgagcctgaaggcgctgctgccgcgaccgctcaacatagcgccgagccctgggcccgaatggggggcaagcggactaagaaaagcaagcacctagatgacgagtatgagtcttctgaggaggagagggagactcccgcagtgcctccaacatggagggccagccagcctagcctcacggtccgggctcagttagcaccacgtccaccaatggctccaagatcgcaaattccttcgcgacacgttctgtgcttgcccccacgtaacgtgacgttgctccaggaaagagccaacaaacttgtgaaatatttaatgatcaaagactacaaaaagatccctattaagcgtgccgacatgctgaaagatgtcattcgcgagtatgacgagcattttcctgagattatcgaacgtgccacctacacactcgagaagaaattcggcattcacctgaaggagattgacaaggaggaacatctgtacatactcgtttgcactcgggactcatcagcccgactgctgggaaaaacaaaggacactccaaggttgtctctgctgctggtcatcctcggtgtaattttcatgaacggaaaccgcgcaagcgaggcagtgttatgggaagcactgagaaagatgggcctgcgccctggcgtgaggcatccattcctgggggatttgagaaaactgattactgacgactttgtcaaacagaagtacctggagtataagaagattcccaattccaacccaccagagtacgagttcctgtggggcctgcgggcgcgacacgagacttcgaagatgcgggttctgcgctttatcgctcagaatcaaaatcgcgaccctcgggaatggaaagcccacttcctggaagctgtggacgatgcattcaaaacaatggatgttgacatggccgaggaacacgccagggcgcagatgcgcgcacagatgaatattggcgacgaggccctgatcggacggtggagctgggacgatatacaggtggagctgctgacttgggacgaagatggggactttggagatgcatgggctagaattccctttgccttctgggcgaggtaccaccaatacatcctgaattcgaatcgtgctaacaggcgcgccacgtggcgcgctggggtaagctctggaacaaacggaggagcaagtacgagcgtgctggacggcccctctacctccagtacaatcagaacacggaacgccgcaagggccggagccagcttttttagttggattcaatag

SEQ ID NO: 220302 - DNA, 2226 bp, Artificial Sequence
  derived and/or modified sequence
atggctgagggatcctttagtgtgcagtctgagtcatattccgtggaagacatggacgagggctccgacgaagtcggagaggaagagatggtggagggaaatgactacgaggaattcggagctttcggcggatacggcaccctaacatccttcgatatccatatcttacgggcgtttggatccttgggacctgggcttcggatcctgtcaaatgagccatgggagctggagaaccccgttttagcacaaactttggtggaggcattacagctcgacccggaaacgctggccaacgaaactgccgcccgggctgccaacgtcgctcgcgccgccgcctccaacagagcagctcgcgcagccgccgctgcggcccgaactgcattctcccaggtggtggcctcccaccgtgtagccaccccccaggtctccggagaggatacgcagccaacgacttatgccgcggaggctcaagggcctacgcctgagccacctttggctagtcctcagaccagtcagatgctggtgacatctaagatggccgcacctgaagcccctgctacctccgcccaaagccagaccggtagcccggcacaggaagccgctacggagggccccagcagcgcctgtgcattcagccaggcaccctgtgcacgcgaggtggatgccaataggcctagtactgcatttcttggccagaacgatgtgtttgattttactcagccagcgggagtgagcggtatggctttccccagacctaaaagacctgcccctgcccaggaagccgcgaccgaaggtccatctgcagcttccggagtccctcagaccggtcctggccgtgaggtggcagcgactcggcccaagacaactaagagcggaaaggccctggcaaaaaccaggtgggtggaaccgcaaaacgtggtggctgccgcagctgctaaggcaaagatggctacttccattccagagcccgagggagctgctgcggccactgcccagcactcagccgagccttgggctaggatgggagggaaaagaactaagaaatctaaacacttggatgacgaatacgaatcttcagaggaggaaagagaaactccggcagttccaccaacttggagagcatctcagccttctcttacggtccgcgcccagctggctcccagaccaccgatggccccgagaagccagattcctagcagacacgtactctgcctcccgcctagaaacgttaccctcttacaggagcgcgctaacaaactggtcaaataccttatgattaaggactataagaagatccccattaaaagagcggacatgctgaaagacgtcataagagagtacgacgaacatttccccgagattatagagagagcaacttacacattggagaagaagttcggtatccaccttaaagagattgacaaggaagagcacctttatattttagtctgcacaagagattccagcgcacggcttttaggtaaaacaaaagatacgccacgcctgtccctgctgctggtgatcctgggtgttatttttatgaatggcaaccgtgcctctgaggccgtactgtgggaagctctaagaaaaatgggtctccggcctggagtgagacaccctttcctgggagatctgaggaaacttattacagacgacttcgttaagcagaagtacctggaatacaagaagatccccaattctaatcctcctgaatatgagttcctctggggtctgcgcgccaggcacgaaacaagcaagatgagagtcctgaggttcatcgcgcaaaatcagaaccgggaccctagagagtggaaagcccactttctcgaggcggtcgacgatgcatttaagaccatggacgttgacatggccgaggagcatgcgcgtgctcagatgagagcgcagatgaatatcggagacgaggcgctcataggtagatggtcctgggacgacattcaagttgagttgttgacctgggacgaagacggagatttcggcgatgcatgggccagaattccttttgctttttgggccagataccaccagtacatcctgaattccaaccgcgccaatcgtagggcaacctggagggccggcgtcagttcagggactaacggtggagcatcaacctctgttctcgacgggcccagcaccagttccaccatccggacccgcaacgcagcgagggctggcgcctctttcttctcttggatccagcacagatag

SEQ ID NO: 220303 - DNA, 2220 bp, Artificial Sequence
  derived and/or modified sequence
atggccgagggcagcttctctgtgcagagcgagagctacagcgtggaggacatggatgagggcagtgatgaggtgggggaggaggagatggtggagggcaatgactatgaggagtttggagccttcggcggctacggcaccctgaccagctttgacatccacatcctgcgggccttcggcagcctgggccctggcctgcgcatcctgagcaatgagccctgggagctggagaaccctgtgctggcccagaccctggtggaggccctgcagctggaccctgagaccctggccaatgaaacagctgcccgggccgccaacgtggcccgggctgctgccagcaacagagctgcccgggctgctgctgctgctgccaggacagccttcagccaggtggtggccagccaccgggtggccaccccccaggtgtctggagaggacacccagcccaccacctatgctgctgaggcccagggccccaccccagagccccccctggccagcccccagaccagccagatgctggtgaccagcaagatggccgcccctgaggccccagccaccagcgcccagagccagacaggcagccctgcccaggaggccgccacagagggccccagcagcgcctgtgccttcagccaggccccctgtgcccgggaggtggatgccaaccggcccagcacagccttcctgggccagaatgatgtgtttgacttcacccagcctgctggggtgtctggcatggccttcccccggcccaagaggcctgccccagcccaggaggccgccacagagggccccagcgctgccagcggcgtgccccagacaggccctggccgggaggtggccgccacccggcccaagaccaccaagagcggcaaggccctggccaagacccgctgggtggagccccagaatgtggtggccgctgctgctgccaaggccaagatggccaccagcatccctgagcctgagggcgctgctgctgccacagcccagcacagcgctgagccctgggccaggatgggcggcaagaggaccaagaagagcaagcacctggatgatgaatatgagagcagcgaggaggagcgggagaccccagctgtgccccccacctggagggccagccagcccagcctgactgtgcgggcccagctggcccccaggcctcccatggcccccaggagccagatccccagcagacatgtgctgtgcctgcccccaagaaatgtgaccctgctgcaggagcgggccaacaagctggtgaagtacctgatgatcaaggactacaagaagatccccatcaagagagctgacatgctgaaggatgtgatccgggagtatgatgagcacttccctgagatcatcgagcgggccacctacaccctggagaagaagtttggcatccacctgaaggagattgacaaggaggagcacctgtacatcctggtgtgcacccgggacagcagcgcccggctgctgggcaagaccaaggacaccccccggctgagcctgctgctggtgatcctgggcgtcatcttcatgaatggaaacagagccagcgaggccgtgctgtgggaggccctgaggaagatgggcctgcggcctggggtgcgccaccccttcctgggggacctgaggaagctgatcacagatgactttgtgaagcagaagtacctggagtacaagaagatccccaacagcaaccccccagaatatgagttcctgtggggcctgcgggcccggcatgagaccagcaagatgagggtgctgcgcttcatcgcccagaaccagaacagagacccccgggagtggaaggcccacttcctggaggccgtggatgatgccttcaagaccatggatgtggacatggccgaggagcacgcccgggcccagatgagggcccagatgaacattggagatgaggccctgattggccgctggagctgggatgacatccaggtggagctgctgacctgggatgaagatggagactttggagatgcctgggcccgcatcccctttgccttctgggcccgctaccaccagtacatcctgaacagcaacagagccaacagaagagccacctggagggctggggtgagcagcggcaccaatggaggagccagcacctctgtgctggatggccccagcaccagcagcaccatccgcaccagaaatgctgcccgggccggggccagcttcttctcctggatccagtag

SEQ ID NO: 220304 - DNA, 2226 bp, Artificial Sequence
  derived and/or modified sequence
atggccgagggcagcttctctgtgcagagcgagagctacagcgtggaggacatggatgagggcagtgatgaggtgggggaggaggagatggtggagggcaatgactatgaggagtttggagccttcggcggctacggcaccctgaccagctttgacatccacatcctgcgggccttcggcagcctgggccctggcctgcgcatcctgagcaatgagccctgggagctggagaaccctgtgctggcccagaccctggtggaggccctgcagctggaccctgagaccctggccaatgaaacagctgcccgggccgccaacgtggcccgggctgctgccagcaacagagctgcccgggctgctgctgctgctgccaggacagccttcagccaggtggtggccagccaccgggtggccaccccccaggtgtctggagaggacacccagcccaccacctatgctgctgaggcccagggccccaccccagagccccccctggccagcccccagaccagccagatgctggtgaccagcaagatggccgcccctgaggccccagccaccagcgcccagagccagacaggcagccctgcccaggaggccgccacagagggccccagcagcgcctgtgccttcagccaggccccctgtgcccgggaggtggatgccaaccggcccagcacagccttcctgggccagaatgatgtgtttgacttcacccagcctgctggggtgtctggcatggccttcccccggcccaagaggcctgccccagcccaggaggccgccacagagggccccagcgctgccagcggcgtgccccagacaggccctggccgggaggtggccgccacccggcccaagaccaccaagagcggcaaggccctggccaagacccgctgggtggagccccagaatgtggtggccgctgctgctgccaaggccaagatggccaccagcatccctgagcctgagggcgctgctgctgccacagcccagcacagcgctgagccctgggccaggatgggcggcaagaggaccaagaagagcaagcacctggatgatgaatatgagagcagcgaggaggagcgggagaccccagctgtgccccccacctggagggccagccagcccagcctgactgtgcgggcccagctggcccccaggcctcccatggcccccaggagccagatccccagcagacatgtgctgtgcctgcccccaagaaatgtgaccctgctgcaggagcgggccaacaagctggtgaagtacctgatgatcaaggactacaagaagatccccatcaagagagctgacatgctgaaggatgtgatccgggagtatgatgagcacttccctgagatcatcgagcgggccacctacaccctggagaagaagtttggcatccacctgaaggagattgacaaggaggagcacctgtacatcctggtgtgcacccgggacagcagcgcccggctgctgggcaagaccaaggacaccccccggctgagcctgctgctggtgatcctgggcgtcatcttcatgaatggaaacagagccagcgaggccgtgctgtgggaggccctgaggaagatgggcctgcggcctggggtgcgccaccccttcctgggggacctgaggaagctgatcacagatgactttgtgaagcagaagtacctggagtacaagaagatccccaacagcaaccccccagaatatgagttcctgtggggcctgcgggcccggcatgagaccagcaagatgagggtgctgcgcttcatcgcccagaaccagaacagagacccccgggagtggaaggcccacttcctggaggccgtggatgatgccttcaagaccatggatgtggacatggccgaggagcacgcccgggcccagatgagggcccagatgaacattggagatgaggccctgattggccgctggagctgggatgacatccaggtggagctgctgacctgggatgaagatggagactttggagatgcctgggcccgcatcccctttgccttctgggcccgctaccaccagtacatcctgaacagcaacagagccaacagaagagccacctggagggctggggtgagcagcggcaccaatggaggagccagcacctctgtgctggatggccccagcaccagcagcaccatccgcaccagaaatgctgcccgggccggggccagcttcttctcctggatccagcacaggtag

SEQ ID NO: 220305 - DNA, 2220 bp, Artificial Sequence
  derived and/or modified sequence
atggccgagggcagcttcagcgtgcagagcgagagctacagcgtggaggatatggacgagggcagcgatgaagtgggagaggaggagatggtcgagggcaatgactatgaggagtttggagccttcggcgggtacggaactctaacaagttttgatatccatatactccgggctttcggttctcttgggccgggtttaagaatcttgtctaacgaaccatgggagcttgagaacccggtgttggcccagacactcgtggaagcactgcagcttgaccccgagactctggcaaacgaaacggccgcacgggccgctaacgtggctagagctgccgcctcaaatcgcgccgctcgtgctgctgccgcagccgctcggactgctttcagccaggtggtggcctctcaccgagtcgcgactcctcaggtcagcggggaggatactcagccaacaacttatgcggcagaggctcaaggcccaaccccggagccacctcttgcatctccacagactagccagatgctcgtgactagcaagatggccgcgccagaagccccagccacctctgcacagtcacagactggctctcctgcccaggaagcagccaccgaggggccatcttctgcttgcgcctttagccaggcaccttgtgctagggaagtggatgctaatcgaccttctacggccttccttgggcagaacgacgtgttcgactttacccagccggctggcgtgtccggcatggccttccccagacctaagcgccccgcgcctgcccaggaagctgccaccgaaggaccttccgcggcctccggcgtccctcagactggccccggaagagaggtggctgcaacaaggccaaaaaccaccaaaagtgggaaagcgctcgcaaaaacaagatgggtcgagccgcaaaatgtggtcgccgccgctgctgccaaggctaagatggctactagtatacccgaacctgagggtgctgctgcagcaaccgcacagcacagcgctgagccatgggctcggatggggggaaaacggactaaaaaatctaagcatctggacgatgagtatgaaagctctgaagaagaaagggaaactcctgcagtacccccaacatggagagcctcccagccatcactgactgtgagggcccagctagccccccggccccctatggcgcctagaagccagatccccagcaggcacgtgctgtgtctccctccaaggaacgttacgttgctgcaggagagggccaacaagttggtcaagtacctgatgattaaagactataagaagatcccaatcaagcgcgccgacatgttgaaggatgtcataagagagtacgacgagcactttccagagatcatcgaaagagctacatacacactcgaaaaaaagtttggtatacacctcaaagaaattgataaggaagagcacctatatatccttgtgtgcacaagagattccagcgctcgcttgttgggtaagacaaaggacacgcccagattatcgctgctgctcgtgattctgggggtgatcttcatgaatgggaacagagctagtgaggccgtgctgtgggaggccctccggaaaatgggattgcgtcctggcgttaggcacccctttctcggcgatctgaggaagctcatcacagacgacttcgtgaaacagaagtacctggagtacaagaaaattcctaattcaaaccctccagaatacgaattcttatggggcctccgggcacgccatgagactagcaagatgcgggtgttgaggttcatcgctcaaaatcagaacagggaccctagggagtggaaggcccatttccttgaagcagtcgatgatgcttttaagactatggacgttgatatggccgaggagcacgctagagcccagatgcgcgctcaaatgaatataggcgatgaagctctcatcgggagatggagctgggatgacattcaggtggaactcctgacctgggatgaggacggcgatttcggggacgcatgggctcggatccctttcgccttttgggcccggtatcaccagtatattctgaacagcaaccgcgccaaccggcgcgcaacctggagggctggggtatcaagcggcactaatggcggggcctcaacttctgtgctagacggcccatcaacctccagcacaatccggacacggaatgcggccagagccggcgcgtccttctttagctggatccagtag

SEQ ID NO: 220306 - DNA, 2226 bp, Artificial Sequence
  derived and/or modified sequence
atggccgagggcagcttcagcgtgcagagcgagagctacagcgtggaggatatggatgaaggcagtgacgaggttggagaggaggaaatggttgagggcaacgactacgaggagtttggggcattcggcggttacggaacactgacctccttcgacatccacatcttgagagccttcggctccctgggacctgggctccgcatcctgtcaaacgagccgtgggagttagaaaatcccgtcctggcccagacactggtcgaggccctgcagctcgatcccgagacgctcgcaaacgagacagctgcacgggctgccaacgtcgctcgggccgccgccagcaaccgagcagctcgggccgcggcagctgcagctagaaccgcattctcccaggtggtagcctcacacagggttgccacccctcaggtctctggtgaggacacccaaccaacaacgtacgccgcagaggcacagggccccacaccagagccacccctggcaagccctcagactagtcagatgctggtgacaagtaagatggctgctcccgaggcaccggccacgagcgcccaatcacaaacaggcagccccgcacaggaggctgccactgagggtccatcctctgcttgtgctttctctcaggccccgtgcgccagggaagtggacgccaaccgcccaagtaccgcttttctgggacaaaacgacgtgtttgatttcacccagcccgccggcgttagtggaatggcgtttcctaggcccaaacgccccgcccccgcccaggaagccgccaccgaaggaccctcagcggcatcaggtgtcccccagaccgggccagggcgtgaggtcgctgccacgaggcccaagacaaccaaatctggaaaggcactcgctaaaacacgctgggtggaaccgcagaatgtggtggccgctgccgcagctaaggctaagatggcaaccagcattcccgagcctgagggagccgcagctgcaaccgcccaacactccgctgaaccctgggcccgcatgggtgggaagcggactaagaaatctaaacacctggatgatgagtatgagagctccgaagaggagagggagacgcctgcagttcctccaacatggagagcaagtcagcccagcctgacagttcgagcccaactcgccccgagacccccaatggcaccccgcagccaaataccatctaggcacgtgctctgcctccccccgagaaatgtaactttgctccaggaacgagccaacaaattggtaaagtacctgatgattaaggactataaaaaaattcctatcaaaagagctgatatgttgaaggatgtgattagagagtacgatgaacatttccctgaaattatcgaacgcgccacttacacactagaaaagaagtttggcatacacttgaaggaaatcgataaggaagagcacctttacattcttgtgtgcactcgcgattcctctgcccgactgcttggcaaaacgaaggacacccctcgactgagtttgctcctcgtgatcctcggcgtgattttcatgaatggcaaccgcgcaagcgaagccgtgctatgggaggcactccgtaagatggggcttcggcccggcgtgcggcaccctttccttggcgatctgcgcaaattgatcactgatgatttcgtcaaacaaaaatacctggaatacaagaagatccctaacagcaaccctcccgagtatgagtttctctggggtcttagggcaagacatgagacaagcaaaatgcgcgtcctgcgcttcatagcccagaaccaaaacagagaccccagagaatggaaggcgcacttcttggaggccgttgatgatgcttttaagactatggatgtggacatggccgaggaacacgcaagggcccaaatgcgtgcccaaatgaacattggcgatgaagccctgatcgggagatggtcctgggacgatatccaggtggaactcctgacgtgggatgaggacggagactttggagacgcctgggcaagaattccatttgccttttgggctaggtatcatcaatacattttgaactccaaccgggccaatcggagggcaacttggagagccggggtctccagcggtaccaatggtggggccagcacctctgtactggatggcccttcaaccagtagtactattcgcacaagaaatgccgccagagctggtgcatctttcttttcctggatacaacaccgatag

SEQ ID NO: 220307 - DNA, 2510 bp, Artificial Sequence
  derived and/or modified sequence
gcagtaggcgagggcgcggctgcggggttcctggtgctgaggacggacgccattggagttcccgagaagcatggctgagggaagcttcagcgtgcaatcggaaagctacagtgttgaagacatggatgagggtagcgacgaagtcggggaggaagagatggttgaaggcaacgactatgaagaattcggtgcgtttggtggctatggcaccctcaccagctttgacatccatatcctcagagccttcggaagcttgggtccaggccttcgcatcttatcgaatgagccctgggaactggaaaaccctgtgctggcccagaccctggtggaggcattgcagctggatccggaaacacttgccaatgagacggccgcccgtgctgccaacgtagcccgcgccgccgcctccaaccgtgcggctcgggccgctgccgccgctgcccgtaccgccttcagtcaggtggtcgctagccaccgggtggccacgccgcaggtctcaggagaggatacccagcccacgacctacgccgccgaggctcaggggcccacccctgagccaccccttgcttctccgcagacctcccagatgttagtcaccagtaagatggctgcccccgaggctccggcaacctccgcacagtcccagacaggctccccggcccaggaggctgctactgagggccctagtagcgcctgtgctttctctcaggctccgtgtgccagggaggtggacgccaaccggcccagcacagccttcctgggccagaatgatgtcttcgatttcactcagccggcaggtgtcagtggcatggccttcccgcgccccaagagacctgccccagcccaagaggctgccacagagggccccagtgctgcctctggtgtgccccagacgggacctggcagggaggtggcagccacccggcccaagaccaccaagtcggggaaggcgctggccaagactcggtgggtggagcctcagaatgttgtggcagcagctgctgccaaggccaagatggccacgagcatccctgagccggagggtgcagctgctgccactgctcagcacagtgctgagccctgggccaggatgggaggcaagaggaccaagaagtccaagcacctggatgatgagtatgagagcagcgaggaggagagagagactcccgcggtcccacccacctggagagcatcacagccctcattgacggtgcgggctcagttggcccctcggcccccgatggccccgaggtcccagataccctcaaggcacgtactgtgcctgcccccccgcaacgtgacccttctgcaggagagggcaaataagttggtgaaatacctgatgattaaggactacaagaagatccccatcaagcgcgcagacatgctgaaggatgtcatcagagaatatgatgaacatttccctgagatcattgaacgagcaacgtacaccctggaaaagaagtttgggatccacctgaaggagatcgacaaggaagaacacctgtatattcttgtctgcacacgggactcctcagctcgcctccttggaaaaaccaaggacactcccaggctgagtctcctcttggtgattctgggcgtcatcttcatgaatggcaaccgtgccagcgaggctgtcctctgggaggcactacgcaagatgggactgcgccctggggtgaggcacccattcctcggcgatctgaggaagctcatcacagatgactttgtgaagcagaagtacctggaatacaagaagatccccaacagcaacccacctgagtatgaattcctctggggcctgcgagcccgccatgagaccagcaagatgagggtcctgagattcatcgcccagaatcagaaccgagacccccgggaatggaaggctcatttcttggaggctgtggatgatgctttcaagacaatggatgtggatatggccgaggaacatgccagggcccagatgagggcccagatgaatatcggggatgaagcgctgattggacggtggagctgggatgacatacaagtcgagctcctgacctgggatgaggacggagattttggcgatgcctgggccaggatcccctttgctttctgggccagataccatcagtacattctgaatagcaaccgtgccaacaggagggccacgtggagagctggcgtcagcagtggcaccaatggaggggccagcaccagcgtcctagatggccccagcaccagctccaccatccggaccagaaatgctgccagagctggcgccagcttcttctcctggatccagtaagagtttcggcaccgttgacgaactgcagcgatcttactggccaagccagagcgcctcctctcagattccttctcgacacagcaccctaggcggcttcttcctgtcagtcggaggtggcatgcaagatgaagctctctttgctcttcctgctttcattttgtgcttttccttgtgttttcatgttttgggtatcagtgttacattaaagttgcaaaattaa

SEQ ID NO: 220308 - DNA, 2600 bp, Artificial Sequence
  derived and/or modified sequence
gcatgcgcaggctacccagccgcggggggtgcacggagaaaaggggcggggtggtccgggctgctgtgctggcagcagtaggcgagggcgcggctgcggggttcctggtgctgaggacggacgccattggagttcccgagaaggctgagctctcatctccctgggacccgcagcatggctgagggaagcttcagcgtgcaatcggaaagctacagtgttgaagacatggatgagggtagcgacgaagtcggggaggaagagatggttgaaggcaacgactatgaagaattcggtgcgtttggtggctatggcaccctcaccagctttgacatccatatcctcagagccttcggaagcttgggtccaggccttcgcatcttatcgaatgagccctgggaactggaaaaccctgtgctggcccagaccctggtggaggcattgcagctggatccggaaacacttgccaatgagacggccgcccgtgctgccaacgtagcccgcgccgccgcctccaaccgtgcggctcgggccgctgccgccgctgcccgtaccgccttcagtcaggtggtcgctagccaccgggtggccacgccgcaggtctcaggagaggatacccagcccacgacctacgccgccgaggctcaggggcccacccctgagccaccccttgcttctccgcagacctcccagatgttagtcaccagtaagatggctgcccccgaggctccggcaacctccgcacagtcccagacaggctccccggcccaggaggctgctactgagggccctagtagcgcctgtgctttctctcaggctccgtgtgccagggaggtggacgccaaccggcccagcacagccttcctgggccagaatgatgtcttcgatttcactcagccggcaggtgtcagtggcatggccttcccgcgccccaagagacctgccccagcccaagaggctgccacagagggccccagtgctgcctctggtgtgccccagacgggacctggcagggaggtggcagccacccggcccaagaccaccaagtcggggaaggcgctggccaagactcggtgggtggagcctcagaatgttgtggcagcagctgctgccaaggccaagatggccacgagcatccctgagccggagggtgcagctgctgccactgctcagcacagtgctgagccctgggccaggatgggaggcaagaggaccaagaagtccaagcacctggatgatgagtatgagagcagcgaggaggagagagagactcccgcggtcccacccacctggagagcatcacagccctcattgacggtgcgggctcagttggcccctcggcccccgatggccccgaggtcccagataccctcaaggcacgtactgtgcctgcccccccgcaacgtgacccttctgcaggagagggcaaataagttggtgaaatacctgatgattaaggactacaagaagatccccatcaagcgcgcagacatgctgaaggatgtcatcagagaatatgatgaacatttccctgagatcattgaacgagcaacgtacaccctggaaaagaagtttgggatccacctgaaggagatcgacaaggaagaacacctgtatattcttgtctgcacacgggactcctcagctcgcctccttggaaaaaccaaggacactcccaggctgagtctcctcttggtgattctgggcgtcatcttcatgaatggcaaccgtgccagcgaggctgtcctctgggaggcactacgcaagatgggactgcgccctggggtgaggcacccattcctcggcgatctgaggaagctcatcacagatgactttgtgaagcagaagtacctggaatacaagaagatccccaacagcaacccacctgagtatgaattcctctggggcctgcgagcccgccatgagaccagcaagatgagggtcctgagattcatcgcccagaatcagaaccgagacccccgggaatggaaggctcatttcttggaggctgtggatgatgctttcaagacaatggatgtggatatggccgaggaacatgccagggcccagatgagggcccagatgaatatcggggatgaagcgctgattggacggtggagctgggatgacatacaagtcgagctcctgacctgggatgaggacggagattttggcgatgcctgggccaggatcccctttgctttctgggccagataccatcagtacattctgaatagcaaccgtgccaacaggagggccacgtggagagctggcgtcagcagtggcaccaatggaggggccagcaccagcgtcctagatggccccagcaccagctccaccatccggaccagaaatgctgccagagctggcgccagcttcttctcctggatccagcaccgttgacgaactgcagcgatcttactggccaagccagagcgcctcctctcagattccttctcgacacagcaccctaggcggcttcttcctgtcagtcggaggtggcatgcaagatgaagctctctttgctcttcctgctttcattttgtgcttttccttgtgttttcatgttttgggtatcagtgttacattaaagttgcaaaatt

SEQ ID NO: 220309 - DNA, 2220 bp, Artificial Sequence
  derived and/or modified sequence
atggctgaagggtcctttagtgtgcagtccgaatcctactctgtcgaggacatggatgaggggagcgacgaggttggcgaagaggagatggtagaaggaaatgactatgaagaatttggggcttttggcggttatggcaccctgacatctttcgacatccatatcttacgcgcattcggcagtttgggtcctgggttgcggatactaagcaacgagccatgggaactggagaaccctgttctggcccagaccctggtggaggctttacagttagatcctgagaccctggcgaacgaaactgctgctagggccgctaacgtggcccgagccgcagcctctaaccgtgctgctcgggcagccgctgctgccgcaaggactgccttcagccaggtcgtggcatcacacagggtcgcaacccctcaggtttctggtgaggatacccaacctacaacatacgctgctgaggcgcaagggccaactcccgagccacccctagccagtcctcagacttcccaaatgctcgttacatcaaagatggccgctccagaagcgcctgccacctctgcccaatcacagaccggatcccccgcacaggaagcggctacagagggtccttcatcagcctgtgccttctcccaagccccatgtgcccgagaagtggacgctaataggcctagcacggcattcctggggcagaatgatgtattcgactttacacaaccagccggagtatcagggatggcttttccacgcccaaaaagaccagccccagcccaggaagctgccacagagggcccaagtgctgctagcggagttccccagacaggaccaggacgcgaggtggccgctactagacctaagacaacgaagtccggaaaggccctggctaagacgcgctgggttgagccacaaaatgtggtcgcagccgctgcggcaaaggccaagatggccacctctataccagagccagagggcgcagctgcagctaccgcccagcattcggctgagccatgggctcgaatgggtggcaaacggacaaagaaatccaagcacctcgacgatgaatatgagtccagtgaggaggaaagggagacccctgccgtgccacctacgtggcgggcttcgcaaccttccttgaccgtgagagcacagcttgcccctagacccccaatggctcccaggagccaaattccatctcggcatgtgctctgcctccccccacgcaatgtgactttactgcaagagagggctaataaattggtaaagtatctcatgattaaggactacaagaagatacctattaagcgcgcagacatgctcaaggacgtgatccgcgaatacgatgagcactttcctgaaatcattgagagagctacatatacactcgaaaagaaattcggcattcatttgaaggaaatcgataaagaagagcatctgtacattttggtgtgcactcgggactccagcgcgaggctgctgggaaagacgaaggacacgcctagactgtccctattgttggtcatcctcggcgtgatcttcatgaacggcaatagagcgtccgaagccgtgttgtgggaggcactccgcaagatgggattacgaccaggggtgagacacccttttctcggagatcttagaaaactgatcaccgatgactttgtcaagcagaaatatctcgaatataagaaaattccgaacagcaacccgcctgagtatgaattcctctggggactaagagctcgtcacgagacctccaaaatgagggtgctgaggttcattgcccagaaccagaacagggatcccagagaatggaaagcccattttcttgaggccgtggatgacgcctttaagacgatggacgtggacatggcggaagaacacgcgcgtgcccaaatgagagctcaaatgaatataggcgacgaggcactaatcggcagatggagctgggacgacatacaggttgagttactgacttgggatgaggatggtgattttggagacgcatgggccagaatacctttcgccttttgggccagataccaccagtacattttaaattccaaccgtgccaaccgaagggcgacatggagagcaggcgtttcatccggcactaacggaggtgcgagcactagcgtgctagatggcccaagcacgtccagtactataagaactagaaacgccgctcgcgctggggcttccttcttcagctggattcaatag

SEQ ID NO: 220310 - DNA, 2226 bp, Artificial Sequence
  derived and/or modified sequence
atggctgaaggcagcttctccgtgcagtcagagagctattctgttgaggacatggacgagggtagtgatgaggtgggtgaagaggaaatggttgaggggaatgactatgaggaattcggagctttcggtggatatggaaccctgacctcttttgacatacacattttacgagcgttcggctccctggggcctggcctcagaatccttagcaacgaaccctgggaactggagaatcctgtcctggcccagacactcgtcgaagcgcttcagttggacccagaaacccttgctaatgagaccgccgctcgggctgccaacgtcgcgagagctgcagcttcaaatcgggctgctagagcggcagccgctgccgctcgtactgccttctctcaggtcgtggctagccatagagttgcaactcctcaagtcagcggtgaggatacccagcctaccacctacgccgctgaggcgcaggggcctacccccgaaccaccactagccagcccccaaacctctcagatgttagtgacaagcaagatggcagctccagaagcccctgctacctcagcacagagccagacgggcagtcctgcccaggaagcggctacggagggcccatcgtcagcctgtgcgttctctcaggcaccatgtgccagagaagtcgatgccaaccggcctagtacagcgttcctggggcaaaacgatgtattcgattttacccaacccgcaggcgtctcgggcatggcttttccaagaccaaaacggcctgcacccgcacaagaagccgctaccgagggcccttctgcagcatccggggtgccccaaaccggccctggcagagaagtggcggcaacgaggccaaaaactaccaaatccggtaaagctctggccaagacccgatgggttgaaccccaaaatgtggtggccgcagctgccgcaaaagccaagatggccacatctatcccagagcccgagggggctgctgcagcaacagcgcagcactcagccgagccttgggccagaatgggcggtaagagaactaaaaagtcgaaacatttggacgacgaatatgagtcctccgaagaggagagagagacccctgccgttccccctacctggagggcttctcagccctccctcactgtaagagcacagttggcccctcgtcctccgatggcacctcgaagccagatccccagccgacatgtgctatgcctgcctcccagaaacgtcacactcctgcaggaaagagccaacaagcttgtgaagtacctgatgattaaggactacaagaagatacctattaagagggcggacatgcttaaggatgtcattagggagtacgacgagcattttcccgagatcatcgagagagctacttatactctggaaaagaagttcgggatacatcttaaagaaatcgataaagaggagcacctttatattctggtgtgcacccgggattcttctgcacgcctgcttggcaaaacaaaggacacaccgagactttctcttctgctagtcatcctgggggtaatcttcatgaacggtaaccgcgcatcagaggcagtgctctgggaagcattgagaaaaatgggcctccgaccaggtgttcggcacccttttttgggagatctccggaagctgatcactgatgactttgtgaaacagaagtacctggagtataaaaaaattccgaactccaatcctccagaatacgagttcctctggggcctgagagctcgtcacgaaaccagtaagatgagggtgctgcgctttattgcccagaaccaaaacagggacccacgggaatggaaagctcacttcctggaggcagttgatgacgccttcaagacgatggacgttgacatggcagaagaacacgcccgagcccaaatgagagcgcaaatgaatattggcgacgaggctctcattggccgttggtcctgggacgacatccaggtggagctcttaacgtgggacgaggatggagattttggcgacgcttgggctcggatccctttcgcattctgggcaaggtatcaccagtatatccttaattcgaacagagctaacaggagagccacgtggcgggctggtgtgtcttctggcacaaacggtggcgcatcaacaagcgtgttggacggaccctccacatcaagcacaatcaggacgcgcaatgcggctcgggcaggagcctcattcttttcctggatccagcacagatag

SEQ ID NO: 220311 - DNA, 2220 bp, Artificial Sequence
  derived and/or modified sequence
atggcagaaggttcgttttccgtgcaatccgagtcttattccgttgaggacatggatgaagggtcagatgaagtcggcgaggaagaaatggtggaggggaatgactacgaagaattcggggcctttgggggatacggcaccctcacctcctttgatatccatattttgcgcgcttttggatcactgggccctggactaagaatattgtcaaacgaaccctgggagctcgaaaatcctgtcctcgctcagacactcgttgaagcactgcagcttgaccctgagacactcgccaacgagactgccgctcgggccgccaacgttgcccgggctgcggcatcaaatagagccgcaagagccgccgcagccgccgcgcgcaccgcattctcacaggtggttgctagccaccgagtggcaacgccacaggtgtccggggaagatacccagccaaccacatatgctgccgaagcccagggcccaactccagagccgccattagccagccctcagacctcacagatgctcgtgacaagcaagatggcggctcccgaagctcccgccacttctgcccagtcgcagaccgggtcgcccgcgcaggaggctgcgaccgagggacctagcagtgcctgtgctttttcccaggcaccctgtgccagggaagtagacgcaaatcggccatcaactgcattcctgggccaaaacgacgtgtttgattttacccagcccgcaggggtgagcggaatggcattccccagaccaaaacgtccagcacccgcgcaggaagctgcgaccgagggtcctagtgctgccagtggagtccctcagacaggaccagggcgcgaggtggccgccacacgccccaaaaccacaaagagcggcaaagccctcgcaaaaacccggtgggtggaaccgcagaacgtagtggccgccgccgctgctaaagcaaaaatggcgacgtcaattcctgaaccagagggagccgctgcagcaactgcccaacattccgctgagccttgggcacgcatgggcgggaagagaactaagaaatcaaagcatttggacgatgaatacgaatcctccgaagaggaaagggagactcccgctgtgccaccaacctggcgggcgagccagccctcactgactgtacgggcgcagctggctccccggccgcccatggcaccaaggtcccaaattcccagcaggcatgttctgtgtctgccccccaggaacgtaactctgctccaggagagggccaataagcttgtgaaatatctcatgatcaaggattataagaagattcctatcaaacgggctgacatgctgaaagacgtgatacgagaatatgatgaacattttccagagattatagaacgtgcaacgtataccttggagaaaaagtttggcatccatctgaaagagatcgataaagaggagcacttgtacatcttagtctgtacacgggattcatcggccaggctcctgggcaagacaaaggacactcctaggctcagcttgctgctggttatcttaggtgttattttcatgaatggcaatcgggccagcgaggcagtgttatgggaagcgcttaggaagatgggcctcagacccggagttcgccatccgtttcttggagacctgagaaagctaatcaccgatgattttgtgaagcagaaatacttggagtataagaaaattcctaattccaatcctcctgagtacgaattcctctggggactcagagctcgccacgagacctccaagatgagggtcttgagattcatcgcccagaatcagaatagggatccccgcgaatggaaagcgcatttcctggaggctgtagatgatgctttcaagacgatggacgttgatatggcagaagagcatgctcgagcccagatgagagcccaaatgaacatcggagatgaggctcttattggtaggtggagctgggatgatatccaggttgagttgttgacctgggatgaggatggggactttggggatgcctgggcccgcatccctttcgcgttctgggctagatatcaccagtacattcttaactcaaatagggctaacaggcgagccacatggcgggctggagtatcctctggaactaacggaggagcatccacaagcgtactggacggaccttccacctcgagcaccattagaacccgcaatgcggcccgtgcaggagcctcctttttcagttggatccagtag

SEQ ID NO: 220312 - DNA, 2226 bp, Artificial Sequence
  derived and/or modified sequence
atggccgagggaagcttttcggtgcagtcagagagttacagcgtggaggatatggacgagggttcggatgaagtgggcgaggaggagatggtggaagggaatgactatgaagagttcggcgcattcggagggtatggaacgcttactagctttgatattcatattcttcgggcctttggatccctaggcccaggattacggattttgagcaatgaaccctgggagttggagaatccagtgttggcacagacgctcgtggaggccttacagctggaccccgaaactctggccaacgagaccgccgcaagggccgctaacgtcgcacgagccgccgcgagcaacagggcagctagagctgccgcagctgcggcccgaacagcctttagtcaggtagtggcgagtcaccgagttgccactccacaggtgagcggcgaggatacccagcctaccacgtacgctgctgaggcccaagggcccacgcccgagccccccctcgccagcccccagacctcacagatgctcgttacttcaaaaatggcggctcccgaggcccctgccacatctgcacagtcgcagaccggcagcccagcccaggaggccgccaccgagggacctagtagcgcctgcgcattttcacaggcaccctgcgcccgggaggttgatgctaaccggccctctaccgccttcttgggacagaacgacgtgtttgatttcacgcagccagccggagtctccggaatggctttccccaggcccaaaaggcctgctccggctcaggaagccgctaccgaagggcccagtgccgcatctggagtgcctcagaccggcccaggacgagaggtggcggccacacgacccaagactactaaatcggggaaagcactggcaaagacacgatgggtggagccccagaatgtcgtggcagctgcagctgccaaggcgaagatggccacatccatacctgagcccgaaggagcagctgctgcaaccgcccagcattccgccgaaccgtgggctcgaatgggcggaaaaaggacaaagaagtccaaacacctggatgacgagtatgagagctctgaagaggagcgagaaactcccgctgtaccccctacgtggagggcctcccagcctagtctgactgtgcgggcccaactggcccctcgcccacctatggccccaagaagccagatcccttccagacacgttttgtgtctgccccccaggaatgtgaccttgctgcaggaacgcgccaacaaattagtgaagtatctgatgatcaaggactacaagaagatccctatcaagcgggccgacatgctaaaagatgttattcgagagtacgatgagcacttccccgagatcatagagcgagcaacttacaccctggagaaaaaatttggaatccacctgaaagaaatcgacaaggaagaacacctgtatattctcgtctgcacgcgggattcatcagcacgacttttgggcaagacaaaggacacgccccgcttgtctctcctcctggtgatactcggcgttatatttatgaacggaaaccgggcttcggaggccgtgctgtgggaggctctcaggaagatgggtttgcggccgggcgtgagacacccattcctcggcgacctcaggaagcttatcacagacgatttcgtgaaacagaagtatctggagtataagaagatcccaaacagtaatccgcctgagtatgagttcctttggggactcagggcaagacatgagacaagcaagatgagagtgttgagatttattgctcaaaatcaaaatagagatccgcgggagtggaaagcccacttcctggaggcagtggacgacgccttcaagacgatggatgtcgacatggccgaagaacatgctcgagcgcagatgagggctcagatgaatatcggtgacgaggccctcattgggcgctggagctgggatgatatccaggttgagctgctaacctgggacgaggacggtgacttcggcgacgcttgggccagaatccccttcgccttttgggcccgataccaccagtatatcttgaactcgaatcgggctaaccggagagccacttggcgagcaggagtgtcctcgggaacaaacggcggcgcaagcaccagcgtgctggacggtccctctactagtagcaccattcgtacgagaaatgcagccagagcaggcgcttcatttttctcctggattcagcatcggtag

SEQ ID NO: 220313 - DNA, 2220 bp, Artificial Sequence
  derived and/or modified sequence
atggctgagggctcattcagtgtacaaagtgagtcgtatagtgtagaggatatggacgaagggagcgacgaggtcggcgaggaggaaatggttgagggaaatgactacgaagaattcggcgcctttggtggatatggaacactcacatctttcgacatccacatcctcagagcctttggttctctcggccccggattacgtattctctcaaacgagccctgggagttggaaaaccctgtgcttgctcaaaccttggtcgaggccctgcagttggatcccgaaaccctcgctaatgagacagcagccagggccgccaatgtcgcacgagctgcggcctccaaccgtgccgctcgggcggctgccgcggccgcacggaccgctttcagtcaggtggtggccagccatagggtggcaactcctcaggtgtcaggcgaggacacgcaacctaccacgtatgcagccgaagcccaggggcctacgcctgaacccccacttgcttccccacagacatctcagatgctcgtcacctccaagatggccgcccccgaggcccccgccacatctgcacagtctcaaaccggatccccagcacaggaggccgcaacagaaggaccatcttctgcctgcgcattctcccaggccccttgcgctcgtgaggtcgacgccaatagaccttccacagcctttctcggccagaacgacgtcttcgactttacccagcccgccggagtgtctgggatggcattccccaggccgaagcgccccgccccagcccaggaagccgcaactgagggtccatccgccgcttcaggagtgcctcagaccgggccaggcagagaggttgccgccacccggcctaaaaccaccaagtctggaaaggcccttgccaaaacccggtgggtagagccccagaacgtcgtcgccgccgctgcagctaaggccaaaatggcaaccagcatccctgagcctgagggggctgcggctgccaccgcccagcacagcgctgaaccttgggcgagaatgggcggtaaacggactaaaaagtccaagcatttggacgatgaatatgagtcatctgaggaagaacgcgaaactccagccgttccacctacctggcgggcttcccagccctcactgactgtgcgggcacagctagcaccccgccctccgatggcaccacgatcacaaatacctagtaggcatgtcttatgcctgccaccacggaatgtgactcttctccaggagcgcgcgaataaactggttaagtacttgatgatcaaggactataagaaaatccccatcaagagagcggacatgctaaaggacgtcatccgagaatatgacgaacacttcccagagatcattgagcgagcgacgtacaccttagaaaaaaagttcggaattcatctgaaggagattgataaggaggaacatctctatatcctggtttgtacaagggactcaagcgccagacttctcgggaaaaccaaggacacaccgcggttaagtctcctgttggtgatcctcggtgtcatattcatgaacggtaacagagcttctgaggcagtgctgtgggaagccctgagaaagatgggcctgcggcctggtgtccggcacccgtttctaggtgacctgcggaaactgatcacagacgattttgtcaagcagaaatacctggaatataaaaagattccgaatagtaacccacccgaatacgagttcttgtggggcttacgggctcgccacgaaacaagtaaaatgcgggtgctgagattcattgcccagaaccagaatcgggaccctcgagagtggaaggcacatttcttggaagcagtggacgatgcttttaaaacaatggacgtagatatggccgaggagcatgcccgggcacaaatgcgtgcccagatgaatattggtgacgaggccctgatcggcagatggtcctgggatgatatccaggtggaactgctgacatgggatgaggatggagatttcggagacgcctgggctcgtatccccttcgccttctgggccaggtaccaccaatacattcttaatagtaaccgggcaaatcggcgagccacgtggagagcaggggtgtcatcaggtaccaacggcggtgcttcaacaagtgtgctggacggaccctctacatccagtacaatccggactcgaaacgcggcacgggcgggcgcctcctttttttcatggattcagtag

SEQ ID NO: 220314 - DNA, 2226 bp, Artificial Sequence
  derived and/or modified sequence
atggccgaaggatctttcagtgtccagtcagaaagctattccgtggaggacatggatgaagggagcgatgaagtgggtgaagaggagatggtggaagggaacgactacgaggaattcggagcattcggcgggtatggaacactgacctcctttgatattcacatccttagggccttcgggagcctgggccctggattgaggatactgtctaatgagccatgggaactggagaaccccgtcctcgctcagactttggtggaggctctgcagctggatccggagactcttgcaaatgaaacagctgcacgagctgcaaatgtggcccgggcagccgccagcaaccgggctgccagagccgccgctgctgccgctagaactgcattctcacaggttgtggctagccaccgggtggctacaccccaggtgtcaggagaggacacgcaacccactacatatgcagcagaggcccaaggacccactcccgaaccacctttggccagtccacaaacttcacagatgctcgtgactagcaaaatggcagcccccgaggcccctgccaccagtgcccagtctcagaccgggagccccgcacaggaggccgccactgagggtccaagttccgcatgtgccttcagccaggccccctgcgcccgagaggtggacgctaatcgccccagcaccgccttcctgggtcaaaatgacgttttcgactttacccagccagcaggtgtgtccgggatggcgtttccccgcccaaagcgccctgctccagcacaggaggccgctacagagggcccctccgcagcttctggagtccctcagacgggaccagggagggaggttgctgcgactcggccaaaaaccaccaagtccggcaaagcccttgccaaaacaagatgggtggagcctcaaaatgtggtggcagccgccgctgctaaggccaagatggccacgagtatcccggagccagagggggccgctgcagccaccgcgcagcattcagccgagccgtgggccaggatgggagggaagaggaccaagaagagcaagcatttggatgacgagtatgaaagtagcgaagaggagagggaaactcctgccgttcctcccacatggcgagcgagccagcccagcttaactgtccgtgcacagctggcccctagaccacctatggccccccggagccagatcccatctcggcacgttctgtgtctccctccccgaaatgtcacactgctgcaagaaagagcaaacaaattggtgaagtatctcatgattaaggattataagaagatacctataaaaagagctgacatgttgaaggatgtgatcagagaatacgacgaacactttcctgagatcatcgaaagggccacttataccctggaaaaaaaatttggcattcacttgaaggaaatagataaggaggaacatctgtatatcttggtgtgtacaagggacagttcagcaagactgctggggaaaactaaagacaccccacgcctgtccctgctgctggtgatcctgggcgtgatatttatgaacggcaatcgcgcaagcgaagccgtgctgtgggaagcgttaaggaaaatgggacttagaccaggggtgcgacacccgttcctgggcgatctgcgcaaattgatcacagacgactttgtgaaacagaagtatctggagtataaaaaaattcccaactccaaccccccagaatatgaatttttgtggggactgagagcaaggcatgagacgtccaagatgagagtgctacgtttcatcgcacagaaccagaatcgggaccctcgcgagtggaaggcccacttcctggaggcagtggatgatgcatttaagacgatggacgtggatatggctgaagagcatgcccgagcccagatgcgagcacagatgaatatcggagatgaagccctgattggtcgctggtcatgggacgacattcaagtggaactgcttacctgggacgaggacggagacttcggcgatgcttgggccaggatccctttcgcattctgggctagataccaccagtatatactgaattcaaacagagcaaatagacgcgccacatggagggctggagtgtcctccgggaccaatggtggggcttccacaagcgtgctagatggaccgtctacatcaagtactattcggacccgcaacgcggctcgggccggggcgagcttcttttcctggatacaacaccggtag

SEQ ID NO: 220315 - DNA, 2495 bp, Artificial Sequence
  derived and/or modified sequence
gcggctgcggggttcctggtgctgaggacggacgccattggagttcccgagaagcatggctgagggaagcttcagcgtgcaatcggaaagctacagtgttgaagacatggatgagggtagcgacgaagtcggggaggaagagatggttgaaggcaacgactatgaagaattcggtgcgtttggtggctatggcaccctcaccagctttgacatccatatcctcagagccttcggaagcttgggtccaggccttcgcatcttatcgaatgagccctgggaactggaaaaccctgtgctggcccagaccctggtggaggcattgcagctggatccggaaacacttgccaatgagacggccgcccgtgctgccaacgtagcccgcgccgccgcctccaaccgtgcggctcgggccgctgccgccgctgcccgtaccgccttcagtcaggtggtcgctagccaccgggtggccacgccgcaggtctcaggagaggatacccagcccacgacctacgccgccgaggctcaggggcccacccctgagccaccccttgcttctccgcagacctcccagatgttagtcaccagtaagatggctgcccccgaggctccggcaacctccgcacagtcccagacaggctccccggcccaggaggctgctactgagggccctagtagcgcctgtgctttctctcaggctccgtgtgccagggaggtggacgccaaccggcccagcacagccttcctgggccagaatgatgtcttcgatttcactcagccggcaggtgtcagtggcatggccttcccgcgccccaagagacctgccccagcccaagaggctgccacagagggccccagtgctgcctctggtgtgccccagacgggacctggcagggaggtggcagccacccggcccaagaccaccaagtcggggaaggcgctggccaagactcggtgggtggagcctcagaatgttgtggcagcagctgctgccaaggccaagatggccacgagcatccctgagccggagggtgcagctgctgccactgctcagcacagtgctgagccctgggccaggatgggaggcaagaggaccaagaagtccaagcacctggatgatgagtatgagagcagcgaggaggagagagagactcccgcggtcccacccacctggagagcatcacagccctcattgacggtgcgggctcagttggcccctcggcccccgatggccccgaggtcccagataccctcaaggcacgtactgtgcctgcccccccgcaacgtgacccttctgcaggagagggcaaataagttggtgaaatacctgatgattaaggactacaagaagatccccatcaagcgcgcagacatgctgaaggatgtcatcagagaatatgatgaacatttccctgagatcattgaacgagcaacgtacaccctggaaaagaagtttgggatccacctgaaggagatcgacaaggaagaacacctgtatattcttgtctgcacacgggactcctcagctcgcctccttggaaaaaccaaggacactcccaggctgagtctcctcttggtgattctgggcgtcatcttcatgaatggcaaccgtgccagcgaggctgtcctctgggaggcactacgcaagatgggactgcgccctggggtgaggcacccattcctcggcgatctgaggaagctcatcacagatgactttgtgaagcagaagtacctggaatacaagaagatccccaacagcaacccacctgagtatgaattcctctggggcctgcgagcccgccatgagaccagcaagatgagggtcctgagattcatcgcccagaatcagaaccgagacccccgggaatggaaggctcatttcttggaggctgtggatgatgctttcaagacaatggatgtggatatggccgaggaacatgccagggcccagatgagggcccagatgaatatcggggatgaagcgctgattggacggtggagctgggatgacatacaagtcgagctcctgacctgggatgaggacggagattttggcgatgcctgggccaggatcccctttgctttctgggccagataccatcagtacattctgaatagcaaccgtgccaacaggagggccacgtggagagctggcgtcagcagtggcaccaatggaggggccagcaccagcgtcctagatggccccagcaccagctccaccatccggaccagaaatgctgccagagctggcgccagcttcttctcctggatccagtaagagtttcggcaccgttgacgaactgcagcgatcttactggccaagccagagcgcctcctctcagattccttctcgacacagcaccctaggcggcttcttcctgtcagtcggaggtggcatgcaagatgaagctctctttgctcttcctgctttcattttgtgcttttccttgtgttttcatgttttgggtatcagtgttacattaaagttgcaaaattaa

SEQ ID NO: 220316 - DNA, 2578 bp, Artificial Sequence
  derived and/or modified sequence
gggggtgcacggagaaaaggggcggggtggtccgggctgctgtgctggcagcagtaggcgagggcgcggctgcggggttcctggtgctgaggacggacgccattggagttcccgagaaggctgagctctcatctccctgggacccgcagcatggctgagggaagcttcagcgtgcaatcggaaagctacagtgttgaagacatggatgagggtagcgacgaagtcggggaggaagagatggttgaaggcaacgactatgaagaattcggtgcgtttggtggctatggcaccctcaccagctttgacatccatatcctcagagccttcggaagcttgggtccaggccttcgcatcttatcgaatgagccctgggaactggaaaaccctgtgctggcccagaccctggtggaggcattgcagctggatccggaaacacttgccaatgagacggccgcccgtgctgccaacgtagcccgcgccgccgcctccaaccgtgcggctcgggccgctgccgccgctgcccgtaccgccttcagtcaggtggtcgctagccaccgggtggccacgccgcaggtctcaggagaggatacccagcccacgacctacgccgccgaggctcaggggcccacccctgagccaccccttgcttctccgcagacctcccagatgttagtcaccagtaagatggctgcccccgaggctccggcaacctccgcacagtcccagacaggctccccggcccaggaggctgctactgagggccctagtagcgcctgtgctttctctcaggctccgtgtgccagggaggtggacgccaaccggcccagcacagccttcctgggccagaatgatgtcttcgatttcactcagccggcaggtgtcagtggcatggccttcccgcgccccaagagacctgccccagcccaagaggctgccacagagggccccagtgctgcctctggtgtgccccagacgggacctggcagggaggtggcagccacccggcccaagaccaccaagtcggggaaggcgctggccaagactcggtgggtggagcctcagaatgttgtggcagcagctgctgccaaggccaagatggccacgagcatccctgagccggagggtgcagctgctgccactgctcagcacagtgctgagccctgggccaggatgggaggcaagaggaccaagaagtccaagcacctggatgatgagtatgagagcagcgaggaggagagagagactcccgcggtcccacccacctggagagcatcacagccctcattgacggtgcgggctcagttggcccctcggcccccgatggccccgaggtcccagataccctcaaggcacgtactgtgcctgcccccccgcaacgtgacccttctgcaggagagggcaaataagttggtgaaatacctgatgattaaggactacaagaagatccccatcaagcgcgcagacatgctgaaggatgtcatcagagaatatgatgaacatttccctgagatcattgaacgagcaacgtacaccctggaaaagaagtttgggatccacctgaaggagatcgacaaggaagaacacctgtatattcttgtctgcacacgggactcctcagctcgcctccttggaaaaaccaaggacactcccaggctgagtctcctcttggtgattctgggcgtcatcttcatgaatggcaaccgtgccagcgaggctgtcctctgggaggcactacgcaagatgggactgcgccctggggtgaggcacccattcctcggcgatctgaggaagctcatcacagatgactttgtgaagcagaagtacctggaatacaagaagatccccaacagcaacccacctgagtatgaattcctctggggcctgcgagcccgccatgagaccagcaagatgagggtcctgagattcatcgcccagaatcagaaccgagacccccgggaatggaaggctcatttcttggaggctgtggatgatgctttcaagacaatggatgtggatatggccgaggaacatgccagggcccagatgagggcccagatgaatatcggggatgaagcgctgattggacggtggagctgggatgacatacaagtcgagctcctgacctgggatgaggacggagattttggcgatgcctgggccaggatcccctttgctttctgggccagataccatcagtacattctgaatagcaaccgtgccaacaggagggccacgtggagagctggcgtcagcagtggcaccaatggaggggccagcaccagcgtcctagatggccccagcaccagctccaccatccggaccagaaatgctgccagagctggcgccagcttcttctcctggatccagcaccgttgacgaactgcagcgatcttactggccaagccagagcgcctcctctcagattccttctcgacacagcaccctaggcggcttcttcctgtcagtcggaggtggcatgcaagatgaagctctctttgctcttcctgctttcattttgtgcttttccttgtgttttcatgttttgggtatcagtgttacattaaagttgcaaaattaa

SEQ ID NO: 220317 - DNA, 2482 bp, Artificial Sequence
  derived and/or modified sequence
cggctgcggggttcctggtgctgaggacggacgccattggagttcccgagaagcatggctgagggaagcttcagcgtgcaatcggaaagctacagtgttgaagacatggatgagggtagcgacgaagtcggggaggaagagatggttgaaggcaacgactatgaagaattcggtgcgtttggtggctatggcaccctcaccagctttgacatccatatcctcagagccttcggaagcttgggtccaggccttcgcatcttatcgaatgagccctgggaactggaaaaccctgtgctggcccagaccctggtggaggcattgcagctggatccggaaacacttgccaatgagacggccgcccgtgctgccaacgtagcccgcgccgccgcctccaaccgtgcggctcgggccgctgccgccgctgcccgtaccgccttcagtcaggtggtcgctagccaccgggtggccacgccgcaggtctcaggagaggatacccagcccacgacctacgccgccgaggctcaggggcccacccctgagccaccccttgcttctccgcagacctcccagatgttagtcaccagtaagatggctgcccccgaggctccggcaacctccgcacagtcccagacaggctccccggcccaggaggctgctactgagggccctagtagcgcctgtgctttctctcaggctccgtgtgccagggaggtggacgccaaccggcccagcacagccttcctgggccagaatgatgtcttcgatttcactcagccggcaggtgtcagtggcatggccttcccgcgccccaagagacctgccccagcccaagaggctgccacagagggccccagtgctgcctctggtgtgccccagacgggacctggcagggaggtggcagccacccggcccaagaccaccaagtcggggaaggcgctggccaagactcggtgggtggagcctcagaatgttgtggcagcagctgctgccaaggccaagatggccacgagcatccctgagccggagggtgcagctgctgccactgctcagcacagtgctgagccctgggccaggatgggaggcaagaggaccaagaagtccaagcacctggatgatgagtatgagagcagcgaggaggagagagagactcccgcggtcccacccacctggagagcatcacagccctcattgacggtgcgggctcagttggcccctcggcccccgatggccccgaggtcccagataccctcaaggcacgtactgtgcctgcccccccgcaacgtgacccttctgcaggagagggcaaataagttggtgaaatacctgatgattaaggactacaagaagatccccatcaagcgcgcagacatgctgaaggatgtcatcagagaatatgatgaacatttccctgagatcattgaacgagcaacgtacaccctggaaaagaagtttgggatccacctgaaggagatcgacaaggaagaacacctgtatattcttgtctgcacacgggactcctcagctcgcctccttggaaaaaccaaggacactcccaggctgagtctcctcttggtgattctgggcgtcatcttcatgaatggcaaccgtgccagcgaggctgtcctctgggaggcactacgcaagatgggactgcgccctggggtgaggcacccattcctcggcgatctgaggaagctcatcacagatgactttgtgaagcagaagtacctggaatacaagaagatccccaacagcaacccacctgagtatgaattcctctggggcctgcgagcccgccatgagaccagcaagatgagggtcctgagattcatcgcccagaatcagaaccgagacccccgggaatggaaggctcatttcttggaggctgtggatgatgctttcaagacaatggatgtggatatggccgaggaacatgccagggcccagatgagggcccagatgaatatcggggatgaagcgctgattggacggtggagctgggatgacatacaagtcgagctcctgacctgggatgaggacggagattttggcgatgcctgggccaggatcccctttgctttctgggccagataccatcagtacattctgaatagcaaccgtgccaacaggagggccacgtggagagctggcgtcagcagtggcaccaatggaggggccagcaccagcgtcctagatggccccagcaccagctccaccatccggaccagaaatgctgccagagctggcgccagcttcttctcctggatccagcaccgttgacgaactgcagcgatcttactggccaagccagagcgcctcctctcagattccttctcgacacagcaccctaggcggcttcttcctgtcagtcggaggtggcatgcaagatgaagctctctttgctcttcctgctttcattttgtgcttttccttgtgttttcatgttttgggtatcagtgttacattaaagttgcaaaattaa

SEQ ID NO: 220318 - DNA, 2220 bp, Artificial Sequence
  derived and/or modified sequence
atggccgagggcagcttcagcgtgcagagcgagagctacagcgtggaggatatggatgagggtagcgacgaagtaggagaagaagaaatggtggagggcaacgattatgaagagtttggagccttcggaggttacggaaccctgacatcttttgatattcacatcctgcgcgcatttggaagtttgggccctggcctgaggattttatcaaacgagccgtgggaattggagaaccctgtgctggcccaaacgctggtggaggcccttcagttggatccagagaccttggcaaacgaaacagcagcccgcgctgcgaatgtggccagggcggccgcctctaacagggcggcacgcgccgctgccgcagcagctagaactgccttttcgcaagtggtagcttcgcatcgcgtggcgaccccgcaggtgtcaggagaggatacacagccaacaacatacgcagctgaggctcagggccctactccggagccccccctcgctagtcctcagaccagccagatgctcgtgacctcaaagatggctgcacctgaggcacctgcgactagcgcacagtctcaaaccggatcacccgcccaggaagctgcaaccgagggaccctcgtccgcctgtgcattctcccaagcaccttgtgcacgtgaagttgacgctaaccggccctcaactgccttcctggggcagaacgacgtgtttgatttcacacagccagccggcgtaagcggcatggccttcccacgccctaagagacccgcacctgctcaggaggccgccacagaaggtccgagcgccgcctcaggcgtgccacagacgggccccggcagggaggttgccgccacacggccgaagaccactaagtccggtaaggcactcgctaaaacccgttgggtggaaccccagaatgtcgtggccgcagctgccgctaaggcaaagatggctaccagcattccagaacctgaaggggcggcggccgcaacggctcagcatagcgcagaaccatgggcccggatgggagggaaacgcacaaagaaatctaagcatctagatgatgaatacgaatcatccgaggaagagagggaaacgcccgccgtccctccaacttggagggcctcccaaccaagcctgactgtgcgagctcagctcgctccccggccccctatggcgcctcggtcacagatcccttccagacacgtattatgtctgccccctcgaaatgttacactgcttcaggagcgagccaacaagctggttaagtatcttatgatcaaggattacaagaagatcccaatcaagcgggctgatatgcttaaggacgtgatccgagaatacgacgaacattttcccgaaataatcgagcgagccacatacaccctggaaaaaaaatttggaatacacctgaaggaaatcgacaaggaggagcacttatacatcctggtgtgtaccagggatagcagcgctcgcctgctgggcaagaccaaggacacacctcggttgtcccttctactcgtcatcctgggagtcatcttcatgaatggtaatagggccagcgaggccgtcttgtgggaggctctgaggaagatgggcctacgtccgggggtccgccacccattcctcggcgacctgcgaaaattaattacggacgacttcgtgaaacagaaatatctcgagtacaagaagatacccaacagcaaccctcccgagtatgaatttctgtggggattgagggcccgacacgaaaccagcaagatgcgcgtgctccgcttcatagctcagaaccagaaccgcgaccccagagagtggaaagctcattttttagaggccgtcgatgatgccttcaagacgatggatgttgatatggccgaggaacatgcaagagctcagatgagggcccaaatgaacatcggagatgaggcattgatcggtcgatggtcctgggatgatatccaggttgagctgctgacctgggatgaagacggcgatttcggagatgcctgggccagaattccgttcgctttctgggcgcgctatcaccagtatatcttgaactcgaacagggctaataggcgggcaacctggagggcaggtgtcagttctggtaccaatggtggcgcctccacctccgtccttgatggcccatcaacaagttcgactatccgaacccgaaacgcagcccgggccggcgcaagttttttcagctggatacaatag

SEQ ID NO: 220319 - DNA, 2226 bp, Artificial Sequence
  derived and/or modified sequence
atggccgagggcagcttcagcgtgcagagcgagagctacagcgtggaggatatggatgagggttccgatgaggtaggagaagaagagatggttgaaggtaatgactacgaagaattcggtgcattcggaggatacggaacactgacctcttttgacattcacattttaagagcttttgggagccttggccctggtctgaggatcctttctaatgagccttgggagttagaaaatccagttctcgctcaaactctagttgaggctctccagcttgaccccgagaccctggctaacgagacagcggctagagccgcaaacgtggctagggctgctgctagcaaccgcgccgctagggctgctgccgccgcggccaggactgccttttcccaggtggtcgcctcacaccgggtggccaccccgcaggtcagtggagaggacacccagcccaccacctatgctgctgaagctcagggaccgacacctgaacctcctctcgcctcaccccagaccagccagatgctggtgacatccaaaatggcagctccagaggctcccgcaaccagcgcacaatcacaaactggcagccctgcccaagaagctgcaaccgagggaccctcttctgcatgtgcattttcccaagccccttgcgcccgcgaggtggatgcaaatcgcccttccacagcttttctgggccagaatgatgtcttcgattttacccaaccggcgggggtgtccggtatggcctttccgcgccccaaacggccggcacccgcccaggaagccgccaccgagggaccctctgcggcttcaggcgtgcctcaaactggccctggacgggaggtggcggcgactcgacccaagaccaccaaatcagggaaagcgctagccaagacaagatgggtggaaccgcagaatgtggtggccgccgcagctgcaaaagcaaagatggcaacgtcaatcccagaaccagaaggcgccgccgccgcaacagcccaacactcagcagagccctgggcgcgaatgggtggcaaacgcacaaaaaaatccaaacatctcgacgacgagtatgagagctccgaggaagagcgcgagacacccgctgtgcctccaacttggagggcttcacagcctagtcttaccgtcagagcccaactcgcgccacggccacctatggcccccagatcacagatcccatctcgccatgtgctgtgtctgcctcctaggaatgtaaccctcctgcaggaacgcgctaataaattggtcaaatacctcatgattaaagattacaagaaaattcctattaagcgtgccgatatgctcaaagacgttatccgggagtatgacgagcattttccagagataatcgaacgagctacctatactcttgagaaaaagttcggcattcacctgaaggaaatcgataaggaagagcatttgtatattctggtgtgtaccagggattcctcagccaggctactagggaagacaaaagacacgcctcgacttagtctactccttgttatattgggggtcattttcatgaacggcaatagggccagcgaggccgtgctgtgggaggcgttacgcaaaatgggtttgcggcccggcgtcagacacccgttccttggggacctaagaaaactgataactgatgatttcgtgaagcaaaagtatctggagtataagaaaattcccaattcgaatccacccgaatatgagttcctgtggggactgagggctcggcatgagaccagcaagatgagagttttaagattcattgcgcagaatcaaaaccgagaccctcgtgaatggaaggcccactttctcgaagcagtggatgacgcttttaaaaccatggacgtggacatggccgaggagcatgcacgcgcacaaatgcgcgcacagatgaatattggggatgaagccctgatcggaagatggagctgggacgacatccaggtggagctactgacttgggacgaggacggcgactttggagatgcatgggcgaggatcccctttgcgttctgggccagataccaccaatatatcctgaacagcaatcgggctaaccgcagagcaacatggcgagccggcgtcagcagtggaacaaatggcggggcctccacatcagtgctggacggcccaagtacctcttctaccattcggaccaggaacgcagcgcgtgctggcgcttcttttttttcctggattcagcaccggtag

SEQ ID NO: 220320 - DNA, 2220 bp, Artificial Sequence
  derived and/or modified sequence
atggccgagggcagcttcagcgtgcagagcgagagctacagcgtggaagacatggatgagggatcggacgaagtaggcgaggaagagatggtggaagggaatgattacgaggagttcggcgcattcggcggctatggtaccctgacttcctttgatattcacatactgagagcattcggaagccttggacctggcctgcgcattcttagcaacgaaccttgggagctggagaatcctgttctcgcacagacactcgtggaagctttgcagttggacccggaaacactggccaacgagaccgcagcacgcgcagcgaatgtcgcccgcgccgctgccagtaacagggccgccagggcagccgccgccgcagcccgaaccgcgttctcccaggtggtggcctcccaccgggtcgccaccccccaggtgtcaggcgaagacacgcagcccacaacgtatgcagctgaggcacagggcccgacccctgagccaccacttgcatcgccccagaccagtcagatgctagtcacctctaagatggccgccccggaggcccccgctaccagcgctcagtctcagaccggcagccccgctcaagaggctgctacagaagggccctctagtgcgtgcgctttttcgcaagccccatgtgcccgcgaggtagacgcaaaccggcctagcacagctttcctcggacaaaatgatgtcttcgattttacacagcccgctggggtgtccggcatggctttcccccgacccaagcgccctgccccagctcaggaagcagcgaccgaggggccttcggctgcctccggcgttccacagaccggtccaggacgcgaagttgccgcgacccggccaaaaactactaaaagcggcaaagcactcgctaaaacccgttgggttgagcctcaaaatgtcgtcgccgctgctgcagcgaaggccaagatggccacttcaatccccgaacctgaaggcgccgccgctgcaactgctcagcactctgccgagccttgggcccggatggggggaaaacgtaccaaaaagtcgaagcatctggacgacgagtacgaatcatccgaagaagagcgtgagaccccggcggttccccccacatggcgtgcctctcagccgagtttaaccgttcgcgcacaactggccccaaggccccccatggcccccaggtctcaaatcccttctagacatgtgctctgtctcccccccagaaacgtgactctgctgcaggagagggcgaataagctggtgaaatatctgatgatcaaggactataagaaaattcccatcaagagggccgatatgttaaaggacgtgattagagagtacgacgagcatttccctgagattattgagcgtgcaacatacactttagaaaaaaaatttggtatacatctgaaagagattgataaagaagaacatctgtatatcctcgtatgtactcgggactcttccgcaagattgctcggcaagacaaaagacaccccgcgcctgtctcttttgctggttatccttggagtgatctttatgaacggtaatagagcttctgaggcagtgctgtgggaagctctgaggaagatgggcctacgacctggggtgaggcaccccttcctcggtgatctccggaagctcattacagacgactttgtaaagcagaagtacctcgagtataagaagattcccaactccaacccaccggagtacgaattcctgtggggcttaagagccaggcatgagaccagcaagatgagggtcctccggttcatcgctcagaaccagaatagagatcccagggagtggaaggctcactttctggaagcagtggacgatgcttttaaaacaatggacgttgacatggccgaggagcatgcgcgcgctcaaatgagggcacaaatgaacatcggcgatgaagcactgattgggagatggagctgggacgacattcaggtggaactcctgacctgggacgaagatggcgacttcggggatgcctgggctcgcataccttttgcattttgggcaagatatcaccagtatatcctgaacagcaatcgcgccaacagaagagccacatggagggccggagtctcttccggcacgaatgggggagcttctacttctgtgctcgacggaccgagcactagttctacaattcgaacgcggaatgccgctcgggcgggggcctcgtttttctcctggatccagtag

SEQ ID NO: 220321 - DNA, 2226 bp, Artificial Sequence
  derived and/or modified sequence
atggccgagggcagcttcagcgtgcagagcgagagctacagcgtggaggatatggacgagggcagtgacgaagtcggggaggaggaaatggtggaaggcaacgactatgaagagttcggggcttttggagggtacggtacactgacgagttttgacatacacatcctccgtgccttcggcagcctagggcctggactccgaatactttccaacgaaccttgggaacttgagaatcctgtgctcgctcaaacactggtggaagccttgcagctggaccctgagactctggccaacgagactgctgctagggccgcgaatgtggctcgagcagccgcatccaatcgagccgctagagccgcagccgctgccgcgaggaccgccttttcacaagtggtggcctcacacagggtcgcaactccccaggtgtcaggggaggacactcagcccacaacgtatgctgcagaggcacaaggtcctactcctgagcccccactcgcaagtcctcagactagccaaatgttggtgaccagcaagatggcagcccccgaagcccccgccacgagtgcacagtctcagacaggctcccctgcccaggaagctgcaacggagggtcccagtagtgcttgtgcattctctcaagccccttgtgctagagaagtggacgccaacagaccctctaccgctttcctgggtcagaatgacgtattcgatttcactcaacccgccggcgtttcagggatggcctttccccgtcccaaacgaccagcccccgcccaagaggcagccacggaaggacctagcgcagcatccggagtaccacaaacaggtccaggcagagaggtagcggctacacgccccaaaaccaccaagtccggtaaggccctagcaaagactaggtgggtggagccacagaacgttgtcgctgcagccgccgccaaagccaaaatggctaccagcatcccggagccggagggagcagccgctgctaccgcccaacacagcgcggaaccctgggcccgaatgggcgggaaacgaaccaagaaatccaagcacctagatgatgaatatgagtccagcgaagaggaacgtgagactcctgccgtgcccccgacttggcgagccagccagccatctttaaccgttcgtgcacagttagccccccgtcccccgatggctcctaggagtcagattcctagtagacacgtcctgtgtctccctcctcggaatgtgaccctgctgcaggagagagcgaataagttggtaaagtacctgatgatcaaagactataagaagatccccatcaaacgggcagacatgctcaaagatgtcatccgggaatacgacgagcacttcccagagattatcgagcgggctacatacaccctggagaagaaattcgggatccatcttaaagaaatagacaaagaggaacacctttacatcctcgtctgcactcgcgacagttcagctcgtctgctgggaaaaacaaaagatacaccccggctttccctcctactcgttatcctgggggttatattcatgaatggcaatcgcgccagcgaagctgtgctgtgggaagccctgaggaaaatggggttgcggcccggggtgcggcatccctttctgggcgacctccggaagctgatcaccgacgattttgtaaagcaaaagtatctggaatacaagaagatccctaattctaaccctcctgagtacgagttcctttggggcttgcgggcacgccacgaaactagcaaaatgcgtgtgctcaggttcatcgcgcagaatcagaaccgagaccctagagaatggaaggcgcactttttagaggcggtggacgacgcttttaagaccatggacgtggacatggccgaagaacatgccagggcacagatgcgcgctcagatgaatatcggtgatgaggctttaattggacggtggtcttgggatgacatacaggttgaattactcacatgggatgaggacggggactttggagatgcttgggctagaatcccgtttgcattttgggctagataccatcagtacattctcaatagtaacagagctaaccgtcgagctacgtggcgggctggggtatcaagcggaaccaacggcggtgcctcgacctccgtgctggatgggccttctacgagttcaaccatcaggactcgaaacgccgcccgagccggggcttctttcttttcatggattcagcatagatag

SEQ ID NO: 220322 - DNA, 2220 bp, Artificial Sequence
  derived and/or modified sequence
atggctgaggggagtttctctgtacagagcgagtcatactcagtggaagatatggatgagggatccgacgaggtcggggaagaagaaatggttgagggcaacgattacgaggaatttggcgcattcgggggttatgggactctcacatctttcgacattcacattttgcgagcgttcgggtccctcggcccaggcctcaggattttgtccaacgaaccttgggagctcgagaatccggtgcttgctcaaaccctggtcgaagccctgcagctcgaccccgagacgcttgcgaacgagacagcggcaagggctgccaacgtcgcaagagctgcagcatcaaacagggctgctcgagctgccgctgcagctgcaagaaccgcgttttctcaagttgtggcgtcgcaccgcgtggccactccgcaggtatctggagaggatacccaaccaactacatacgccgcagaagcacagggcccaacacccgagcctcccctggcttccccccagacctcccagatgctggtaacatcaaagatggcagctcccgaagctcctgcaactagcgcacagtctcaaactggctctccagcccaggaagcagcgacagagggcccatcctcagcctgtgcctttagccaggccccatgtgccagggaagtggatgctaacagaccgagtaccgcattcctcggacagaacgatgtgttcgacttcactcagcctgcaggcgtatcaggcatggcctttcccagacccaagcgaccagccccagctcaggaggccgcaacagaagggccttccgccgcttcaggagtgccgcagactggcccagggagagaagttgctgccactcggcctaaaactaccaaatccggaaaggcgctggctaagacgcgctgggtggaaccacaaaacgtggtggctgccgcagctgcgaaggctaagatggctacaagtatccctgagcctgagggggcagcagccgctaccgcgcagcactccgctgagccctgggcgcgtatgggtggcaaaaggacaaaaaagtccaagcacctcgacgatgaatatgaatcctctgaggaagagagagagacacccgctgtacccccaacttggcgggcatcgcagccctcactcaccgtacgagcccagctggcccctaggcctccgatggctcccaggtcgcagattccgagtagacatgtgctgtgtctgcccccaagaaacgtgacattgcttcaagaacgggctaacaagttagttaagtacctgatgatcaaagattataagaagatccctattaaacgggcagatatgctgaaggacgtgattagggagtatgacgagcattttcccgaaatcatcgagagggccacatatactctcgagaaaaaattcggcatccatttgaaagaaatagacaaggaagagcacctgtatatcctggtgtgcactcgggatagttccgctagactcctgggcaaaacaaaggacaccccacgactgtcacttttgctggtaatcctgggcgtcatattcatgaatggtaatcgtgccagtgaagcagttctgtgggaggcactgagaaaaatgggactccggccaggagtgagacatccctttttgggcgacctgaggaagctcatcacagacgactttgtgaagcagaagtacctcgaatacaaaaaaattccaaactctaacccacctgagtatgaattcttatgggggctaagagccaggcacgagaccagcaaaatgagggtgctgcgctttatcgctcaaaaccagaatcgggacccccgagagtggaaggcccacttcctggaggctgtggatgatgccttcaaaaccatggatgtggatatggccgaggaacatgccagggctcagatgagagctcagatgaacataggagacgaggccctaatcggacgttggagctgggatgacatacaggtcgaactgttaacttgggatgaagatggggatttcggagatgcatgggcccgtatcccgtttgccttttgggcacggtaccatcagtatattctgaactcgaatagggccaaccgcagagcgacctggagagcgggtgtctcaagtggcactaacggaggtgcctccacatctgtgctcgacggaccgtctacttcctccaccatacgaactcggaacgctgctcgcgctggtgcaagctttttcagctggatacagtag

SEQ ID NO: 220323 - DNA, 2226 bp, Artificial Sequence
  derived and/or modified sequence
atggccgagggtagcttctcagtgcaatccgagagctatagcgtggaggacatggacgaaggctcagatgaagttggcgaggaggaaatggttgagggaaatgactatgaagagtttggcgctttcggagggtatggcacgctgacctcattcgatatccacattctgcgcgcttttggcagccttggaccagggctccgcatactaagcaacgaaccctgggagcttgagaatcccgtgcttgcccagaccctggtggaagccctgcagctggaccccgagactctcgcgaacgagacagccgctagggctgccaacgtcgccagagccgctgcatccaaccgggctgcccgtgcagcagctgccgcagcccgtactgcgttttcccaagtggtggcctctcaccgcgtagccacgcctcaggtgtctggggaagatacccagcctaccacttatgctgcggaggcccagggacccacaccagagcctccactggcctccccacagacctcccaaatgctggtcacaagcaaaatggccgcacctgaagccccagccacatctgcgcagtcccaaaccggttcaccagctcaggaagctgctacagagggccctagctccgcatgtgccttcagtcaggccccatgtgcaagagaggttgacgcaaataggccctctactgctttcttaggccagaacgacgtgttcgatttcactcagcctgccggagtgagcggaatggctttccctaggcctaaacgccctgccccagcgcaggaggctgctaccgagggacctagcgccgctagtggagtcccccagaccggtcctgggcgtgaggtcgccgctactcgcccaaagactacaaagagtgggaaagctctcgccaaaacaagatgggtcgagccccagaacgtggtggctgctgcagctgctaaggctaaaatggctacttctatcccagagccagaaggcgcagccgctgccactgcccaacatagcgcggaaccttgggccaggatgggaggtaaaagaactaagaagagcaaacatctggatgacgaatacgagagctccgaagaggagagagaaacaccggctgtgcccccaacctggcgcgcttcgcaacctagcctgacagtgcgtgcgcagttagcccctaggcctccaatggctcccaggtcacagatcccaagtaggcatgtcctgtgccttccgccacgcaacgtaacactcctgcaagagcgagcgaacaagttagttaagtacctcatgataaaggattacaaaaagatcccgatcaagagagctgacatgttaaaggatgtcatacgtgagtatgacgaacacttcccggagatcattgagcgcgctacctatactctcgagaagaaatttggaatccacttaaaggagattgacaaagaggagcacctgtacatcttggtatgcaccagagattcaagcgccaggttactgggaaaaacaaaagataccccaaggctgtcattattgctggtcatcctaggggtcatatttatgaacgggaaccgtgccagcgaggctgtcctgtgggaagcccttcggaaaatgggtttaaggcccggagtcagacatccttttcttggggatctgcgaaaactcataaccgacgatttcgtgaagcagaagtacctcgaatacaagaaaatcccaaacagcaacccacccgaatatgagttcctgtggggattgcgtgcaaggcacgagacgtctaaaatgcgagtactgcggttcatagctcagaatcagaaccgggaccccagagagtggaaagcccacttcctggaagctgtggatgatgcattcaaaaccatggacgtggatatggccgaggagcatgccagggctcagatgcgcgcacaaatgaatattggtgacgaggcactcattgggcgttggagttgggacgatatccaggtggagctcctcacttgggatgaggacggcgattttggggacgcatgggcgcgaatcccatttgctttttgggcaagataccatcagtatattctcaacagcaaccgcgcaaacagaagagcaacatggcgcgcaggcgttagcagcggtaccaatggtggtgctagcactagcgtgctggacggtcccagcacctcgtctacaatcagaacgcggaatgcagctcgggctggagctagctttttttcatggatccagcacaggtag

SEQ ID NO: 220324 - DNA, 2220 bp, Artificial Sequence
  derived and/or modified sequence
atggctgagggaagtttcagtgttcagagcgagtcgtactcggtcgaggatatggacgagggcagcgacgaggtcggggaagaggaaatggtcgaaggtaatgattacgaggagtttggagcctttggagggtatggtactcttacttctttcgatatacatatcctaagagcgttcgggagcctaggtcccggactgcgcatcttgtcaaatgaaccctgggaacttgagaatcccgtgctcgcacagactctcgtagaggccctacaattggatcctgagactctggctaacgagacagccgctagggctgctaacgtggcgcgagccgcagcctctaatcgggctgcaagagccgcagccgctgccgcacggacagccttttcacaggtcgtcgcttctcaccgcgtggcgaccccccaagtatctggggaagacacccagcccaccacctacgcagcagaggctcagggccctacaccagaacccccactcgctagcccccaaactagccagatgctggtgacatctaagatggccgcacctgaggctcccgcaaccagcgctcagagccagacagggtctcctgctcaagaagctgctaccgagggtccttcttccgcctgtgctttctcacaggccccatgtgcacgggaggtggacgccaatagaccctcaacagccttcctgggacagaacgatgtgtttgactttacccaacccgctggagtgtctggcatggcttttccccgtccaaaaaggccggcaccggcacaggaggctgctacagaagggccatcggccgcaagcggagtgccccagacaggacctggaagagaggtggcagccaccagaccgaagaccacaaaaagcggtaaagctctggcaaagacccgttgggttgaaccccagaatgtggtggctgctgctgcggctaaggctaagatggccacttctattcctgagccagagggagctgccgcagccacagcgcagcactccgccgaaccctgggccaggatgggaggaaaaagaaccaaaaagagcaaacacctcgacgacgaatacgaatcttccgaggaagagagagagacacctgctgtaccccctacctggagggcatcacaaccctccctgactgtgagggcacagctcgcacccagaccgcctatggcccctcgctctcagattcctagccgccacgtgctgtgcctgccccctagaaacgtaacactcctccaggaaagggccaataaattggtcaaatatctgatgatcaaggattataagaaaattcccatcaagcgggctgacatgctgaaagatgtgattcgtgaatacgatgaacactttccagaaatcattgaacgggctacttacactctggagaagaagttcggaatccacctgaaagagatcgataaggaggaacacctgtatattctggtttgcacccgcgatagttccgccagactgttaggtaaaaccaaagatacacccagattgtccctgctgctcgttatactcggggtgatctttatgaatgggaaccgagcgtctgaggctgtgctatgggaagctctgcgcaagatggggttgcgccctggggtgaggcacccgttcctaggagacctgaggaagttgatcaccgacgatttcgtgaagcagaaatacctagaatacaagaagatccccaactccaacccgccagaatatgaattcttgtggggcctccgggctcggcacgaaacttcaaagatgcgggttctacgtttcattgcccaaaatcagaacagggaccccagggagtggaaagcccactttttggaggcagtggatgacgccttcaagactatggacgtggatatggcagaagagcatgcgagagctcagatgcgggctcagatgaatatcggggatgaagccctcataggtagatggagctgggacgatattcaagtggaactactgacatgggacgaagatggagattttggcgacgcatgggccaggattcctttcgccttctgggcaaggtatcaccagtacatcttgaatagtaacagggcgaaccggagagctacatggcgcgctggtgtgtcatctggaacaaacggcggtgcctctacctccgtgctcgacggaccttcaacctcttcaaccattcgcacaagaaatgctgcgcgagctggggctagcttcttcagctggattcagtag

SEQ ID NO: 220325 - DNA, 2226 bp, Artificial Sequence
  derived and/or modified sequence
atggcagaggggtcattttccgtccagagtgagagttacagcgtggaggacatggacgaggggagcgacgaggttggggaggaggagatggtggaagggaacgattatgaggagttcggcgcattcgggggttatggtactctcacatccttcgatattcatattctgagagccttcgggagtctgggcccaggcctgagaatactctctaatgaaccatgggaattggagaaccctgtgttagcacagacactggtggaggcattgcagctggaccctgagacacttgccaatgagaccgcggcaagggcagcaaacgtggcccgtgcggctgcatctaacagagccgcacgagcagcagccgctgcagcgaggacagcattttcacaagtcgtggctagccatagggtcgcgacaccacaggtgtcaggggaagacacgcagccaactacctacgccgctgaagcgcagggcccaacaccagagccacccttagcaagcccacagacaagtcagatgcttgtaacctctaagatggccgcaccagaggcaccagccactagtgctcaatcgcaaacagggagcccagcacaggaagccgctacggaaggaccatcttcagcctgtgctttttcccaagccccatgtgctcgcgaagtggacgcaaatcgacccagcacagcctttcttggccaaaacgacgtttttgactttacccagccagctggagtgtcgggcatggctttccctcgacccaagcggccagcaccggctcaggaggcggcaaccgagggtccttctgccgctagcggcgtaccacagacaggcccaggtagggaagtagccgcaaccaggcctaaaacaacaaaaagcggaaaggctttagccaagacacggtgggtcgagccccagaatgtagtggcggctgctgctgctaaagctaagatggctacatcaattcccgaacctgaaggtgccgctgctgccactgcccagcactcagcggagccgtgggcaagaatgggcggtaaaaggaccaagaaatcaaagcacctcgatgatgaatacgagtcatctgaggaggagcgagaaaccccggctgtgcccccaacatggagggcatcccaaccgtccctcaccgtccgggcacaactggcgcctcgtccccctatggcaccacgatcccagataccttctaggcacgttctgtgcctgcctcctcgcaacgtaactttgctccaggaacgagcgaacaaactcgtcaagtaccttatgattaaggactataagaagatccccattaagcgcgctgatatgctgaaagacgtgatccgcgagtacgacgagcactttcccgagattatcgagcgtgctacatataccctcgaaaagaagtttggtattcatctcaaagagatcgacaaggaagaacacctatatatcctggtgtgcacgagagactcatcagctaggctgttgggcaaaaccaaagatacgccccgactgtccctcctgctagtgattctcggagtgatttttatgaatggtaatagggcgtccgaggctgtgctgtgggaagccctcagaaagatgggcctgagacctggggttcggcaccctttcttaggcgatctacggaagttgataacagatgacttcgtgaagcaaaagtatttagaatacaagaagattcctaacagcaaccccccagagtacgaattcctctgggggcttcgagccaggcacgagacctccaaaatgagagtgttacgcttcattgcacagaaccagaacagagatcctcgggaatggaaagcgcatttcctcgaggccgttgacgacgcctttaaaacaatggatgtggatatggccgaggagcacgctcgcgctcagatgcgggcacagatgaacatcggtgatgaggccctgattggcaggtggtcttgggacgacatccaggtggagctccttacctgggatgaggatggcgactttggcgatgcctgggcacggatccccttcgccttctgggccagataccatcagtacatcctcaactccaacagggcaaaccggagagccacttggcgagccggtgtgtcaagcggcacgaatggaggtgccagcacctctgtgctcgatgggcctagcacatcctccacaatccgtacccggaacgccgcaagagcaggtgcatctttcttcagttggatccagcatcggtag

SEQ ID NO: 220326 - protein, 607 aa, Artificial Sequence
  derived and/or modified sequence
MSSGLRAADFPRWKRHISEQLRRRDRLQRQAFEEIILQYNKLLEKSDLHSVLAQKLQAEKHDVPNRHEISPGHDGTWNDNQLQEMAQLRIKHQEELTELHKKRGELAQLVIDLNNQMQRKDREMQMNEAKIAECLQTISDLETECLDLRTKLCDLERANQTLKDEYDALQITFTALEGKLRKTTEENQELVTRWMAEKAQEANRLNAENEKDSRRRQARLQKELAEAAKEPLPVEQDDDIEVIVDETSDHTEETSPVRAISRAATKRLSQPAGGLLDSITNIFGRRSVSSFPVPQDNVDTHPGSGKEVRVPATALCVFDAHDGEVNAVQFSPGSRLLATGGMDRRVKLWEVFGEKCEFKGSLSGSNAGITSIEFDSAGSYLLAASNDFASRIWTVDDYRLRHTLTGHSGKVLSAKFLLDNARIVSGSHDRTLKLWDLRSKVCIKTVFAGSSCNDIVCTEQCVMSGHFDKKIRFWDIRSESIVREMELLGKITALDLNPERTELLSCSRDDLLKVIDLRTNAIKQTFSAPGFKCGSDWTRVVFSPDGSYVAAGSAEGSLYIWSVLTGKVEKVLSKQHSSSINAVAWSPSGSHVVSVDKGCKAVLWAQY

SEQ ID NO: 220327 - DNA, 1824 bp, Artificial Sequence
  derived and/or modified sequence
atgagttctggactgcgcgccgccgactttccacgatggaaacgacacatcagtgagcagctccggaggcgtgaccggcttcagcgccaggcattcgaggagatcatcctgcagtacaataagctcctcgaaaaatcagaccttcattctgtgctggcacagaaacttcaggctgaaaagcacgacgtacctaaccgtcatgagatctctcccggccatgatgggacctggaacgacaaccagctccaggaaatggcacagctgaggatcaagcaccaggaggaactgactgagctccacaagaagcgaggggaactcgctcagctcgtgattgaccttaataatcagatgcagcggaaagaccgcgaaatgcagatgaatgaggccaaaattgccgagtgcttgcaaacaatctctgatctggaaaccgagtgtcttgacttgaggacaaaactctgcgacttggagcgcgcgaaccaaacactgaaggacgagtacgacgcactgcagatcacttttactgccctcgaggggaaactgagaaaaactaccgaagaaaaccaggaactcgtaacgaggtggatggctgaaaaggcccaggaggcaaatagacttaacgccgaaaacgagaaagactcgcgtaggcggcaggcccggcttcagaaagaactcgctgaagccgctaaagaacctttgccggtcgagcaggacgatgatatagaggtgattgtcgatgagacctcagatcacactgaagaaacatccccagtgagggccatctcaagagcggccacaaagaggctcagtcagccagccggagggctgctggacagtattaccaatatcttcggtaggcgcagtgtgtcctcctttccagtgccccaggataatgttgatacgcaccctggcagcggaaaagaagtcagagtgcccgccaccgcactgtgcgtgtttgatgcccatgacggagaggtgaacgctgtgcaattctctccagggtcacgcctcctagccacaggaggaatggaccggagggtgaagttgtgggaggtgtttggcgagaaatgcgagtttaaaggatctctaagcggtagcaacgcaggaatcactagcattgaatttgactccgcgggctcctacctcttagcggcaagtaacgacttcgcctcccgaatttggacagttgacgattatcgactgcgccacactctgacgggacactcagggaaagtgttgtctgctaaatttctgcttgacaacgcccgtatcgtctcaggatcccatgatcgtacattgaagctctgggacctgcgatcgaaggtttgtatcaagactgtctttgccggatcaagttgtaacgacattgtctgtacagagcagtgtgtgatgtcaggtcactttgataagaaaatacgtttctgggacatccggtctgaatctatcgtgcgagagatggagcttctcggcaagataacagctctggatctaaacccagaacgtacagagttgctgtcgtgttcaagagacgaccttcttaaggttattgacctgcgtaccaatgccatcaagcagaccttttccgccccaggcttcaagtgcggctccgactggacccgagttgttttctcacctgacggaagctatgtggctgcaggctccgctgaggggtccttgtatatttggtctgtccttacggggaaagttgagaaggtgctgagtaagcaacatagcagcagtatcaatgccgtcgcatggagcccctcgggttcccacgtggtgtccgtggacaaaggctgcaaggctgtcctgtgggcccagtactag

SEQ ID NO: 220328 - DNA, 1824 bp, Artificial Sequence
  derived and/or modified sequence
atgagcagcggcctgcgggctgctgacttcccccgctggaagaggcacatcagcgagcagctgcggcggcgggaccggctgcagaggcaggcctttgaggagatcatcctgcagtacaacaagctgctggagaagagtgacctgcacagcgtgctggcccagaagctgcaggccgagaagcatgatgtgcccaacagacatgagatcagccctggccatgatggcacctggaatgacaaccagctgcaggagatggcccagctgcgcatcaagcaccaggaggagctgacagagctgcacaagaagagaggagagctggcccagctggtgattgacctgaacaaccagatgcagaggaaggaccgggagatgcagatgaatgaggccaagattgctgaatgtctgcagaccatcagtgacctggagacagagtgcctggacctgcggaccaagctgtgtgacctggagcgggccaaccagaccctgaaggatgaatatgatgccctgcagatcaccttcaccgccctggagggcaagctgaggaagaccacagaggagaaccaggagctggtgacccgctggatggccgagaaggcccaggaggccaaccggctgaatgcagaaaatgagaaggacagcagaagacggcaggcccggctgcagaaggagctggccgaggccgccaaggagcccctgcctgtggagcaggatgatgacatcgaggtgattgtggatgagaccagtgaccacacagaggagaccagccctgtgcgggccatcagcagagctgccaccaagaggctgagccagcctgctgggggcctgctggacagcatcaccaacatctttggaagaagatctgtgagcagcttccctgtgccccaggacaacgtggacacccaccctggcagcggcaaggaggtgcgggtgcctgccacagccctgtgtgtgtttgatgcccatgatggagaggtgaatgctgtgcagttcagccctggcagccggctgctggccactggaggcatggaccggcgggtgaagctgtgggaggtgtttggagagaagtgtgagttcaagggcagcctgagcggcagcaatgccggcatcaccagcattgaatttgacagcgctggcagctacctgctggccgccagcaatgactttgccagccgcatctggacagtggatgactaccgcctgcggcacaccctgaccggccacagcggcaaggtgctgagcgccaagttcctgctggacaatgccagaattgtgtctggcagccatgacaggaccctgaagctgtgggacctgcggagcaaggtgtgcatcaagacagtgtttgctggcagcagctgcaatgacatcgtgtgcacagagcagtgtgtgatgagcggccactttgacaagaagatccgcttctgggacatccgctctgagagcatcgtgcgggagatggagctgctgggcaagatcacagccctggacctgaaccctgagaggacagagctgctgagctgcagcagagatgacctgctgaaggtgattgacctgcggaccaatgccatcaagcagaccttcagcgcccctggcttcaagtgtggcagtgactggaccagggtggtgttctccccagatggcagctatgtggccgccggcagcgctgagggcagcctgtacatctggagcgtgctgaccgggaaggtggagaaggtgctgagcaagcagcacagcagcagcatcaatgctgtggcctggagccccagcggcagccacgtggtgtctgtggacaagggctgcaaggctgtgctgtgggcccagtactag

SEQ ID NO: 220329 - DNA, 1824 bp, Artificial Sequence
  derived and/or modified sequence
atgagcagcggcctgcgggccgccgacttcccccggtggaagcggcacatatctgagcagttgagacggagggatagacttcagagacaggcattcgaagaaattatcctacaatataacaagttgctggagaagtctgacttacactccgtgctagcccagaagctgcaggctgaaaaacacgacgtgccaaataggcacgagatctccccagggcatgacggtacttggaatgacaaccaacttcaggaaatggcacagcttcgaatcaaacaccaggaggagctgacggagttgcataagaaacggggagagctggcacagctagtgatcgacctgaataatcagatgcaacggaaagatcgcgagatgcagatgaatgaagccaagatcgcagagtgtcttcagactattagtgacctggaaacagagtgcctcgacctaagaacaaaactctgtgacctggaaagggctaatcagaccctcaaggatgaatatgatgccttgcagatcacattcaccgccctggagggaaagttacggaagacgaccgaggagaaccaggaactggtgaccagatggatggccgaaaaggcgcaagaggcgaacagactgaacgccgagaatgaaaaagactctagacggagacaagcccggctgcaaaaggagctagccgaggccgccaaggaacctttacctgttgagcaggatgacgatatcgaggtgatagtagacgagacgtcagaccacacagaagaaaccagccccgttagggcaatctccagagccgctaccaagaggctttcccagcctgctggcgggctcctggattccattaccaacatttttgggagacgctccgtgagctctttccctgtgccccaagacaacgttgacacacaccccggcagtggtaaggaagtcagagtgcccgccacagcactctgtgtcttcgacgcccatgatggtgaagtgaacgcggtgcagttctcccccggaagtaggttgctggcaaccggcggaatggatcggcgcgttaagctatgggaggtctttggcgaaaagtgtgaatttaaagggagcctgtccggtagcaatgccgggatcacgtccattgaattcgactccgctgggtcttatctgctggccgcatccaatgattttgcttcccgcatctggaccgtggatgactacagactgcgacacaccctcaccggccactccggtaaggtcctcagtgcaaaattcttacttgataatgcacggatagtgagcgggtcacatgataggaccttgaagctgtgggatcttcgctccaaagtttgcattaagaccgtttttgctggttcttcttgcaatgatattgtgtgtactgagcagtgcgtgatgtctgggcatttcgacaaaaagattagattttgggacatcaggagcgaaagcattgtccgagagatggaactgctgggaaaaattaccgcacttgatttaaaccccgagcggacggagctgcttagctgctccagagacgatctcctgaaagttatcgacctacgcactaacgcaatcaagcagaccttcagcgcgcccggcttcaagtgtggatctgattggacacgcgtggtattttcccctgatggaagttacgttgctgcaggaagtgctgaagggtccctttacatttggtccgtgctgactggcaaggtggagaaggttttatctaaacagcactctagctccattaatgcagtcgcttggagtccctccgggtcgcacgtggtgagcgtggataagggctgtaaagctgtgctctgggcacagtactag

SEQ ID NO: 220330 - DNA, 1824 bp, Artificial Sequence
  derived and/or modified sequence
atgagcagcggcctgagggccgcagactttccccgatggaagcggcacatcagcgaacagctgcggaggcgtgacagactgcaaaggcaggcatttgaggaaattattctgcagtataataagctcctggagaagagcgacctgcacagtgttcttgctcagaagcttcaggcagagaaacacgacgtgcctaacagacacgaaatctcgcccggacacgacggaacctggaacgacaaccagcttcaggagatggctcagctgcgtataaagcatcaggaggagctgaccgagctccacaagaagaggggagaactagctcagctggtcattgatttaaacaaccagatgcagagaaaagacagagagatgcaaatgaacgaagccaaaatcgcagagtgcctccagacaatcagcgatctggagactgaatgcttggatctccgaactaagctgtgcgatttggagcgggcaaaccagactcttaaagacgagtacgacgccctgcagattactttcacggctctcgagggcaaactgcgaaaaacaactgaggaaaatcaggagcttgtgacgagatggatggccgagaaggctcaggaggcaaatagactgaacgctgagaacgagaaggacagtcgacggcgacaggcacgactgcagaaggagctcgctgaggctgccaaagaaccactgccagtggagcaagatgatgacatcgaggtcatcgtggatgagacatctgaccacactgaggagacctcacccgtcagagccattagccgtgccgcaaccaaacgcctctcacagcctgccggaggcttgctggattctatcacaaatatctttgggagacgcagcgtgagtagtttccctgtacctcaagataacgtcgacactcatccaggttccggtaaggaggtcagagtgcccgctaccgccttgtgtgtgttcgacgcacacgatggcgaagtgaatgccgtacagttttccccaggttcaagactgctcgctacagggggaatggatcggcgagttaagctctgggaggtgtttggcgagaagtgcgagtttaagggatctctgagcggttcaaatgccggtattacgagcatagaatttgactcagccggatcataccttctggcagcctcaaatgatttcgcctctagaatctggactgtggatgactaccgtctgcggcacaccttgacagggcactctggtaaggtcctgtctgcaaagttcttgctggacaacgcacgcatcgtctccggaagccacgaccggactctaaaattatgggatctccgcagcaaggtctgtataaaaacagtgtttgccggatcatcctgtaacgacatcgtgtgcacagagcagtgcgtaatgtccggacacttcgataagaagatccggttctgggacataagaagcgagtcaattgttagggaaatggaactgcttggaaagataactgcattggatctgaaccccgaacgcaccgaactgctgtcctgttcccgagacgaccttctcaaggtgattgacctgagaaccaacgcgattaagcagacttttagcgcaccgggttttaaatgtggctccgactggactagggtcgtgttctctcctgacggttcatatgttgctgccggttctgccgaaggtagtctgtatatctggagtgtcctgactgggaaggtggagaaggtcttaagcaagcagcattcttcatcaatcaatgcagtagcgtggagcccgtcaggttcacacgtggtgtccgtcgacaaaggatgtaaagcagtcttatgggctcaatactag

SEQ ID NO: 220331 - DNA, 3405 bp, Artificial Sequence
  derived and/or modified sequence
actagcgagcgccctgcgtaggcaccggctcctgagcccgtgcttcgggtgagggggcgggtcttccggccctctcgaaaatcatttccggcatgagccggaagaccgtcccggatggcctcggggactgccagtgtgtggaggtgagctccgggattgccggcattcccgcttctgctggttgcttcatgctgcaggctgcggccgtcagccctcgctcgcattggtggcgctgaggtgccggggcagcaagtgacatgtcgtcgggcctccgcgccgctgacttcccccgctggaagcgccacatctcggagcaactgaggcgccgggaccggctgcagagacaggcgttcgaggagatcatcctgcagtataacaaattgctggaaaagtcagatcttcattcagtgttggcccagaaactacaggctgaaaagcatgacgtaccaaacaggcacgagataagtcccggacatgatggcacatggaatgacaatcagctacaagaaatggcccaactgaggattaagcaccaagaggaactgactgaattacacaagaaacgtggggagttagctcaactggtgattgacctgaataaccaaatgcagcggaaggacagggagatgcagatgaatgaagcaaaaattgcagaatgtttgcagactatctctgacctggagacggagtgcctagacctgcgcactaagctttgtgaccttgaaagagccaaccagaccctgaaggatgaatatgatgccctgcagatcacttttactgccttggagggaaaactgaggaaaactacggaagagaaccaggagctggtcaccagatggatggctgagaaagcccaggaagccaatcggcttaatgcagagaatgaaaaagactccaggaggcggcaagcccggctgcagaaagagcttgcagaagcagcaaaggaacctctaccagtcgaacaggatgatgacattgaggtcattgtggatgaaacttctgatcacacagaagagacctctcctgtgcgagccatcagcagagcagccactaagcgactctcgcagcctgctggaggccttctggattctatcactaatatctttgggagacgctctgtctcttccttcccagtcccccaggacaatgtggatactcatcctggttctggtaaagaagtgagggtaccagctactgccttgtgtgtcttcgatgcacatgatggggaagtcaacgctgtgcagttcagtccaggttcccggttactggccactggaggcatggaccgcagggttaagctttgggaagtatttggagaaaaatgtgagttcaagggttccctatctggcagtaatgcaggaattacaagcattgaatttgatagtgctggatcttacctcttagcagcttcaaatgattttgcaagccgaatctggactgtggatgattatcgattacggcacacactcacgggacacagtgggaaagtgctgtctgctaagttcctgctggacaatgcgcggattgtctcaggaagtcacgaccggactctcaaactctgggatctacgcagcaaagtctgcataaagacagtgtttgcaggatccagttgcaatgatattgtctgcacagagcaatgtgtaatgagtggacattttgacaagaaaattcgtttctgggacattcgatcagagagcatagttcgagagatggagctgttgggaaagattactgccctggacttaaacccagaaaggactgagctcctgagctgctcccgtgatgacttgctaaaagttattgatctccgaacaaatgctatcaagcagacattcagtgcacctgggttcaagtgcggctctgactggaccagagttgtcttcagccctgatggcagttacgtggcggcaggctctgctgagggctctctgtatatctggagtgtgctcacagggaaagtggaaaaggttctttcaaagcagcacagctcatccatcaatgcggtggcgtggtcgccctctggctcgcacgttgtcagtgtggacaaaggatgcaaagctgtgctgtgggcacagtactgacggggctctcagggctgggaggaccccagtgccctcctcagaagaagcacatgggctcctgcagccctgtcctggcaggtgatgtgctgggtatagcatggacctcccagagaagctcaagctatgtggcactgtagctttgccgtgaatgggatttctgaagatttgactgaggtctctcttggcctggaagaataacactgaaaaaacctgacgctgcggtcacttagcagaggctcaggttcttgccttgggaaacactactagctctgaccttccatacctcacttgggggagcacagggccccgctgggcctcctcaccaacggcagtgccaaaatcagcccccacatcaaggtggtgttctctgtgctttctctcgtccttccaaagtcggttctggcctaacgcatgtcccaacaccttgggttcatttgcccggtgaactcactttaagcattggattaacggaaactcccgaactacagacccctccctggtgggttgcatgaatgtgtctcattactgctgaaatgtcctcacatctctttcactgttcttcagagctttctggctctctttcccccacaaaattcgacatatttaaaaatctccgtgtggctttaaaaaatggttttttgtttttttgtttttttgaggtgggagaggatgtgtgaaaatcttttccagggaaatgggttcgctgcagaggtaaggatgtgttcctgtatcgatctgcagacacccagaaggtgggtgcacactgcatgcttgggggtgccaagggattcgagacctccaacatacttgtctgaaggtggtgattctggccatggcccctctgccaagcctgtgtgcgatgcccttggtgctttagtgcaagaagcctaggctcagaagcacagcagcgccatctttccgtttcaggggttgtgatgaaggccaaggaaaaacatttatctttactattttacctacgtataaagttttagttcattgggtgtgcgaaacaccctttttatcacttttaaatttgcactttattttttttcttccatgcttgttctctggacatttggggatgtgagtgttagagctggtgagagaggagtcaggtggccttcccaccgatggtcctggcctccacctgccctctcttccctgcctgatcaccgctttccaatttgcccttcagagaacttaagtcaaggagagttgaaattcacaggccagggcacatcttttatttatttcattatgttggccaacagaacttgattgtaaataataataaagaaatctgttatatacttttcaaactcca

SEQ ID NO: 220332 - DNA, 1824 bp, Artificial Sequence
  derived and/or modified sequence
atgagcagcggcctgagagccgccgacttccccagatggaagagacacatcagcgagcagctgagaagaagagacagactgcagagacaggccttcgaggagatcatcctgcagtacaacaagctgctggagaagagcgacctgcacagcgtgctggcccagaagctgcaggccgagaagcacgacgtgcccaacagacacgagatcagccccggccacgacggcacctggaacgacaaccagctgcaggagatggcccagctgagaatcaagcaccaggaggagctgaccgagctgcacaagaagagaggcgagctggcccagctggtgatcgacctgaacaaccagatgcagagaaaggacagagagatgcagatgaacgaggccaagatcgccgagtgcctgcagaccatcagcgacctggagaccgagtgcctggacctgagaaccaagctgtgcgacctggagagagccaaccagaccctgaaggacgagtacgacgccctgcagatcaccttcaccgccctggagggcaagctgagaaagaccaccgaggagaaccaggagctggtgaccagatggatggccgagaaggcccaggaggccaacagactgaacgccgagaacgagaaggacagcagaagaagacaggccagactgcagaaggagctggccgaggccgccaaggagcccctgcccgtggagcaggacgacgacatcgaggtgatcgtggacgagaccagcgaccacaccgaggagaccagccccgtgagagccatcagcagagccgccaccaagagactgagccagcccgccggcggcctgctggacagcatcaccaacatcttcggcagaagaagcgtgagcagcttccccgtgccccaggacaacgtggacacccaccccggcagcggcaaggaggtgagagtgcccgccaccgccctgtgcgtgttcgacgcccacgacggcgaggtgaacgccgtgcagttcagccccggcagcagactgctggccaccggcggcatggacagaagagtgaagctgtgggaggtgttcggcgagaagtgcgagttcaagggcagcctgagcggcagcaacgccggcatcaccagcatcgagttcgacagcgccggcagctacctgctggccgccagcaacgacttcgccagcagaatctggaccgtggacgactacagactgagacacaccctgaccggccacagcggcaaggtgctgagcgccaagttcctgctggacaacgccagaatcgtgagcggcagccacgacagaaccctgaagctgtgggacctgagaagcaaggtgtgcatcaagaccgtgttcgccggcagcagctgcaacgacatcgtgtgcaccgagcagtgcgtgatgagcggccacttcgacaagaagatcagattctgggacatcagaagcgagagcatcgtgagagagatggagctgctgggcaagatcaccgccctggacctgaaccccgagagaaccgagctgctgagctgcagcagagacgacctgctgaaggtgatcgacctgagaaccaacgccatcaagcagaccttcagcgcccccggcttcaagtgcggcagcgactggaccagagtggtgttcagccccgacggcagctacgtggccgccggcagcgccgagggcagcctgtacatctggagcgtgctgaccggcaaggtggagaaggtgctgagcaagcagcacagcagcagcatcaacgccgtggcctggagccccagcggcagccacgtggtgagcgtggacaagggctgcaaggccgtgctgtgggcccagtactag

SEQ ID NO: 220333 - protein, 348 aa, Artificial Sequence
  derived and/or modified sequence
MAATLGPLGSWQQWRRCLSARDGSRMLLLLLLLGSGQGPQQVGAGQTFEYLKREHSLSKPYQGVGTGSSSLWNLMGNAMVMTQYIRLTPDMQSKQGALWNRVPCFLRDWELQVHFKIHGQGKKNLHGDGLAIWYTKDRMQPGPVFGNMDKFVGLGVFVDTYPNEEKQQERVFPYISAMVNNGSLSYDHERDGRPTELGGCTAIVRNLHYDTFLVIRYVKRHLTIMMDIDGKHEWRDCIEVPGVRLPRGYYFGTSSITGDLSDNHDVISLKLFELTVERTPEEEKLHRDVFLPSVDNMKLPEMTAPLPPLSGLALFLIVFFSLVFSVFAIVIGIILYNKWQEQSRKRFY

SEQ ID NO: 220334 - protein, 210 aa, Artificial Sequence
  derived and/or modified sequence
MQPGPVFGNMDKFVGLGVFVDTYPNEEKQQERVFPYISAMVNNGSLSYDHERDGRPTELGGCTAIVRNLHYDTFLVIRYVKRHLTIMMDIDGKHEWRDCIEVPGVRLPRGYYFGTSSITGDLSDNHDVISLKLFELTVERTPEEEKLHRDVFLPSVDNMKLPEMTAPLPPLSGLALFLIVFFSLVFSVFAIVIGIILYNKWQEQSRKRFY

SEQ ID NO: 220335 - DNA, 1047 bp, Artificial Sequence
  derived and/or modified sequence
atggccgccaccctgggccccctgggcagctggcagcagtggagaagatgcctgagcgccagagacggcagcagaatgctgctgctgctgctgctgctgggcagcggccagggcccccagcaggtgggcgccggccagaccttcgagtacctgaagagagagcacagcctgagcaagccctaccagggcgtgggcaccggcagcagcagcctgtggaacctgatgggcaacgccatggtgatgacccagtacatcagactgacccccgacatgcagagcaagcagggcgccctgtggaacagagtgccctgcttcctgagagactgggagctgcaggtgcacttcaagatccacggccagggcaagaagaacctgcacggcgacggcctggccatctggtacaccaaggacagaatgcagcccggccccgtgttcggcaacatggacaagttcgtgggcctgggcgtgttcgtggacacctaccccaacgaggagaagcagcaggagagagtgttcccctacatcagcgccatggtgaacaacggcagcctgagctacgaccacgagagagacggcagacccaccgagctgggcggctgcaccgccatcgtgagaaacctgcactacgacaccttcctggtgatcagatacgtgaagagacacctgaccatcatgatggacatcgacggcaagcacgagtggagagactgcatcgaggtgcccggcgtgagactgcccagaggctactacttcggcaccagcagcatcaccggcgacctgagcgacaaccacgacgtgatcagcctgaagctgttcgagctgaccgtggagagaacccccgaggaggagaagctgcacagagacgtgttcctgcccagcgtggacaacatgaagctgcccgagatgaccgcccccctgccccccctgagcggcctggccctgttcctgatcgtgttcttcagcctggtgttcagcgtgttcgccatcgtgatcggcatcatcctgtacaacaagtggcaggagcagagcagaaagagattctactag

SEQ ID NO: 220336 - DNA, 633 bp, Artificial Sequence
  derived and/or modified sequence
atgcagcccggccccgtgttcggcaacatggacaagttcgtgggcctgggcgtgttcgtggacacctaccccaacgaggagaagcagcaggagagagtgttcccctacatcagcgccatggtgaacaacggcagcctgagctacgaccacgagagagacggcagacccaccgagctgggcggctgcaccgccatcgtgagaaacctgcactacgacaccttcctggtgatcagatacgtgaagagacacctgaccatcatgatggacatcgacggcaagcacgagtggagagactgcatcgaggtgcccggcgtgagactgcccagaggctactacttcggcaccagcagcatcaccggcgacctgagcgacaaccacgacgtgatcagcctgaagctgttcgagctgaccgtggagagaacccccgaggaggagaagctgcacagagacgtgttcctgcccagcgtggacaacatgaagctgcccgagatgaccgcccccctgccccccctgagcggcctggccctgttcctgatcgtgttcttcagcctggtgttcagcgtgttcgccatcgtgatcggcatcatcctgtacaacaagtggcaggagcagagcagaaagagattctactag

SEQ ID NO: 220337 - DNA, 1047 bp, Artificial Sequence
  derived and/or modified sequence
atggcggccacactaggcccgctcggctcatggcagcaatggagaaggtgcctgtctgcacgggatggctcccggatgcttcttctcctgttgcttcttgggtctggacagggtccacagcaggtgggggcaggccagacttttgagtatctgaagcgcgaacactctctgtctaaaccctatcaaggcgtcggaacgggttcttccagcctttggaatctgatggggaatgccatggttatgacccagtacattagactcactcccgatatgcagtccaaacaaggcgcactttggaaccgcgttccttgttttctgagggattgggaactgcaggttcattttaaaatccacggccagggaaagaaaaacctacatggagatggcctcgcgatctggtatactaaggaccggatgcagcccggcccagtattcggtaatatggacaaatttgtggggctgggagtgtttgttgatacttatcctaacgaggaaaagcagcaggagagggttttcccttacatttcagccatggtgaataatggatctctctcctacgatcacgaacgagatgggcggcctacggaactgggaggctgtacagcaatagttcggaatctccactacgacaccttcctcgtcatcagatatgtgaagcgccaccttacaatcatgatggatatcgatggcaagcatgaatggagggattgcatcgaggtcccaggtgtcaggctgcccaggggatactacttcggcacttcgagtattaccggcgatctgtctgacaaccacgacgttataagcctcaagctgttcgaactcactgtggaaagaaccccggaggaggaaaaattgcacagagatgtattcctgccatctgtcgataacatgaagttaccggaaatgaccgccccactgcccccgctatcaggactcgcactgtttttaattgtatttttctcactggtcttcagcgtgttcgcgatcgtaatcggaatcattctgtacaacaaatggcaagaacagagccgtaaacgcttttactag

SEQ ID NO: 220338 - DNA, 633 bp, Artificial Sequence
  derived and/or modified sequence
atgcagcccgggcctgtattcggtaacatggacaaattcgtagggttaggcgtctttgtagatacctacccgaacgaagaaaaacagcaagagagggtgtttccgtatatctctgctatggtgaacaacggatccctcagctacgatcacgagagggatgggcgtcccacagagttaggcggctgcacggccattgtgagaaatttacattatgataccttcctcgtgatacgctacgtgaagaggcatctgaccattatgatggatattgacggcaagcacgagtggagggactgtatcgaggtacctggggtaaggctcccacggggctattattttgggacctcatctattaccggtgacttgtccgataaccatgatgtgatctctcttaagctgtttgaattaaccgtcgagcgaaccccagaggaggaaaaattacatcgcgatgtctttctgccgtccgttgacaacatgaagctgccagagatgaccgccccgttgccaccgctgtccggactagctcttttcctcattgtcttttttagtcttgtgttttccgtctttgcgattgttatcggaatcattctttacaataagtggcaggagcagtctagaaagcggttctattag

SEQ ID NO: 220339 - DNA, 2397 bp, Artificial Sequence
  derived and/or modified sequence
atgaagggtcgttggtgggaaagatggcggcgactctgggaccccttgggtcgtggcagcagtggcggcgatgtttgtcggctcgggatgggtccaggatgttactccttcttcttttgttggggtctgggcaggggccacagcaagtcggggcgggtcaaacgttcgagtacttgaaacgggagcactcgctgtcgaagccctaccagggtgtgggcacaggcagttcctcactgtggaatctgatgggcaatgccatggtgatgacccagtatatccgccttaccccagatatgcaaagtaaacagggtgccttgtggaaccgggtgccatgtttcctgagagactgggagttgcaggtgcacttcaaaatccatggacaaggaaagaagaatctgcatggggatggcttggcaatctggtacacaaaggatcggatgcagccagggcctgtgtttggaaacatggacaaatttgtggggctgggagtatttgtagacacctaccccaatgaggagaagcagcaagagcgggtattcccctacatctcagccatggtgaacaacggctccctcagctatgatcatgagcgggatgggcggcctacagagctgggaggctgcacagccattgtccgcaatcttcattacgacaccttcctggtgattcgctacgtcaagaggcatttgacgataatgatggatattgatggcaagcatgagtggagggactgcattgaagtgcccggagtccgcctgccccgcggctactacttcggcacctcctccatcactggggatctctcagataatcatgatgtcatttccttgaagttgtttgaactgacagtggagagaaccccagaagaggaaaagctccatcgagatgtgttcttgccctcagtggacaatatgaagctgcctgagatgacagctccactgccgcccctgagtggcctggccctcttcctcatcgtctttttctccctggtgttttctgtatttgccatagtcattggtatcatactctacaacaaatggcaggaacagagccgaaagcgcttctactgagccctcctgctgccaccacttttgtgactgtcacccatgaggtatggaaggagcaggcactggcctgagcatgcagcctggagagtgttcttgtctctagcagctggttggggactatattctgtcactggagttttgaatgcagggaccccgcattcccatggttgtgcatggggacatctaactctggtctgggaagccacccaccccagggcaatgctgctgtgatgtgcctttccctgcagtccttccatgtgggagcagaggtgtgaagagaatttacgtggttgtgatgccaaaatcacagaacagaatttcatagcccaggctgccgtgttgtttgactcagaaggcccttctacttcagttttgaatccacaaagaattaaaaactggtaacaccacaggctttctgaccatccattcgttgggttttgcatttgacccaaccctctgcctacctgaggagctttctttggaaaccaggatggaaacttcttccctgccttaccttcctttcactccattcattgtcctctctgtgtgcaacctgagctgggaaaggcatttggatgcctctctgttggggcctggggctgcagaacacacctgcgtttcactggccttcattaggtggccctagggagatggctttctgctttggatcactgttccctagcatgggtcttgggtctattggcatgtccatggccttcccaatcaagtctcttcaggccctcagtgaagtttggctaaaggttggtgtaaaaatcaagagaagcctggaagacatcatggatgccatggattagctgtgcaactgaccagctccaggtttgatcaaaccaaaagcaacatttgtcatgtggtctgaccatgtggagatgtttctggacttgctagagcctgcttagctgcatgttttgtagttacgatttttggaatcccactttgagtgctgaaagtgtaaggaagctttcttcttacaccttgggcttggatattgcccagagaagaaatttggctttttttttcttaatggacaagagacagttgctgttctcatgttccaagtctgagagcaacagaccctcatcatctgtgcctggaagagttcactgtcattgagcagcacagcctgagtgctggcctctgtcaacccttattccactgccttatttgacaaggggttacatgctgctcaccttactgccctgggattaaatcagttacaggccagagtctccttggagggcctggaactctgagtcctcctatgaacctctgtagcctaaatgaaattcttaaaatcaccgatggaaccaaa

SEQ ID NO: 220340 - DNA, 1163 bp, Artificial Sequence
  derived and/or modified sequence
atgaagggtcgttggtgggaaagatggcggcgactctgggaccccttgggtcgtggcagcagtggcggcgatgtttgtcggctcgggatgggtccaggatgttactccttcttcttttgttggggtctgggcaggggccacagcaagtcggggcgggtcaaacgttcgagtacttgaaacgggagcactcgctgtcgaagccctaccaggccatgtttcctgagagactgggagttgcaggtgcacttcaaaatccatggacaaggaaagaagaatctgcatggggatggcttggcaatctggtacacaaaggatcggatgcagccagggcctgtgtttggaaacatggacaaatttgtggggctgggagtatttgtagacacctaccccaatgaggagaagcagcaagagcgggtattcccctacatctcagccatggtgaacaacggctccctcagctatgatcatgagcgggatgggcggcctacagagctgggaggctgcacagccattgtccgcaatcttcattacgacaccttcctggtgattcgctacgtcaagaggcatttgacgataatgatggatattgatggcaagcatgagtggagggactgcattgaagtgcccggagtccgcctgccccgcggctactacttcggcacctcctccatcactggggatctctcagataatcatgatgtcatttccttgaagttgtttgaactgacagtggagagaaccccagaagaggaaaagctccatcgagatgtgttcttgccctcagtggacaatatgaagctgcctgagatgacagctccactgccgcccctgagtggcctggccctcttcctcatcgtctttttctccctggtgttttctgtatttgccatagtcattggtatcatactctacaacaaatggcaggaacagagccgaaagcgcttctactgagccctcctgctgccaccacttttgtgactgtcacccatgaggtatggaaggagcaggcactggcctgagcatgcagcctggagagtgttcttgtctctagcagctggttggggactatattctgtcactggagttttgaatgcagggaccccgcattcccatggttgtgcatggggacatctaactctggtctgggaagccacccaccccag

SEQ ID NO: 220341 - DNA, 1047 bp, Artificial Sequence
  derived and/or modified sequence
atggccgccaccctgggccccctgggctcctggcagcagtggaggcgctgcctgagcgccagagatggcagcaggatgctgctgctgctgctgctgctgggcagcggccagggcccccagcaggtgggcgccggccagacctttgagtacctgaagcgggagcacagcctgagcaagccctaccagggcgtgggcaccggcagcagcagcctgtggaacctgatgggaaatgccatggtgatgacccagtacatccggctgaccccagacatgcagagcaagcagggcgccctgtggaacagagtgccctgcttcctgcgggactgggagctgcaggtgcacttcaagatccacggccagggcaagaagaacctgcatggagatggcctggccatctggtacaccaaggacaggatgcagcccggccctgtgtttggaaacatggacaagtttgtgggcctgggcgtgtttgtggacacctacccaaatgaggagaagcagcaggagagggtcttcccctacatcagcgccatggtgaacaacggcagcctgtcctatgaccacgagagagatggccggcccacagagctgggcggctgcacagccatcgtgaggaacctgcactatgacaccttcctggtgatccgctacgtgaagaggcacctgaccatcatgatggacattgatggcaagcatgagtggagggactgcatcgaggtgcctggggtgcggctgccccggggctactacttcggcaccagcagcatcactggagacctgagtgacaaccatgatgtgatcagcctgaagctgtttgagctgactgtggagaggaccccagaggaggagaagctgcacagagatgtgttcctgcccagcgtggacaacatgaagctgcctgagatgacagcccccctgccccccctgagcggcctggccctcttcctgattgtgttcttcagcctggtgttttctgtgtttgccatcgtgattggcatcatcctgtacaacaagtggcaggagcagagcaggaagcgcttctactag

SEQ ID NO: 220342 - DNA, 633 bp, Artificial Sequence
  derived and/or modified sequence
atgcagcccggccctgtgtttggaaacatggacaagtttgtgggcctgggcgtgtttgtggacacctacccaaatgaggagaagcagcaggagagggtcttcccctacatcagcgccatggtgaacaacggcagcctgtcctatgaccacgagagagatggccggcccacagagctgggcggctgcacagccatcgtgaggaacctgcactatgacaccttcctggtgatccgctacgtgaagaggcacctgaccatcatgatggacattgatggcaagcatgagtggagggactgcatcgaggtgcctggggtgcggctgccccggggctactacttcggcaccagcagcatcactggagacctgagtgacaaccatgatgtgatcagcctgaagctgtttgagctgactgtggagaggaccccagaggaggagaagctgcacagagatgtgttcctgcccagcgtggacaacatgaagctgcctgagatgacagcccccctgccccccctgagcggcctggccctcttcctgattgtgttcttcagcctggtgttttctgtgtttgccatcgtgattggcatcatcctgtacaacaagtggcaggagcagagcaggaagcgcttctactag

SEQ ID NO: 220343 - DNA, 1047 bp, Artificial Sequence
  derived and/or modified sequence
atggccgccaccctgggccccctgggcagctggcagcagtggcggagatgtttgtccgcgcgcgacggcagcagaatgttgctgttgctgcttctgctagggtcaggacaggggccacaacaggtgggcgccggccaaaccttcgagtatctcaagagagagcactccctctcaaagccatatcaaggagttgggacaggcagcagttctctttggaatctaatgggcaacgctatggtcatgactcagtatattcggttaaccccagatatgcaaagcaagcagggtgcgctgtggaatagggtgccgtgcttcctgcgagactgggagcttcaagtgcacttcaaaattcacggacagggcaaaaaaaatctgcatggggacgggctggcaatttggtacacaaaggaccgtatgcaacccggcccagtgtttggtaacatggacaagtttgtgggactgggcgtgttcgtggacacatatccgaacgaagaaaaacagcaagaacgcgtgtttccgtacatttcggcaatggtgaacaacgggtctttatcatatgatcacgagagggacggccgacccacagagctaggggggtgcaccgccatcgtgcgcaacctccattacgatacttttctcgtgattaggtatgttaaacggcaccttacaatcatgatggacattgacggcaagcacgaatggcgcgattgtatcgaggtccctggagtccgtctgccccgaggctactatttcggcacaagcagtataacaggagatcttagcgacaatcatgatgtgatcagtcttaaactttttgagctgacagttgagagaactcctgaggaggaaaaactccaccgcgacgtttttttgcctagcgtcgacaatatgaagcttcctgagatgaccgcgccccttccgccactgtctgggctggccttattcctgatagttttctttagcctcgtgttctcggtctttgcaatcgttattgggataatcctgtataacaaatggcaggagcagtcacggaagcggttctactag

SEQ ID NO: 220344 - DNA, 633 bp, Artificial Sequence
  derived and/or modified sequence
atgcagcccggccccgtgttcggcaacatggacaagttcgtgggccttggggttttcgttgacacctatcctaatgaggagaagcagcaggagcgagttttcccttatatctctgccatggtgaataacggcagcctgtcttacgatcacgagcgggatgggcgcccaacagaattaggagggtgcactgctattgtgcggaacctgcactatgacacgtttctcgtgattcgatacgtaaagcgccatctcactatcatgatggacatcgacggcaagcatgaatggcgtgattgtatagaggtgccgggagtgcgcctgcctaggggctactactttgggacaagttctataacaggggatttgagtgataaccacgatgtgatatctctgaagctgttcgagctcacagtggaaaggacacccgaggaagagaaacttcacagagatgtgttcctgccttccgtcgataacatgaaactgcccgaaatgaccgccccgctgccacctttgtcgggacttgcattatttctgatcgtctttttcagtttggttttctccgtgtttgctatcgtaatcggcatcattctgtataataaatggcaggaacagtcccgcaaaagattctattag

SEQ ID NO: 220345 - DNA, 1047 bp, Artificial Sequence
  derived and/or modified sequence
atggcggcaacgctcggccctcttggcagctggcagcagtggagacggtgcctgagtgcgagggacggcagtcgtatgctacttcttctgttgcttctgggcagcgggcagggaccccaacaggtgggagcagggcagacttttgaatatttaaaaagggaacactcactttctaagccctatcagggggtagggaccggcagcagcagcctctggaacttaatggggaatgcaatggtgatgacgcagtacatcaggctgacaccggacatgcagagcaaacaaggcgctctttggaatagggtcccgtgtttccttagggactgggagctgcaggttcacttcaaaattcacggccaagggaaaaaaaaccttcacggcgacggccttgctatatggtacacaaaggaccgcatgcagcctgggccagtcttcgggaatatggacaaattcgttggacttggcgtgtttgtggatacataccccaacgaggaaaaacagcaggagcgcgtttttccctacatttccgctatggtgaacaacggtagtctctcttacgatcacgagagagatgggcgtcctaccgagctgggcggttgcaccgccatcgtaagaaatttgcactacgacaccttccttgtgatcagatacgttaagcgccatttgaccataatgatggacatcgacggaaagcacgagtggcgcgactgcatcgaggtccccggtgtgcgcctcccacgtgggtactactttgggacaagttctattactggtgacctgtcagacaaccacgacgtgatctctctcaaactttttgaactgacggtagaaagaacacctgaagaggagaaacttcacagagatgtgtttctgccatctgttgataatatgaagttgcctgagatgactgctccacttcccccactgagtggcttggcgctctttctgatagtttttttttctctcgtattttctgtattcgcaattgtgataggcattatcctgtataacaagtggcaggaacaatctaggaagcggttctactag

SEQ ID NO: 220346 - DNA, 633 bp, Artificial Sequence
  derived and/or modified sequence
atgcaacctggcccagtgtttggtaatatggataaatttgtaggtctgggggttttcgttgatacataccctaacgaggaaaaacagcaagagagagtttttccttacatctctgccatggtcaacaacggaagcttatcttacgaccacgagagggatggaaggcccaccgagctcggaggctgtacagcaatcgtgagaaaccttcactacgataccttcctggttatacgctacgtaaagcgccacttaacaattatgatggacattgatggtaaacatgagtggcgggactgtattgaggtgccaggagtaagacttccacgcggttattattttggcacaagtagcatcacaggggacctctccgataaccacgatgttatcagcctgaagctgtttgaactcactgtcgaacgcacacctgaggaggaaaaactccatagggatgtgtttcttcccagtgtcgacaatatgaagctacccgagatgacagccccactgcccccactgagcggtctcgctctgtttcttatcgtcttcttcagtttggttttttcagtcttcgcaattgttattggaattattctttacaataagtggcaggaacagagcagaaagaggttctattag

SEQ ID NO: 220347 - protein, 503 aa, Artificial Sequence
  derived and/or modified sequence
MEDELEPSLRPRTQIQGRILLLTICAAGIGGTFQFGYNLSIINAPTLHIQEFTNETWQARTGEPLPDHLVLLMWSLIVSLYPLGGLFGALLAGPLAITLGRKKSLLVNNIFVVSAAILFGFSRKAGSFEMIMLGRLLVGVNAGVSMNIQPMYLGESAPKELRGAVAMSSAIFTALGIVMGQVVGLRELLGGPQAWPLLLASCLVPGALQLASLPLLPESPRYLLIDCGDTEACLAALRRLRGSGDLAGELEELEEERAACQGCRARRPWELFQHRALRRQVTSLVVLGSAMELCGNDSVYAYASSVFRKAGVPEAKIQYAIIGTGSCELLTAVVSCVVIERVGRRVLLIGGYSLMTCWGSIFTVALCLQSSFPWTLYLAMACIFAFILSFGIGPAGVTGILATELFDQMARPAACMVCGALMWIMLILVGLGFPFIMEALSHFLYVPFLGVCVCGAIYTGLFLPETKGKTFQEISKELHRLNFPRRAQGPTWRSLEVIQSTEL

SEQ ID NO: 220348 - DNA, 1512 bp, Artificial Sequence
  derived and/or modified sequence
atggaggacgagctggagcccagcctgagacccagaacccagatccagggcagaatcctgctgctgaccatctgcgccgccggcatcggcggcaccttccagttcggctacaacctgagcatcatcaacgcccccaccctgcacatccaggagttcaccaacgagacctggcaggccagaaccggcgagcccctgcccgaccacctggtgctgctgatgtggagcctgatcgtgagcctgtaccccctgggcggcctgttcggcgccctgctggccggccccctggccatcaccctgggcagaaagaagagcctgctggtgaacaacatcttcgtggtgagcgccgccatcctgttcggcttcagcagaaaggccggcagcttcgagatgatcatgctgggcagactgctggtgggcgtgaacgccggcgtgagcatgaacatccagcccatgtacctgggcgagagcgcccccaaggagctgagaggcgccgtggccatgagcagcgccatcttcaccgccctgggcatcgtgatgggccaggtggtgggcctgagagagctgctgggcggcccccaggcctggcccctgctgctggccagctgcctggtgcccggcgccctgcagctggccagcctgcccctgctgcccgagagccccagatacctgctgatcgactgcggcgacaccgaggcctgcctggccgccctgagaagactgagaggcagcggcgacctggccggcgagctggaggagctggaggaggagagagccgcctgccagggctgcagagccagaagaccctgggagctgttccagcacagagccctgagaagacaggtgaccagcctggtggtgctgggcagcgccatggagctgtgcggcaacgacagcgtgtacgcctacgccagcagcgtgttcagaaaggccggcgtgcccgaggccaagatccagtacgccatcatcggcaccggcagctgcgagctgctgaccgccgtggtgagctgcgtggtgatcgagagagtgggcagaagagtgctgctgatcggcggctacagcctgatgacctgctggggcagcatcttcaccgtggccctgtgcctgcagagcagcttcccctggaccctgtacctggccatggcctgcatcttcgccttcatcctgagcttcggcatcggccccgccggcgtgaccggcatcctggccaccgagctgttcgaccagatggccagacccgccgcctgcatggtgtgcggcgccctgatgtggatcatgctgatcctggtgggcctgggcttccccttcatcatggaggccctgagccacttcctgtacgtgcccttcctgggcgtgtgcgtgtgcggcgccatctacaccggcctgttcctgcccgagaccaagggcaagaccttccaggagatcagcaaggagctgcacagactgaacttccccagaagagcccagggccccacctggagaagcctggaggtgatccagagcaccgagctgtag

SEQ ID NO: 220349 - DNA, 1512 bp, Artificial Sequence
  derived and/or modified sequence
atggaggacgagctggagccatctctgcggccaagaactcagatccaagggcggatactgctgttgaccatctgtgccgccggcatcggaggaaccttccaatttggatacaatctgtccatcatcaacgcaccgaccctgcacatccaggagtttacaaacgagacctggcaggccaggacgggggaacccctgcccgaccatctggtgctcctcatgtggtcactcatagtgagtctttatcctctgggagggctttttggggccttactagcagggccgcttgccataaccctgggtcgaaagaagtccctcttggtgaataatatttttgtcgtctccgctgcaatactgtttggcttcagtagaaaggccgggagctttgagatgattatgctcggacgcctgctggtcggggtcaatgccggagtttcaatgaatattcagccgatgtatctgggtgaaagcgccccaaaggagttgcgcggcgctgttgccatgagttccgcgattttcaccgcattgggcattgtgatgggtcaggtagtgggtctgcgagagctgctagggggcccccaggcctggccactcctgttggcaagttgtctggtacctggggctcttcaactggccagtctaccactgctccccgagtcaccaagatatcttctgatcgattgcggtgatacggaagcctgtctggcggccttaaggcgactgcggggttctggagatttggcaggagagctggaggaactggaagaagagagagccgcatgccagggttgtagagcacgtcggccgtgggagctgtttcaacacagagctctgcggcgacaggtgacatcactggttgtgctaggatcagccatggaattgtgtgggaacgactctgtctacgcatatgcctcttccgtgtttcgaaaagcgggcgtgcctgaggccaagattcagtacgcgattatcgggaccggttcatgcgagctgttgacagccgttgtgagctgcgttgtgattgaacgcgtaggacgtagagtgctgttgattggcggctattcgctaatgacttgctggggcagcatattcaccgtcgccttgtgcttacaaagctccttcccctggacattgtacctcgcaatggcctgcattttcgcctttatcctgagcttcggcattggccctgccggagtgactggcatcctagccacagagctctttgaccagatggctaggcccgccgcttgcatggtatgcggcgccctgatgtggattatgctgattctagtgggtctgggattcccctttatcatggaggcactctctcacttcctgtacgtccccttccttggcgtttgcgtgtgcggcgcaatctatacaggactgttcctgcccgaaactaagggtaagacgtttcaggagataagtaaggaattgcacaggctgaactttccaaggcgagcgcaggggccgacttggagaagcctcgaagtgatccagtctactgagctttag

SEQ ID NO: 220350 - DNA, 1512 bp, Artificial Sequence
  derived and/or modified sequence
atggaggatgagctggagcccagcctgcggcccaggacccagatccagggccgcatcctgctgctgaccatctgtgccgccggcattggaggcaccttccagtttggctacaacctgagcatcatcaatgcccccaccctgcacatccaggagttcaccaatgagacctggcaggccaggactggagagcccctgcctgaccacctggtgctgctgatgtggagcctgattgtgtccctgtaccccctgggcggcctgtttggagccctgctggccggccccctggccatcaccctgggcaggaagaagagcctgctggtgaacaacatctttgtggtgtctgctgccatcctgtttggcttcagcaggaaggccggcagctttgagatgatcatgctgggccgcctgctggtgggcgtgaatgctggggtgtccatgaacatccagcccatgtacctgggggagagcgcccccaaggagctgcggggagctgtggccatgagcagcgccatcttcaccgccctgggcatcgtgatgggccaggtggtgggcctgcgggagctgctgggcggcccccaggcctggcccctgctgctggccagctgcctggtgcctggggccctgcagctggccagcctgcccctgctgcctgagagcccccgctacctgctgattgactgtggggacacagaggcctgcctggccgccctgcggcggctgcggggcagcggggacctggccggggagctggaggagctggaggaggagcgggccgcctgccagggctgccgggcccggcggccctgggagctgttccagcaccgggccctgcggcggcaggtgaccagcctggtggtgctgggcagcgccatggagctgtgtggaaatgacagcgtgtatgcctatgccagctctgtgttcaggaaggccggcgtgcctgaggccaagatccagtatgccatcatcggcaccggcagctgtgagctgctgacagctgtggtgtcctgtgtggtgattgagcgggtgggccggcgggtgctgctgattggaggctacagcctgatgacctgctggggcagcatcttcaccgtggccctgtgcctgcagagcagcttcccctggaccctgtacctggccatggcctgcatctttgccttcatcctgagctttggcatcggccctgctggggtgacaggcatcctggccacagagctgtttgaccagatggcccggcctgctgcctgcatggtgtgtggggccctgatgtggatcatgctgatcctggtgggcctgggcttccccttcatcatggaggccctgagccacttcctgtatgtgcccttcctgggcgtgtgtgtgtgtggggccatctacacaggcctcttcctgcctgagaccaagggcaagaccttccaggagatcagcaaggagctgcaccggctgaacttcccccggcgggcccagggccccacctggaggagcctggaggtgatccagagcacagagctgtag

SEQ ID NO: 220351 - DNA, 1512 bp, Artificial Sequence
  derived and/or modified sequence
atggaggacgagctggagcccagcctgcggccccggacccagatccagggaagaatcctgctcctgactatttgtgccgccggaatcgggggcactttccagtttggatacaacttatctatcatcaatgcacctactctccacatccaggaattcacaaatgagacgtggcaggctcgcactggggagccactaccagaccacctcgtgctcctgatgtggagcctcatcgtctccttataccccctcggtggccttttcggcgccctgctggctggacctttggctatcactctgggccggaagaaatcactgctggttaacaatatatttgtggtgtctgccgctattttatttggcttttcacgaaaggctggttcatttgagatgattatgctgggaaggttactggtaggcgtcaatgccggagtaagcatgaacatccaacctatgtacttgggtgagtcagccccaaaggagctaagaggagctgttgcgatgagtagcgcaatttttactgcactcggtattgtgatgggccaggtagtgggcctgagagaattactgggaggacctcaggcttggcctctgttgctcgcatcatgcctggtacccggcgccttacagctggcctccctgcctttactcccggagtcccctaggtacttgctgatcgactgcggagacacggaagcctgtctggcagcgctgcgacgcctgcggggctctggcgaccttgcaggcgaattggaagagctggaggaggagagggcagcctgccaaggttgccgggcccgcagaccctgggaattatttcagcatcgcgcactgcgcagacaagtgactagcctcgttgttctcggaagcgcaatggaactgtgcggaaatgacagtgtgtacgcctatgctagttccgtgtttagaaaggctggcgtgccggaagcaaaaattcagtatgcgataattggtactggatcatgtgaattgctgacggcagtggtgagctgtgtagtaattgaacgcgttggcaggagggtgctgcttatcggtggatattccctgatgacgtgttgggggagtatatttactgtcgctctgtgtctgcaatcgtcctttccgtggaccctctacttagcaatggcatgcattttcgcctttatcctaagtttcggtatcgggcccgcaggcgtgaccggaatcctggccactgaactctttgatcagatggcacgtcctgccgcgtgcatggtgtgtggagcattgatgtggatcatgctaattctcgtcggacttggattccctttcattatggaggctctgtcacacttcctgtacgttcccttcttgggcgtttgcgtgtgtggagcgatatacaccgggctattcctgccagagaccaagggcaagaccttccaggagatcagcaaggaacttcataggttgaattttccacggagagcacagggcccaacatggcgcagcctggaagtcattcagtccacagagctgtag

SEQ ID NO: 220352 - DNA, 1512 bp, Artificial Sequence
  derived and/or modified sequence
atggaggacgagcttgaaccctccttgcggcctaggactcagatccagggccgaatcctgctgctgaccatatgtgcggctggaatcgggggaactttccagttcggctacaatctgagcattatcaatgcccctactctccatattcaggagtttactaatgagacgtggcaggccaggactggcgaacctctgccagaccatttggtgctgttaatgtggagtctgatcgtctcgctgtatccactcggaggcctctttggcgctctccttgccggtcccctcgcgatcacgcttggaagaaagaagagtctgctggttaacaacatttttgtggtttccgctgcaatactctttggcttctcaagaaaggctggtagcttcgagatgattatgctcggcaggctcctagtgggcgtgaacgccggagtttccatgaacattcagcccatgtacttgggtgaatccgcccctaaggagctgcggggagccgtagctatgagctccgcaattttcactgcccttggcatagtgatgggacaggtcgtgggtctacgagaattgttgggcggaccacaggcttggcctctgctgctggcaagctgcctggtgcctggagcccttcaactggccagccttccccttctgccagaatccccgagatatcttctcattgattgtggcgacacagaggcttgtcttgctgctctgagaaggctaaggggctctggtgatctcgcaggagagctagaggaactggaggaggaacgagcagcctgccagggttgccgagctagacgaccatgggagctgttccaacaccgcgcacttcgacggcaggtgacaagcctggttgtgctcggaagcgctatggaattatgtggcaacgattctgtgtacgcgtacgccagctcggtgttcagaaaggccggtgtaccagaagcaaaaattcagtacgccatcatcgggactgggtcttgcgaactgttgacagctgtcgtaagttgtgtcgtcatcgagagagtcggcagaagagtgttactgattgggggatactccctaatgacatgctggggaagcatttttacagtggcactgtgtttgcaatcaagctttccgtggaccctctacctggcgatggcctgcattttcgccttcatactatccttcgggattggcccagcaggagtcacgggaatactcgctacggagttgtttgatcagatggccaggcccgctgcctgcatggtttgcggagcactcatgtggataatgttgattctggtgggtctaggttttccatttatcatggaagctctaagccatttcctctatgtgccctttctgggcgtgtgcgtctgcggggctatctatactggcctcttcctgccagagacgaaggggaaaactttccaggaaatttctaaggagctccatcgcctgaattttcccagaagggctcaagggcctacttggagatccctggaagtgatccagtcaacggagttatag

SEQ ID NO: 220353 - DNA, 2388 bp, Artificial Sequence
  derived and/or modified sequence
cggacctgcctctcacgcaatggatcccctggcggcaacccgagaccggttctcctacccgcattccgccaagtctctcgctctgcccaggacgcacagatgagagcgctccgaagactgagatgagcttggggcttagccgagtaaggagtgagcggcttttcagcctcagtgctgcggcagaggcggatggaggatgaactggagccgtccttacggcctcggacgcagattcagggcaggatcctgctcctgaccatctgcgctgccggcattggtgggacttttcagtttggctataacctctctatcatcaatgccccgaccttgcacattcaggaattcaccaatgagacatggcaggcgcgtactggagagccactgcccgatcacctagtcctgcttatgtggtccctcatcgtgtctctgtatcccctgggaggcctctttggagcactgcttgcaggtcccttggccatcacgctgggaaggaagaagtccctcctggtgaataacatctttgtggtgtcagcagcaatcctgtttggattcagccgcaaagcaggctcctttgagatgatcatgctgggaagactgctcgtgggagtcaatgcaggtgtgagcatgaacatccagcccatgtacctgggggagagcgcccctaaggagctccgaggagctgtggccatgagctcagccatctttacggctctggggatcgtgatgggacaggtggtcggactcagggagctcctaggtggccctcaggcctggcccctgctgctggccagctgcctggtgcccggggcgctccagctcgcctccctgcctctgctccctgaaagcccgcgctacctcctcattgactgtggagacaccgaggcctgcctggcagcactacggcggctccggggctccggggacttggcaggggagctggaggagctggaggaggagcgcgctgcctgccagggctgccgtgcccggcgcccatgggagctgttccagcatcgggccctgaggagacaggtgacaagcctcgtggttctgggcagtgccatggagctctgcgggaatgactcggtgtacgcctacgcctcctccgtgttccggaaggcaggagtgccggaagcgaagatccagtacgcgatcatcgggactgggagctgcgagctgctcacggcggttgttagttgtgtggtaatcgagagggtgggtcggcgcgtgctgctcatcggtgggtacagcctgatgacctgctgggggagcatcttcactgtggccctgtgcctgcagagctccttcccctggacactctacctggccatggcctgcatctttgccttcatcctcagctttggcattggccctgccggagtgacggggatcctggccacagagctgtttgaccagatggccaggcctgctgcctgcatggtctgcggggcgctcatgtggatcatgctcatcctggtcggcctgggatttccctttatcatggaggccttgtcccacttcctctatgtccctttccttggtgtctgtgtctgtggggccatctacactggcctgttccttcctgagaccaaaggcaagaccttccaagagatctccaaggaattacacagactcaacttccccaggcgggcccagggccccacgtggaggagcctggaggttatccagtcaacagaactctagtcccaaaggggtggccagagccaaagccagctactgtcctgtcctctgcttcctgccagggccctggtcctcactccctcctgcattcctcatttaaggagtgtttattgagcaccctttgtgtgcagacatggctccaggtgcttagcaatcaatggtgagcgtggtattccaggctaaaggtaattaactgacagaaaatcagtaacaacataattacaggctggttgtggcagctcatgactgtaatcccagcactttgggaggccaaggtgggaggatcaattgaggccagagtttgaaaccagcctaggtaacatagtgagaccccctatctctacaaaaaattttaaacattagctgggcatggtggtatgtgctaacagctctagctactcaggaggctgaggcagcaggatcacttgagtccaagagttcaaggtagcagtaagctacaatcacaccactgcatgccagactgggtgacagagggagacttcatctctttaaaacataataataataattacagactcaggaaatgcagtgaaagaaaaatacaggttggccaggtgaggtggctgatgcctgtaatcccagcactttgggaggccaagatgggaagattgctttgagaccagaagtttgagaccagcctgggccacatagtaagatcctgtttctacc

SEQ ID NO: 220354 - protein, 345 aa, Artificial Sequence
  derived and/or modified sequence
MDGEDIPDFSSLKEETAYWKELSLKYKQSFQEARDELVEFQEGSRELEAELEAQLVQAEQRNRDLQADNQRLKYEVEALKEKLEHQYAQSYKQVSVLEDDLSQTRAIKEQLHKYVRELEQANDDLERAKRATIVSLEDFEQRLNQAIERNAFLESELDEKESLLVSVQRLKDEARDLRQELAVRERQQEVTRKSAPSSPTLDCEKMDSAVQASLSLPATPVGKGTENTFPSPKAIPNGFGTSPLTPSARISALNIVGDLLRKVGALESKLAACRNFAKDQASRKSYISGNVNCGVLNGNGTKFSRSGHTSFFDKGAVNGFDPAPPPPGLGSSRPSSAPGMLPLSV

SEQ ID NO: 220355 - protein, 400 aa, Artificial Sequence
  derived and/or modified sequence
MASDTQAVPDVSGRSRARRYAEWSSGLRSGRAGGGETSVERRRTCAFDTLEAFLIMDGEDIPDFSSLKEETAYWKELSLKYKQSFQEARDELVEFQEGSRELEAELEAQLVQAEQRNRDLQADNQRLKYEVEALKEKLEHQYAQSYKQVSVLEDDLSQTRAIKEQLHKYVRELEQANDDLERAKRATIVSLEDFEQRLNQAIERNAFLESELDEKESLLVSVQRLKDEARDLRQELAVRERQQEVTRKSAPSSPTLDCEKMDSAVQASLSLPATPVGKGTENTFPSPKAIPNGFGTSPLTPSARISALNIVGDLLRKVGALESKLAACRNFAKDQASRKSYISGNVNCGVLNGNGTKFSRSGHTSFFDKGAVNGFDPAPPPPGLGSSRPSSAPGMLPLSV

SEQ ID NO: 220356 - DNA, 1038 bp, Artificial Sequence
  derived and/or modified sequence
atggacggcgaggacatccccgacttcagcagcctgaaggaggagaccgcctactggaaggagctgagcctgaagtacaagcagagcttccaggaggccagagacgagctggtggagttccaggagggcagcagagagctggaggccgagctggaggcccagctggtgcaggccgagcagagaaacagagacctgcaggccgacaaccagagactgaagtacgaggtggaggccctgaaggagaagctggagcaccagtacgcccagagctacaagcaggtgagcgtgctggaggacgacctgagccagaccagagccatcaaggagcagctgcacaagtacgtgagagagctggagcaggccaacgacgacctggagagagccaagagagccaccatcgtgagcctggaggacttcgagcagagactgaaccaggccatcgagagaaacgccttcctggagagcgagctggacgagaaggagagcctgctggtgagcgtgcagagactgaaggacgaggccagagacctgagacaggagctggccgtgagagagagacagcaggaggtgaccagaaagagcgcccccagcagccccaccctggactgcgagaagatggacagcgccgtgcaggccagcctgagcctgcccgccacccccgtgggcaagggcaccgagaacaccttccccagccccaaggccatccccaacggcttcggcaccagccccctgacccccagcgccagaatcagcgccctgaacatcgtgggcgacctgctgagaaaggtgggcgccctggagagcaagctggccgcctgcagaaacttcgccaaggaccaggccagcagaaagagctacatcagcggcaacgtgaactgcggcgtgctgaacggcaacggcaccaagttcagcagaagcggccacaccagcttcttcgacaagggcgccgtgaacggcttcgaccccgccccccccccccccggcctgggcagcagcagacccagcagcgcccccggcatgctgcccctgagcgtgtag

SEQ ID NO: 220357 - DNA, 2377 bp, Artificial Sequence
  derived and/or modified sequence
gacacccaggcagtccctgacgtgtcggggaggagccgggcgcggaggtacgctgagtggagctcggggctgcgtaggggagctgagccgagcggctgggcgggcctggccgggccggcggaggggagacgtcggttgagcggcggcgaacatgcgcttttgacacattggaggctttcttgatcatggatggtgaagatataccagatttttcaagtttaaaggaggaaactgcttattggaaggaactttccttgaagtataagcaaagcttccaggaagctcgggatgagctagttgaattccaggaaggaagcagagaattagaagcagagttggaggcacaattagtacaggctgaacaaagaaatagagacttgcaggctgataaccaaagactgaaatatgaagtggaggcattaaaggagaagctagagcatcaatatgcacagagctataagcaggtctcagtgttagaagatgatttaagtcagactcgggccattaaggagcagttgcataagtatgtgagagagctggagcaggccaacgacgacctggagcgagccaaaagggcaacaatagtttcactggaagactttgaacaaaggctaaaccaggccattgaacgaaatgcatttttagaaagtgaacttgatgaaaaggaatctttgttggtctctgtacagaggttaaaggatgaagcaagagatttaaggcaagaactagcagttcgggaaagacaacaggaagtaactagaaagtcggctcctagctctccaactctagactgtgaaaagatggactccgccgtccaagcatcactttctttgccagctacccctgttggcaaaggaacggagaacacttttccttcaccgaaagctataccaaatggttttggtaccagtccactaactccctctgctaggatatcagcactaaacatcgtgggggatctcttacggaaagtaggggctttagaatccaaattagcagcttgcaggaattttgcaaaggaccaagcatcacgaaaatcctatatttcagggaatgttaactgtggggtgctgaatggcaatggcacaaagttctctcgatcagggcatacatctttcttcgacaaaggggcagtaaacggctttgaccccgctcctcctcctcctggtctgggctcctcgcgtccatcgtcagcgccgggtatgctgcctctcagtgtgtgagtgcctagcctccaggtgggggctcctgccctcctccaacaacccaggacacccacgcctcacccctcggtgcctgggcccagccccgtgcccctccgtctgcctccgcacggctggcagagggcaggctgcatgcagtggcggctactgggccctgcccagccccggaactctgcgcgatatcaatactggctattttctcttctcgccgtagtgccgttggtttcacatgattgcacttttgtgggtcgcaaggtgatacatacgtgtattacttggtcactggatgcagaagtacccattcatcacacctgccccatagcccccactctgctgtactgataggatttagttgtgttttaggacattgcaaatcttctagaagttctcccccaaatcaggtcaatgtgtgccctcctgagctcccacccaggcatctccagtgctcatgatcatgtgtcccccaactccacccctcacagtttgggcctgtttctggcaaagagtcaggaaggttactgaattagggaacattttctgcaccttctgattttacttaagcagctaccattccatggacttgcctcccagagcagcacaatgcccgtctgagccccacgtggcaggagcctctgggacggggcacacacaggcccagcctctgtgctgtctcctcctccgtgcgcctcagactcggggtgagggaggcgggcagcctctcgccagccttcccgtccttcagttcaacgacatctttggagtgtttttgttttctcttccaagggccgtcccgttgtgttaggaagggtgagtggctggttccagggtgggccggtgccagctccggggtggactgaacagcggcggctgtccctgtgcatcctttgattactctcatgctgcatttactgtttacatttgttttattgtacataggtttgtaaacattattgcctgagatatttgtatataacttgggctttgtagcttttatttattcagaacgcatacggcatgttaatgactctgatggtgtcctcctctgggcagctgtataggatcatcatgtggttacaaaaaatacttccctcaaaaaaattcttttaatgtggaaacaataaatttcacagaaaaaaaggattgacgttgcttta

SEQ ID NO: 220358 - DNA, 1203 bp, Artificial Sequence
  derived and/or modified sequence
atggccagcgacacccaggccgtgcccgacgtgagcggcagaagcagagccagaagatacgccgagtggagcagcggcctgagaagcggcagagccggcggcggcgagaccagcgtggagagaagaagaacctgcgccttcgacaccctggaggccttcctgatcatggacggcgaggacatccccgacttcagcagcctgaaggaggagaccgcctactggaaggagctgagcctgaagtacaagcagagcttccaggaggccagagacgagctggtggagttccaggagggcagcagagagctggaggccgagctggaggcccagctggtgcaggccgagcagagaaacagagacctgcaggccgacaaccagagactgaagtacgaggtggaggccctgaaggagaagctggagcaccagtacgcccagagctacaagcaggtgagcgtgctggaggacgacctgagccagaccagagccatcaaggagcagctgcacaagtacgtgagagagctggagcaggccaacgacgacctggagagagccaagagagccaccatcgtgagcctggaggacttcgagcagagactgaaccaggccatcgagagaaacgccttcctggagagcgagctggacgagaaggagagcctgctggtgagcgtgcagagactgaaggacgaggccagagacctgagacaggagctggccgtgagagagagacagcaggaggtgaccagaaagagcgcccccagcagccccaccctggactgcgagaagatggacagcgccgtgcaggccagcctgagcctgcccgccacccccgtgggcaagggcaccgagaacaccttccccagccccaaggccatccccaacggcttcggcaccagccccctgacccccagcgccagaatcagcgccctgaacatcgtgggcgacctgctgagaaaggtgggcgccctggagagcaagctggccgcctgcagaaacttcgccaaggaccaggccagcagaaagagctacatcagcggcaacgtgaactgcggcgtgctgaacggcaacggcaccaagttcagcagaagcggccacaccagcttcttcgacaagggcgccgtgaacggcttcgaccccgccccccccccccccggcctgggcagcagcagacccagcagcgcccccggcatgctgcccctgagcgtgtag

SEQ ID NO: 220359 - DNA, 1038 bp, Artificial Sequence
  derived and/or modified sequence
atggatggtgaagatatacccgatttttcgagcctgaaggaggaaacagcctattggaaagaactgtctctgaagtacaaacaatcctttcaggaggccagagacgagctcgttgaattccaggagggatctcgggaactagaagcagagctggaagcccaactagttcaggccgaacagcggaacagagacctgcaggctgataaccagagactcaaatatgaagtggaggccctgaaggagaaactggagcatcagtacgcccaatcttataagcaggtctccgtgctcgaggatgacctgtcccagaccagggctataaaggagcaactccataagtacgttcgagagctggagcaagcgaatgatgacctcgagagagccaagcgcgccacgattgtaagcctggaagactttgagcagcggctcaatcaagccatagagcgtaacgcttttctggagtccgagctggacgagaaagaatccctcctggtctccgtgcagcggttaaaggatgaagcccgtgatctgagacaggagcttgcagtccgggagcgacaacaggaggtaacccgcaaaagtgccccctcaagccccaccctggattgcgagaagatggacagcgctgtgcaggctagtcttagcttgcctgctacccccgtcggcaagggcactgagaacacatttccctctccgaaggcaatccctaatggatttggcacaagtccccttaccccctcagctaggatttccgccctgaatatcgtgggagacctcctgagaaaagttggggctcttgaatctaagctggcggcttgccgtaacttcgctaaggatcaagcgtcgcggaaatcatacatttccgggaatgttaattgtggcgttttgaatggcaatggaacaaagttctctcggagcggtcataccagcttttttgacaaaggagctgtcaatggctttgacccggcccccccgcctccaggattggggtcgtctagaccctcctctgcaccagggatgctgccactcagtgtgtag

SEQ ID NO: 220360 - DNA, 1203 bp, Artificial Sequence
  derived and/or modified sequence
atggcctccgacacccaggctgtgcctgatgtgtcaggccgatccagggcccggcgttacgccgaatggagctctggtttgcgcagcggccgagcaggcggcggagagacatcagtggagcgacgccgaacatgcgcttttgatacactggaggcatttcttatcatggatggcgaagacatccctgactttagctcactaaaagaggaaactgcctattggaaggagttgtcgctgaagtacaaacagagctttcaagaagcgcgagacgaattggtggagtttcaggaagggagccgggaactggaggcagagctggaagcgcagctcgtgcaggccgaacagcggaatcgtgatctgcaggcagataaccagcgcctgaagtacgaggtggaagctctcaaggaaaaactggagcaccagtatgctcagtcatacaaacaagtgtccgtactggaggacgatttatctcagacacgggcaattaaagagcagctccataagtatgtgagagaacttgaacaggccaacgatgatctggaacgagccaaaagagctactattgtgagtctcgaggattttgagcaacgcctgaaccaggctatagagagaaacgcttttttggagtcggaactggatgagaaggagtccctgctggtctctgtacagaggctgaaagacgaggctagggacctgcggcaggagctggcggtccgtgagagacagcaagaggttactaggaagagcgccccctcttcacccactctggactgcgaaaaaatggattctgcggttcaagcctctctgtctctccccgctacccctgttgggaagggcacagaaaacacgtttccctctccaaaggccatacccaatgggtttgggacatcaccactgaccccaagcgctcgcatctctgcgttaaatattgttggtgacttgttaaggaaggtgggcgcccttgagtccaaactggctgcttgtcggaattttgccaaggaccaggcctcacgtaaatcttatatctctggcaatgtgaactgtggcgtcctcaacggaaacggcaccaaattctctaggagcggacacacttctttctttgataagggcgccgtgaatggtttcgatcccgccccacctcccccgggactgggctcgtcccggccaagttctgcgccaggcatgcttcccctctccgtgtag

SEQ ID NO: 220361 - DNA, 1038 bp, Artificial Sequence
  derived and/or modified sequence
atggatggagaggacatcccagacttcagcagcctgaaggaggagacagcctactggaaggagctgagcctgaagtacaagcagagcttccaggaggccagagatgagctggtggagttccaggagggcagccgggagctggaggccgagctggaggcccagctggtgcaggccgagcagaggaacagagacctgcaggccgacaaccagaggctgaagtatgaggtggaggccctgaaggagaagctggagcaccagtatgcccagagctacaagcaggtgtctgtgctggaggatgacctgagccagacccgggccatcaaggagcagctgcacaagtatgtgcgggagctggagcaggccaatgatgacctggagcgggccaagagggccaccatcgtgtccctggaggactttgagcagaggctgaaccaggccattgaaagaaatgccttcctggagagcgagctggatgagaaggagagcctgctggtgtctgtgcagaggctgaaggatgaggcccgggacctgcggcaggagctggccgtgcgggagcggcagcaggaggtgaccaggaagagcgcccccagcagccccaccctggactgtgagaagatggacagcgctgtgcaggccagcctgagcctgcctgccacccctgtgggcaaaggaacagagaacaccttccccagccccaaggccatccccaatggatttggcaccagccccctgaccccatctgcccgcatcagcgccctgaacatcgtgggggacctgctgaggaaggtgggcgccctggagagcaagctggccgcctgcaggaactttgccaaggaccaggccagcaggaagagctacatctctggaaatgtgaactgtggggtgctgaatggaaatggcaccaagttcagccgcagcggccacaccagcttctttgacaagggagctgtgaatggatttgatcctgcccctcctcctcctggcctgggcagcagccggcccagcagcgcccctggcatgctgcccctgtctgtgtag

SEQ ID NO: 220362 - DNA, 1203 bp, Artificial Sequence
  derived and/or modified sequence
atggccagtgacacccaggccgtgcctgatgtgtctggccgcagccgggcccggcgctatgcagagtggagcagcggcctgcggagcggccgggccggcggcggggagacctctgtggagaggaggaggacctgtgcctttgacaccctggaggccttcctgatcatggatggagaggacatcccagacttcagcagcctgaaggaggagacagcctactggaaggagctgagcctgaagtacaagcagagcttccaggaggccagagatgagctggtggagttccaggagggcagccgggagctggaggccgagctggaggcccagctggtgcaggccgagcagaggaacagagacctgcaggccgacaaccagaggctgaagtatgaggtggaggccctgaaggagaagctggagcaccagtatgcccagagctacaagcaggtgtctgtgctggaggatgacctgagccagacccgggccatcaaggagcagctgcacaagtatgtgcgggagctggagcaggccaatgatgacctggagcgggccaagagggccaccatcgtgtccctggaggactttgagcagaggctgaaccaggccatcgagagaaatgccttcctggagagcgagctggatgagaaggagagcctgctggtgtctgtgcagaggctgaaggatgaggcccgggacctgcggcaggagctggccgtgcgggagcggcagcaggaggtgaccaggaagagcgcccccagcagccccaccctggactgtgagaagatggattctgctgtgcaggccagcctgagcctgcctgccacccctgtgggcaagggcacagagaacaccttccccagccccaaggccatccccaacggcttcggcaccagccccctgacccccagcgcccgcatcagcgccctgaacatcgtgggggacctgctgaggaaggtgggcgccctggagagcaagctggccgcctgcaggaactttgccaaggaccaggccagcaggaagagctacatctctggaaatgtgaactgtggggtgctgaatggaaatggcaccaagttcagccgcagcggccacaccagcttctttgataaaggagctgtgaatggatttgatcctgcccctcctcctcctggcctgggcagcagccggcccagcagcgcccctggcatgctgcccctgtctgtgtag

SEQ ID NO: 220363 - DNA, 1038 bp, Artificial Sequence
  derived and/or modified sequence
atggacggcgaggacatccccgacttcagcagcctgaaggaggagacagcctactggaaagagttaagcctcaaatataagcagagctttcaggaagccagggatgaactggtagagttccaggagggatccagggagctcgaagccgagctggaggcccaactggtacaggccgagcaaaggaatcgtgacttgcaagccgataatcagagactgaaatacgaggtcgaggcgctcaaagagaagttagaacatcagtatgctcagtcctacaaacaggtctctgtgctggaagatgacctttctcagacccgcgccatcaaggagcagttgcataagtacgtgcgtgagctcgagcaagcaaacgatgatctggaacgagcgaaacgggctaccattgtcagtttagaggactttgaacagcggcttaatcaggcgatcgagcggaatgcctttctggagagcgagctggacgaaaaggagtccctgcttgtctcagtccagcgattgaaggacgaggcccgagacctccgccaggagcttgcagtgagggagagacaacaagaagtaactcggaaatctgcacctagcagcccaacgctggactgtgaaaagatggattcagctgtgcaggccagcctctcactccccgccacccctgtgggaaagggaactgagaacacgttcccctcacctaaagccattcccaatggctttggaacgtctcctttgacaccgtccgcccgtatttctgctctgaatattgttggtgacctgttacgaaaagtgggtgccctcgaatccaaactggctgcctgtcgcaatttcgccaaagatcaagcctcgcggaagtcctacatctcaggtaatgttaactgtggggttctcaatggaaacggcactaagttcagccgctctgggcacacttcgtttttcgataaaggtgcagtgaacggctttgatcctgctcccccccccccagggttaggatcttctagacccagttcagcgccagggatgctgcccctcagcgtgtag

SEQ ID NO: 220364 - DNA, 1203 bp, Artificial Sequence
  derived and/or modified sequence
atggccagcgacacccaggccgtgcccgacgtgagcggccggagccgggctaggcgctacgcagaatggtcatctggccttcggtctgggcgcgcaggtggcggggagaccagtgtggagaggcggagaacttgtgctttcgacactcttgaagcctttcttattatggacggggaggatattccagacttttccagcctgaaggaggaaaccgcgtattggaaggagttaagccttaaatacaagcagtcatttcaggaggctagggacgaattggttgaatttcaggaaggctccagagagctggaagccgaactggaagcacagctggtgcaggccgaacagaggaacagggatctccaggccgataatcagagactaaagtatgaggtagaggccctgaaggagaaactggagcaccagtacgctcagtcatacaaacaggtgagcgttctggaggatgacttgagtcagacacgggctataaaagagcagttacacaaatacgtgagagagctggaacaggctaatgacgacctagaaagagccaagagggcaacgattgtgagtctggaggacttcgagcagcgcctgaaccaggccatagaaagaaatgctttcttggagagcgagttggacgagaaagagagcctcctggtgagcgtccagcgacttaaagatgaagcccgggatctgaggcaagagctcgcagtaagagaaaggcagcaggaagttacacgcaaatcagctcccagcagcccaacgttggattgcgagaaaatggacagcgcagtgcaggccagcctgtctcttcccgctacccccgtcggcaagggaacagagaacacttttccctctcccaaggctatacccaatggtttcggcacaagcccacttacaccgtctgcccgaatctcagccttgaatatcgtgggggatcttctgcggaaagtcggggcccttgaaagtaaacttgctgcctgcaggaacttcgctaaggaccaggcctcccggaaatcttacatatcagggaacgtgaattgtggcgtcttgaatggaaacggcaccaagttctccagaagtgggcacacctcattttttgacaaaggggctgtgaatggcttcgaccctgcacctccccctcccggacttggtagctccagacctagtagcgcccctggcatgctcccactgagtgtgtag

SEQ ID NO: 220365 - DNA, 2331 bp, Artificial Sequence
  derived and/or modified sequence
atggcctcggacacccaggcagtccctgacgtgtcggggaggagccgggcgcggaggtacgctgagtggagctcggggctgcgtagtggccgggccggcggaggggagacgtcggttgagcggcggcgaacatgcgcttttgacacattggaggctttcttgatcatggatggtgaagatataccagatttttcaagtttaaaggaggaaactgcttattggaaggaactttccttgaagtataagcaaagcttccaggaagctcgggatgagctagttgaattccaggaaggaagcagagaattagaagcagagttggaggcacaattagtacaggctgaacaaagaaatagagacttgcaggctgataaccaaagactgaaatatgaagtggaggcattaaaggagaagctagagcatcaatatgcacagagctataagcaggtctcagtgttagaagatgatttaagtcagactcgggccattaaggagcagttgcataagtatgtgagagagctggagcaggccaacgacgacctggagcgagccaaaagggcaacaatagtttcactggaagactttgaacaaaggctaaaccaggccattgaacgaaatgcatttttagaaagtgaacttgatgaaaaggaatctttgttggtctctgtacagaggttaaaggatgaagcaagagatttaaggcaagaactagcagttcgggaaagacaacaggaagtaactagaaagtcggctcctagctctccaactctagactgtgaaaagatggactccgccgtccaagcatcactttctttgccagctacccctgttggcaaaggaacggagaacacttttccttcaccgaaagctataccaaatggttttggtaccagtccactaactccctctgctaggatatcagcactaaacatcgtgggggatctcttacggaaagtaggggctttagaatccaaattagcagcttgcaggaattttgcaaaggaccaagcatcacgaaaatcctatatttcagggaatgttaactgtggggtgctgaatggcaatggcacaaagttctctcgatcagggcatacatctttcttcgacaaaggggcagtaaacggctttgaccccgctcctcctcctcctggtctgggctcctcgcgtccatcgtcagcgccgggtatgctgcctctcagtgtgtgagtgcctagcctccaggtgggggctcctgccctcctccaacaacccaggacacccacgcctcacccctcggtgcctgggcccagccccgtgcccctccgtctgcctccgcacggctggcagagggcaggctgcatgcagtggcggctactgggccctgcccagccccggaactctgcgcgatatcaatactggctattttctcttctcgccgtagtgccgttggtttcacatgattgcacttttgtgggtcgcaaggtgatacatacgtgtattacttggtcactggatgcagaagtacccattcatcacacctgccccatagcccccactctgctgtactgataggatttagttgtgttttaggacattgcaaatcttctagaagttctcccccaaatcaggtcaatgtgtgccctcctgagctcccacccaggcatctccagtgctcatgatcatgtgtcccccaactccacccctcacagtttgggcctgtttctggcaaagagtcaggaaggttactgaattagggaacattttctgcaccttctgattttacttaagcagctaccattccatggacttgcctcccagagcagcacaatgcccgtctgagccccacgtggcaggagcctctgggacggggcacacacaggcccagcctctgtgctgtctcctcctccgtgcgcctcagactcggggtgagggaggcgggcagcctctcgccagccttcccgtccttcagttcaacgacatctttggagtgtttttgttttctcttccaagggccgtcccgttgtgttaggaagggtgagtggctggttccagggtgggccggtgccagctccggggtggactgaacagcggcggctgtccctgtgcatcctttgattactctcatgctgcatttactgtttacatttgttttattgtacataggtttgtaaacattattgcctgagatatttgtatataacttgggctttgtagcttttatttattcagaacgcatacggcatgttaatgactctgatggtgtcctcctctgggcagctgtataggatcatcatgtggttacaaaaaatacttccctcaaaaaaattcttttaatgtggaaacaataaatttcac

SEQ ID NO: 220366 - DNA, 1038 bp, Artificial Sequence
  derived and/or modified sequence
atggacggggaagatatcccggacttcagttcactcaaggaggaaaccgcttattggaaagaactgtccctgaaatacaaacaaagtttccaagaggctagagatgagctggtcgaatttcaggaagggagccgcgaactcgaagccgaactggaggctcagttggtccaggctgagcagaggaatcgggacctacaggcggacaatcagaggctgaagtatgaggttgaggcactgaaagagaagttggaacaccagtatgcccagagttacaaacaggtaagtgtgctggaagatgatctgtctcagacccgtgccattaaggaacagctgcacaaatacgtgagagagttggaacaggccaatgacgatcttgaaagggccaagcgcgcaactattgtgtcgctagaggacttcgagcagcgcctgaatcaagctattgagagaaacgccttccttgagtcagagctcgatgagaaggagtccttgttagtttccgtgcagcggctgaaagatgaagctcgcgacttaaggcaagaactggcagtgagagaaaggcaacaggaggtcacccgcaaatctgcacctagctctcccacacttgattgtgaaaaaatggatagtgcggtgcaggcatccctgtcattacctgctacccccgtaggcaaggggactgaaaataccttcccttctcccaaagccatccccaatgggtttggcacttccccgctgacaccgagtgcgaggatttcagccttgaatatcgttggcgacctgttgagaaaagtaggcgctcttgagtctaaactcgcagcctgtagaaatttcgccaaggaccaggcaagcaggaaaagctacatttccggcaacgtgaactgcggcgtcctgaatgggaatgggaccaagttcagtaggtccggacatacaagtttttttgataaaggtgcagtgaacgggtttgatcccgctcctccaccccctgggctaggcagctcccgtcccagctccgccccagggatgcttccgctctccgtctag

SEQ ID NO: 220367 - DNA, 1203 bp, Artificial Sequence
  derived and/or modified sequence
atggcgtctgatactcaggcggttccagatgtgtcaggacggtcacgggcacgacgatatgcagaatggtcttcaggactgaggtcagggagggcgggtggaggggagacctctgttgaacgacgcagaacatgcgcttttgataccttagaggccttccttatcatggacggagaggatattcccgacttttccagcctgaaggaagaaaccgcatattggaaagagctgagcctgaagtacaagcagagctttcaggaggccagggatgaactggtagaatttcaagaagggagccgtgaactcgaggccgagctcgaagctcaactggtacaggccgaacaaagaaatagagaccttcaggccgacaaccagagactgaagtacgaggttgaggcgctcaaggagaaacttgaacaccaatacgcacagtcctataagcaggtgtccgtcctcgaggacgatttgtcccaaacccgtgcgattaaggagcagcttcacaaatacgtcagggaacttgagcaggccaatgacgatctggagcgagccaagcgggcaacaattgtgtctttggaagacttcgaacagcgtctgaaccaggccatcgaacgaaacgcctttctcgagtctgaattagatgaaaaggagtctttgttggtttcagtacagcggcttaaggacgaggcaagggacctgcggcaggagctcgccgttcgggagcgacagcaggaggtgacaaggaagtcagctcctagcagcccgacactcgactgcgagaaaatggactcggctgttcaggcctcactcagtctgccagccacaccagtgggcaaggggaccgaaaacaccttcccaagccctaaagctattccaaacggattcggtactagcccattaactccaagtgctagaatctctgcactaaatattgtcggcgatctccttagaaaagtgggcgctttggaaagcaagctggccgcatgtagaaatttcgccaaggatcaagcctctaggaaatcctacatctctgggaatgtgaattgtggcgtactaaatggtaacgggactaaattcagccgctccggtcatacctccttttttgataaaggagctgttaacggatttgaccctgcgcctcccccaccaggactaggctcatctaggccttcgagtgccccaggaatgctgcccctctccgtatag

SEQ ID NO: 220368 - protein, 432 aa, Artificial Sequence
  derived and/or modified sequence
MPARPGRLLPLLARPAALTALLLLLLGHGGGGRWGARAQEAAAAAADGPPAADGEDGQDPHSKHLYTADMFTHGIQSAAHFVMFFAPWCGHCQRLQPTWNDLGDKYNSMEDAKVYVAKVDCTAHSDVCSAQGVRGYPTLKLFKPGQEAVKYQGPRDFQTLENWMLQTLNEEPVTPEPEVEPPSAPELKQGLYELSASNFELHVAQGDHFIKFFAPWCGHCKALAPTWEQLALGLEHSETVKIGKVDCTQHYELCSGNQVRGYPTLLWFRDGKKVDQYKGKRDLESLREYVESQLQRTETGATETVTPSEAPVLAAEPEADKGTVLALTENNFDDTIAEGITFIKFYAPWCGHCKTLAPTWEELSKKEFPGLAGVKIAEVDCTAERNICSKYSVRGYPTLLLFRGGKKVSEHSGGRDLDSLHRFVLSQAKDEL

SEQ ID NO: 220369 - protein, 360 aa, Artificial Sequence
  derived and/or modified sequence
MTQSVDSNRGNRNEKRCGHCQRLQPTWNDLGDKYNSMEDAKVYVAKVDCTAHSDVCSAQGVRGYPTLKLFKPGQEAVKYQGPRDFQTLENWMLQTLNEEPVTPEPEVEPPSAPELKQGLYELSASNFELHVAQGDHFIKFFAPWCGHCKALAPTWEQLALGLEHSETVKIGKVDCTQHYELCSGNQVRGYPTLLWFRDGKKVDQYKGKRDLESLREYVESQLQRTETGATETVTPSEAPVLAAEPEADKGTVLALTENNFDDTIAEGITFIKFYAPWCGHCKTLAPTWEELSKKEFPGLAGVKIAEVDCTAERNICSKYSVRGYPTLLLFRGGKKVSEHSGGRDLDSLHRFVLSQAKDEL

SEQ ID NO: 220370 - DNA, 1299 bp, Artificial Sequence
  derived and/or modified sequence
atgcccgccagacccggcagactgctgcccctgctggccagacccgccgccctgaccgccctgctgctgctgctgctgggccacggcggcggcggcagatggggcgccagagcccaggaggccgccgccgccgccgccgacggcccccccgccgccgacggcgaggacggccaggacccccacagcaagcacctgtacaccgccgacatgttcacccacggcatccagagcgccgcccacttcgtgatgttcttcgccccctggtgcggccactgccagagactgcagcccacctggaacgacctgggcgacaagtacaacagcatggaggacgccaaggtgtacgtggccaaggtggactgcaccgcccacagcgacgtgtgcagcgcccagggcgtgagaggctaccccaccctgaagctgttcaagcccggccaggaggccgtgaagtaccagggccccagagacttccagaccctggagaactggatgctgcagaccctgaacgaggagcccgtgacccccgagcccgaggtggagccccccagcgcccccgagctgaagcagggcctgtacgagctgagcgccagcaacttcgagctgcacgtggcccagggcgaccacttcatcaagttcttcgccccctggtgcggccactgcaaggccctggcccccacctgggagcagctggccctgggcctggagcacagcgagaccgtgaagatcggcaaggtggactgcacccagcactacgagctgtgcagcggcaaccaggtgagaggctaccccaccctgctgtggttcagagacggcaagaaggtggaccagtacaagggcaagagagacctggagagcctgagagagtacgtggagagccagctgcagagaaccgagaccggcgccaccgagaccgtgacccccagcgaggcccccgtgctggccgccgagcccgaggccgacaagggcaccgtgctggccctgaccgagaacaacttcgacgacaccatcgccgagggcatcaccttcatcaagttctacgccccctggtgcggccactgcaagaccctggcccccacctgggaggagctgagcaagaaggagttccccggcctggccggcgtgaagatcgccgaggtggactgcaccgccgagagaaacatctgcagcaagtacagcgtgagaggctaccccaccctgctgctgttcagaggcggcaagaaggtgagcgagcacagcggcggcagagacctggacagcctgcacagattcgtgctgagccaggccaaggacgagctgtag

SEQ ID NO: 220371 - DNA, 1083 bp, Artificial Sequence
  derived and/or modified sequence
atgacccagagcgtggacagcaacagaggcaacagaaacgagaagagatgcggccactgccagagactgcagcccacctggaacgacctgggcgacaagtacaacagcatggaggacgccaaggtgtacgtggccaaggtggactgcaccgcccacagcgacgtgtgcagcgcccagggcgtgagaggctaccccaccctgaagctgttcaagcccggccaggaggccgtgaagtaccagggccccagagacttccagaccctggagaactggatgctgcagaccctgaacgaggagcccgtgacccccgagcccgaggtggagccccccagcgcccccgagctgaagcagggcctgtacgagctgagcgccagcaacttcgagctgcacgtggcccagggcgaccacttcatcaagttcttcgccccctggtgcggccactgcaaggccctggcccccacctgggagcagctggccctgggcctggagcacagcgagaccgtgaagatcggcaaggtggactgcacccagcactacgagctgtgcagcggcaaccaggtgagaggctaccccaccctgctgtggttcagagacggcaagaaggtggaccagtacaagggcaagagagacctggagagcctgagagagtacgtggagagccagctgcagagaaccgagaccggcgccaccgagaccgtgacccccagcgaggcccccgtgctggccgccgagcccgaggccgacaagggcaccgtgctggccctgaccgagaacaacttcgacgacaccatcgccgagggcatcaccttcatcaagttctacgccccctggtgcggccactgcaagaccctggcccccacctgggaggagctgagcaagaaggagttccccggcctggccggcgtgaagatcgccgaggtggactgcaccgccgagagaaacatctgcagcaagtacagcgtgagaggctaccccaccctgctgctgttcagaggcggcaagaaggtgagcgagcacagcggcggcagagacctggacagcctgcacagattcgtgctgagccaggccaaggacgagctgtag

SEQ ID NO: 220372 - DNA, 1299 bp, Artificial Sequence
  derived and/or modified sequence
atgcctgccagacccgggaggctgttgccactgcttgccagaccagctgccctcaccgccttgctgttgctgttgttaggtcatggtggtggcgggaggtggggagcacgggcccaggaagcggctgcagctgccgcagatgggcctcctgctgctgatggggaggacggtcaagatccacactcgaaacacctctatactgccgacatgttcacacacggaatccagagcgcagcccactttgtgatgttcttcgctccttggtgcggacactgccagaggttacagcccacttggaacgacttgggcgacaaatataattcgatggaggatgcaaaggtctatgtggctaaagtggactgtactgctcactctgatgtgtgttcagcacagggggtacgcggctatcccacactaaagctcttcaaacccggccaggaggcggtcaagtatcaaggccccagggactttcagaccctggagaactggatgctccagacgttaaatgaggagccagtaacaccagagccagaggttgagcccccttcggcgcctgaactcaagcagggactatatgagttatccgctagcaatttcgagctgcacgtcgcccagggcgatcacttcattaaattctttgcaccatggtgtgggcactgcaaggctctggctcctacgtgggaacagcttgcactgggcctcgagcattccgagaccgtcaagatcggaaaggtggactgtacccagcactacgaactgtgcagcggtaatcaggtcagaggctaccccacactcctctggtttcgagacggaaagaaagttgatcagtataaagggaaacgagacctggaatcactccgcgagtacgtcgaatctcagctgcagagaacagagaccggggcgactgagactgtgacccctagcgaggcacccgtgctggccgcagaacctgaagccgataagggtacggtgctggccctcactgagaacaattttgatgataccattgcagagggaatcacgttcattaagttttatgccccgtggtgcggccattgcaagacactggccccaacatgggaagagctcagcaagaaagagttccccggactcgccggcgttaagatcgctgaggtggactgcactgctgagcggaacatctgttccaaatatagcgtgagagggtatcccacccttctgctgttccggggaggcaagaaggtgagcgagcactccgggggccgagatctcgattctttacatcggtttgttctaagtcaggcaaaagatgagctctag

SEQ ID NO: 220373 - DNA, 1083 bp, Artificial Sequence
  derived and/or modified sequence
atgactcagagcgtggacagtaatcggggcaataggaatgagaagagatgcgggcattgtcaacgactgcagccaacctggaacgacctgggggataagtacaactccatggaggacgccaaagtgtatgtcgccaaggtggattgtaccgcacacagtgatgtgtgtagcgcccagggcgtgcgcggctaccccactctgaagctatttaagcctggtcaggaggctgtgaaatatcagggaccccgcgatttccagactttggagaactggatgcttcagactcttaacgaggaacctgtgacccctgagcccgaagtcgaacccccaagtgcccccgaattgaagcaaggactttacgagcttagcgctagtaatttcgagctacacgttgcgcagggggaccacttcatcaagttctttgctccttggtgtggccactgtaaagccctggccccaacgtgggagcagctcgccctgggactggaacattccgaaacagtgaagattgggaaagttgactgcacccaacattatgagttgtgttcaggaaatcaggttagaggctaccccacactcctgtggtttcgagacggcaagaaggtggatcagtacaagggaaagcgggacctggaatcgctgcgcgagtatgtggagtcccaactgcagcgaacggaaacaggggcaaccgagactgtgactccctctgaagcgccagtgctggccgcagaaccagaggcagataagggaactgtactcgctttgactgagaataactttgacgatacgattgctgaagggattacctttattaagttctacgccccctggtgtgggcattgtaaaaccctggccccaacgtgggaggaactcagcaagaaggagtttcccggacttgccggggtgaaaattgcagaagtggattgcaccgcggaaagaaatatttgtagtaagtactcagtgcgcggatacccaacactgctgctcttcaggggcggaaagaaggtctcagagcacagcggcgggagagatcttgacagtctgcatcgattcgtgctgagtcaggcaaaagatgagttgtag

SEQ ID NO: 220374 - DNA, 1299 bp, Artificial Sequence
  derived and/or modified sequence
atgcctgcccggcccggccgcctgctgcccctgctggcccggcctgctgccctgacagccctgctgctgctgctgctgggccacggcggcggcggccgctggggcgcccgggcccaggaggccgctgctgctgctgctgatggccccccagctgctgatggagaagatggccaggacccccacagcaagcacctgtacacagctgacatgttcacccacggcatccagagcgctgcccactttgtgatgttctttgccccctggtgtggccactgccagaggctgcagcccacctggaatgacctgggggacaagtacaacagcatggaggatgccaaggtgtatgtggccaaggtggactgcacagcccacagtgatgtgtgcagcgcccagggcgtgcggggctaccccaccctgaagctgttcaagccaggccaggaggccgtgaagtaccagggcccccgggacttccagaccctggagaactggatgctgcagaccctgaatgaggagcctgtgaccccagagcctgaggtggagcccccatctgcccctgagctgaagcagggcctgtatgagctgagcgccagcaactttgagctgcacgtggcccagggcgaccacttcatcaagttctttgccccctggtgtggccactgcaaggccctggcccccacctgggagcagctggccctgggcctggagcacagcgagaccgtgaagattggcaaggtggactgcacccagcactatgagctgtgcagcggcaaccaggtgcggggctaccccaccctgctgtggttcagagatggcaagaaggtggaccagtacaagggcaagagggacctggagagcctgcgggagtatgtggagagccagctgcagaggacagaaacaggagccacagagaccgtgacccccagcgaggcccctgtgctggccgctgagcctgaggccgacaagggcaccgtgctggccctgacagagaacaactttgatgacaccatcgccgagggcatcaccttcatcaagttctacgccccctggtgtggccactgcaagaccctggcccccacctgggaggagctgagcaagaaggagttccctggcctggccggcgtgaagattgctgaggtggactgcacagctgagaggaacatctgcagcaagtacagcgtgcggggctaccccaccctgctgctcttccggggcggcaagaaggtgtctgagcacagcggcggccgggacctggacagcctgcacagatttgtgctgagccaggccaaggatgagctgtag

SEQ ID NO: 220375 - DNA, 1083 bp, Artificial Sequence
  derived and/or modified sequence
atgacccagagcgtggacagcaacagaggcaacagaaatgagaagagatgtggccactgccagaggctgcagcccacctggaatgacctgggggacaagtacaacagcatggaggatgccaaggtgtatgtggccaaggtggactgcacagcccacagtgatgtgtgcagcgcccagggcgtgcggggctaccccaccctgaagctgttcaagccaggccaggaggccgtgaagtaccagggcccccgggacttccagaccctggagaactggatgctgcagaccctgaatgaggagcctgtgaccccagagcctgaggtggagcccccatctgcccctgagctgaagcagggcctgtatgagctgagcgccagcaactttgagctgcacgtggcccagggcgaccacttcatcaagttctttgccccctggtgtggccactgcaaggccctggcccccacctgggagcagctggccctgggcctggagcacagcgagaccgtgaagattggcaaggtggactgcacccagcactatgagctgtgcagcggcaaccaggtgcggggctaccccaccctgctgtggttcagagatggcaagaaggtggaccagtacaagggcaagagggacctggagagcctgcgggagtatgtggagagccagctgcagaggacagaaacaggagccacagagaccgtgacccccagcgaggcccctgtgctggccgctgagcctgaggccgacaagggcaccgtgctggccctgacagagaacaactttgatgacaccatcgccgagggcatcaccttcatcaagttctacgccccctggtgtggccactgcaagaccctggcccccacctgggaggagctgagcaagaaggagttccctggcctggccggcgtgaagattgctgaggtggactgcacagctgagaggaacatctgcagcaagtacagcgtgcggggctaccccaccctgctgctcttccggggcggcaagaaggtgtctgagcacagcggcggccgggacctggacagcctgcacagatttgtgctgagccaggccaaggatgagctgtag

SEQ ID NO: 220376 - DNA, 1299 bp, Artificial Sequence
  derived and/or modified sequence
atgcccgcccggcccggccggctgctgcccctgctggcccggcccgctgcgctgaccgcactcctcctgctactgcttggtcacgggggcggaggacgatggggagcccgcgcacaagaagccgccgcggcagctgctgatggcccccctgctgccgatggcgaagacggtcaggatccacactccaaacatttgtacacagctgacatgtttacccacggaattcagtcggcagcgcactttgtgatgtttttcgccccctggtgtggccattgccaaaggctgcagcctacctggaacgacctcggcgacaagtataattccatggaggatgcaaaggtgtacgtggccaaggtggattgtacagcacactcagatgtgtgctctgcacagggtgtgcgggggtaccccacccttaaactatttaaacccgggcaagaggccgtgaaataccaggggccaagagactttcagactctggagaattggatgcttcaaaccctgaacgaggaacctgtgacccccgagccagaggtggagccccctagcgctccggagctgaaacaaggtctgtacgagctcagcgcatcaaatttcgaacttcatgtggcacagggtgatcacttcatcaaattcttcgccccgtggtgcgggcactgcaaggccctggccccaacatgggagcagctggcattgggactggagcacagcgaaacggtgaaaatcggaaaggtagattgcacacagcattacgaactgtgttccgggaaccaagtcaggggctatcccaccttgctttggtttcgggacgggaaaaaggtagaccaatataagggcaaacgggacttggaaagcttgcgagagtacgtagagtcccagttgcaacggactgagacaggcgcgacagagactgtcacaccgagtgaagctcccgtccttgctgctgagcccgaagcggacaaaggaactgtgctggctttgaccgaaaataactttgacgacactattgccgaaggaattacttttataaagttctacgccccttggtgtggtcattgtaaaactttggcgcccacctgggaggagctttctaagaaggaattccccggcctcgccggggtgaaaattgcagaggtggattgtaccgcggaacgcaatatctgttccaagtactccgtgaggggataccccaccttgctcctgttcagaggtgggaaaaaagtgtccgagcattctgggggcagggacctggactccctgcaccgatttgttctttcgcaggctaaagatgagctctag

SEQ ID NO: 220377 - DNA, 1083 bp, Artificial Sequence
  derived and/or modified sequence
atgacccagagcgtggacagcaaccggggcaaccggaacgagaagaggtgtggacactgccagcgcctgcaaccgacctggaatgacctgggcgataaatataactctatggaagacgccaaggtctatgtcgccaaagtggactgcactgcacacagcgatgtgtgcagtgctcagggagtgaggggatatcctaccctgaaattgtttaaaccaggccaagaagccgttaagtatcagggacccagagattttcagaccctcgagaattggatgcttcaaactctgaatgaggagcccgtcaccccagagcctgaagtagaaccaccttccgcccccgaactaaaacagggactttacgaactcagcgccagtaacttcgagctgcacgtcgcccagggcgaccatttcattaagttttttgctccctggtgcggtcactgcaaagctcttgctcctacatgggagcagcttgccctgggattggagcacagcgagacggtgaaaattggaaaagtggactgtactcagcactatgagctttgttccggaaatcaagtcagaggctatcccaccctgctctggtttcgggacggaaaaaaagtggatcagtacaagggaaagcgggatctggagtcactgagggagtatgttgaaagtcagctgcagcgtacagaaactggcgcgactgagacagtgacgccatccgaggctcctgtcttggccgcggagcctgaagctgacaaaggcacggtgcttgccctgactgagaataactttgacgacacaatagcagaggggataacatttattaaattttacgccccctggtgcggccactgtaaaaccctcgcccccacctgggaagagctgtctaagaaagagtttccaggtttggccggagtgaagatcgcggaggtcgattgcactgccgaacgcaacatctgctctaagtatagcgtgcgggggtatcccaccctgctgctgtttcgcggaggcaaaaaggtcagcgaacactctggtgggcgcgatctggactccctgcacaggtttgtgttgtcccaagcaaaagacgagctgtag

SEQ ID NO: 220378 - DNA, 1299 bp, Artificial Sequence
  derived and/or modified sequence
atgccagctcgccctggcagactgctccccctgcttgctagacccgcagctctgaccgcacttctactgcttctgcttgggcacggcggtgggggaagatggggagctcgcgctcaagaggccgcagctgccgctgcagatggccctccagcagccgacggggaagatggacaagatccccactccaagcacttatacactgccgacatgtttactcacggaattcaatccgcagcacacttcgtgatgttcttcgctccttggtgtgggcactgtcagcggctccaacctacctggaatgaccttggagataaatacaattctatggaagatgcaaaggtatatgtggctaaggtcgactgtaccgcccattcggatgtctgcagcgcccaaggggtgcggggataccccacactgaaactcttcaaacccggacaggaagctgtcaagtaccagggccctcgggactttcagaccttggaaaactggatgctgcagacattaaatgaagagccggtgactcctgagcctgaagttgagcctccatccgcccctgagttgaagcaggggctgtacgaactgtctgcgagtaatttcgaattgcacgtggctcagggcgatcatttcattaagttttttgccccttggtgcggccattgcaaggccctagcaccaacctgggaacagttggccctaggcctggaacactctgagactgttaagatcggaaaggtggactgtacgcagcattatgaattgtgtagcggcaaccaagtcagaggctatccgaccctgctctggttcagagacgggaaaaaggttgatcagtacaaaggaaaaagggacttggagtcactgcgcgagtatgtggaatctcagcttcagcgcacagaaaccggagctacggaaacagttactccaagcgaagcacctgtgcttgccgcagagcccgaggccgacaagggcaccgtcctcgccctcactgagaacaacttcgacgacaccatagccgagggcatcacctttatcaaattctatgctccttggtgcggtcattgcaaaactttggccccaacgtgggaggaattgagtaagaaggaatttcctggccttgctggggtcaagattgctgaggttgattgcaccgccgaacggaatatctgctctaagtacagcgttcggggttatcctacacttctgttatttcggggtggcaaaaaagtcagtgaacatagtggaggtagggatctggatagcctgcaccgattcgtcttgtcccaagccaaggacgaactgtag

SEQ ID NO: 220379 - DNA, 1083 bp, Artificial Sequence
  derived and/or modified sequence
atgacccagagtgttgacagcaacaggggaaacagaaacgagaagagatgtggccattgtcaaaggctgcagccaacttggaacgacctgggcgacaagtacaatagtatggaagacgccaaagtttacgtggcgaaagtcgactgcacggctcattccgacgtgtgtagtgcgcagggcgtgcgtggctatcctaccttgaaactgtttaaaccagggcaggaggccgtgaaataccagggacctagggacttccaaacgctcgaaaactggatgttgcaaacattgaatgaagaacccgtgacccccgagcccgaagtcgaaccaccgtctgccccagaactcaagcaagggttgtacgagttaagcgctagtaacttcgaacttcacgtggcacagggggaccacttcataaagttttttgcaccatggtgcgggcactgcaaagcactcgctcccacgtgggagcagctagcactcggacttgagcacagtgagaccgtgaagatcggcaaggtggattgcactcaacactacgagctttgctccggaaatcaggttaggggctatccgacactgctctggtttagagatgggaaaaaggttgaccagtacaaaggtaaacgggaccttgaatcgctgagagagtatgtggagtcgcagcttcagaggaccgagacaggggctaccgagacggtgaccccatctgaggccccagtgcttgctgccgaaccagaagccgacaaggggacagtactggccctgactgaaaacaattttgatgatacgatcgctgaaggcatcacgttcatcaagttttatgcgccttggtgtggtcactgcaaaactctggctccaacttgggaagagctgagcaaaaaggaatttcccggattagccggagtcaaaatcgccgaagtggattgtactgccgagcggaacatctgctcaaagtactcagtcagaggataccctaccctgctgctctttcgcggaggcaaaaaggtgtccgagcacagtggtggaagggatctggattccctgcatcgctttgtacttagccaagccaaggacgagctgtag

SEQ ID NO: 220380 - DNA, 2964 bp, Artificial Sequence
  derived and/or modified sequence
ccggaggccgcggcgagagcgcgcccagccccgccgcgatgcccgcgcgcccaggacgcctcctcccgctgctggcccggccggcggccctgactgcgctgctgctgctgctgctgggccatggcggcggcgggcgctggggcgcccgggcccaggaggcggcggcggcggcggcggacgggccccccgcggcagacggcgaggacggacaggacccgcacagcaagcacctgtacacggccgacatgttcacgcacgggatccagagcgccgcgcacttcgtcatgttcttcgcgccctggtgtggacactgccagcggctgcagccgacttggaatgacctgggagacaaatacaacagcatggaagatgccaaagtctatgtggctaaagtggactgcacggcccactccgacgtgtgctccgcccagggggtgcgaggataccccaccttaaagcttttcaagccaggccaagaagctgtgaagtaccagggtcctcgggacttccagacactggaaaactggatgctgcagacactgaacgaggagccagtgacaccagagccggaagtggaaccgcccagtgcccccgagctcaagcaagggctgtatgagctctcagcaagcaactttgagctgcacgttgcacaaggcgaccactttatcaagttcttcgctccgtggtgtggtcactgcaaagccctggctccaacctgggagcagctggctctgggccttgaacattccgaaactgtcaagattggcaaggttgattgtacacagcactatgaactctgctccggaaaccaggttcgtggctatcccactcttctctggttccgagatgggaaaaaggtggatcagtacaagggaaagcgggatttggagtcactgagggagtacgtggagtcgcagctgcagcgcacagagactggagcgacggagaccgtcacgccctcagaggccccggtgctggcagctgagcccgaggctgacaagggcactgtgttggcactcactgaaaataacttcgatgacaccattgcagaaggaataaccttcatcaagttttatgctccatggtgtggtcattgtaagactctggctcctacttgggaggaactctctaaaaaggaattccctggtctggcgggggtcaagatcgccgaagtagactgcactgctgaacggaatatctgcagcaagtattcggtacgaggctaccccacgttattgcttttccgaggagggaagaaagtcagtgagcacagtggaggcagagaccttgactcgttacaccgctttgtcctgagccaagcgaaagacgaactttaggaacacagttggaggtcacctctcctgcccagctcccgcaccctgcgtttaggagttcagtcccacagaggccactgggttcccagtggtggctgttcagaaagcagaacatactaagcgtgaggtatcttctttgtgtgtgtgttttccaagccaacacactctacagattctttattaagttaagtttctctaagtaaatgtgtaactcatggtcactgtgtaaacattttcagtggcgatatatcccctttgaccttctcttgatgaaatttacatggtttcctttgagactaaaatagcgttgagggaaatgaaattgctggactatttgtggctcctgagttgagtgattttggtgaaagaaagcacatccaaagcatagtttacctgcccacgagttctggaaaggtggccttgtggcagtattgacgttcctctgatcttaaggtcacagttgactcaatactgtgttggtccgtagcatggagcagattgaaatgcaaaaacccacacctctggaagataccttcacggccgctgctggagcttctgttgctgtgaatacttctctcagtgtgagaggttagccgtgatgaaagcagcgttacttctgaccgtgcctgagtaagagaatgctgatgccataactttatgtgtcgatacttgtcaaatcagttactgttcaggggatccttctgtttctcacggggtgaaacatgtctttagttcctcatgttaacacgaagccagagcccacatgaactgttggatgtcttccttagaaagggtaggcatggaaaattccacgaggctcattctcagtatctcattaactcattgaaagattccagttgtatttgtcacctggggtgacaagaccagacaggctttcccaggcctgggtatccagggaggctctgcagccctgctgaagggccctaactagagttctagagtttctgattctgtttctcagtagtccttttagaggcttgctatacttggtctgcttcaaggaggtcgaccttctaatgtatgaagaatgggatgcatttgatctcaagaccaaagacagatgtcagtgggctgctctggccctggtgtgcacggctgtggcagctgttgatgccagtgtcctctaactcatgctgtccttgtgattaaacacctctatctcccttgggaataagcacatacaggcttaagctctaagatagataggtgtttgtccttttaccatcgagctacttcccataataaccactttgcatccaacactcttcacccacctcccatacgcaaggggatgtggatacttggcccaaagtaactggtggtaggaatcttagaaacaagaccacttatactgtctgtctgaggcagaagataacagcagcatctcgaccagcctctgccttaaaggaaatctttattaatcacgtatggttcacagataattctttttttaaaaaaacccaacctcctagagaagcacaactgtcaagagtcttgtacacacaacttcagctttgcatcacgagtcttgtattccaagaaaatcaaagtggtacaatttgtttgtttacactatgatactttctaaataaactctttttttttaaaa

SEQ ID NO: 220381 - DNA, 1301 bp, Artificial Sequence
  derived and/or modified sequence
aattcaaccgcctcttgcacctcggcaccgagggaggggaaggtggggtcgtcgccctttcgggcagccgggagtccaaatgtcaccccgcggtccctgcccagcgccccaaacttcctgtgccggccggacgcgcggcctgcccgtgggccacgtgcactcaccagagcggccttgctgctgccgcggccaccggggtcggctgggacagactgcgggcacgtccccttccagaggctttaactgaaaaatagaacccaggaaggtgtggacactgccagcggctgcagccgacttggaatgacctgggagacaaatacaacagcatggaagatgccaaagtctatgtggctaaagtggactgcacggcccactccgacgtgtgctccgcccagggggtgcgaggataccccaccttaaagcttttcaagccaggccaagaagctgtgaagtaccagggtcctcgggacttccagacactggaaaactggatgctgcagacactgaacgaggagccagtgacaccagagccggaagtggaaccgcccagtgcccccgagctcaagcaagggctgtatgagctctcagcaagcaactttgagctgcacgttgcacaaggcgaccactttatcaagttcttcgctccgtggtgtggtcactgcaaagccctggctccaacctgggagcagctggctctgggccttgaacattccgaaactgtcaagattggcaaggttgattgtacacagcactatgaactctgctccggaaaccaggttcgtggctatcccactcttctctggttccgagatgggaaaaaggtggatcagtacaagggaaagcgggatttggagtcactgagggagtacgtggagtcgcagctgcagcgcacagagactggagcgacggagaccgtcacgccctcagaggccccggtgctggcagctgagcccgaggctgacaagggcactgtgttggcactcactgaaaataacttcgatgacaccattgcagaaggaataaccttcatcaagttttatgctccatggtgtggtcattgtaagactctggctcctacttgggaggaactctctaaaaaggaattccctggtctggcgggggtcaagatcgccgaagtagactgcactgctgaacggaatatctgcagcaagtattcggtacgaggctaccccacgttattgcttttccgaggagggaagaaagtcagtgagcacagtggaggcagagaccttgactcgttacaccgctttgtcctgagccaagcgaaagacgaactttag

SEQ ID NO: 220382 - DNA, 2977 bp, Artificial Sequence
  derived and/or modified sequence
atgactcagtctgtagactccaacagagggaacaggaacgaaaaaaggtgtggacactgccagcggctgcagccgacttggaatgacctgggagacaaatacaacagcatggaagatgccaaagtctatgtggctaaagtggactgcacggcccactccgacgtgtgctccgcccagggggtgcgaggataccccaccttaaagcttttcaagccaggccaagaagctgtgaagtaccagggtcctcgggacttccagacactggaaaactggatgctgcagacactgaacgaggagccagtgacaccagagccggaagtggaaccgcccagtgcccccgagctcaagcaagggctgtatgagctctcagcaagcaactttgagctgcacgttgcacaaggcgaccactttatcaagttcttcgctccgtggtgtggtcactgcaaagccctggctccaacctgggagcagctggctctgggccttgaacattccgaaactgtcaagattggcaaggttgattgtacacagcactatgaactctgctccggaaaccaggttcgtggctatcccactcttctctggttccgagatgggaaaaaggtggatcagtacaagggaaagcgggatttggagtcactgagggagtacgtggagtcgcagctgcagcgcacagagactggagcgacggagaccgtcacgccctcagaggccccggtgctggcagctgagcccgaggctgacaagggcactgtgttggcactcactgaaaataacttcgatgacaccattgcagaaggaataaccttcatcaagttttatgctccatggtgtggtcattgtaagactctggctcctacttgggaggaactctctaaaaaggaattccctggtctggcgggggtcaagatcgccgaagtagactgcactgctgaacggaatatctgcagcaagtattcggtacgaggctaccccacgttattgcttttccgaggagggaagaaagtcagtgagcacagtggaggcagagaccttgactcgttacaccgctttgtcctgagccaagcgaaagacgaactttaggaacacagttggaggtcacctctcctgcccagctcccgcaccctgcgtttaggagttcagtcccacagaggccactgggttcccagtggtggctgttcagaaagcagaacatactaagcgtgaggtatcttctttgtgtgtgtgttttccaagccaacacactctacagattctttattaagttaagtttctctaagtaaatgtgtaactcatggtcactgtgtaaacattttcagtggcgatatatcccctttgaccttctcttgatgaaatttacatggtttcctttgagactaaaatagcgttgagggaaatgaaattgctggactatttgtggctcctgagttgagtgattttggtgaaagaaagcacatccaaagcatagtttacctgcccacgagttctggaaaggtggccttgtggcagtattgacgttcctctgatcttaaggtcacagttgactcaatactgtgttggtccgtagcatggagcagattgaaatgcaaaaacccacacctctggaagataccttcacggccgctgctggagcttctgttgctgtgaatacttctctcagtgtgagaggttagccgtgatgaaagcagcgttacttctgaccgtgcctgagtaagagaatgctgatgccataactttatgtgtcgatacttgtcaaatcagttactgttcaggggatccttctgtttctcacggggtgaaacatgtctttagttcctcatgttaacacgaagccagagcccacatgaactgttggatgtcttccttagaaagggtaggcatggaaaattccacgaggctcattctcagtatctcattaactcattgaaagattccagttgtatttgtcacctggggtgacaagaccagacaggctttcccaggcctgggtatccagggaggctctgcagccctgctgaagggccctaactagagttctagagtttctgattctgtttctcagtagtccttttagaggcttgctatacttggtctgcttcaaggaggtcgaccttctaatgtatgaagaatgggatgcatttgatctcaagaccaaagacagatgtcagtgggctgctctggccctggtgtgcacggctgtggcagctgttgatgccagtgtcctctaactcatgctgtccttgtgattaaacacctctatctcccttgggaataagcacatacaggcttaagctctaagatagataggtgtttgtccttttaccatcgagctacttcccataataaccactttgcatccaacactcttcacccacctcccatacgcaaggggatgtggatacttggcccaaagtaactggtggtaggaatcttagaaacaagaccacttatactgtctgtctgaggcagaagataacagcagcatctcgaccagcctctgccttaaaggaaatctttattaatcacgtatggttcacagataattctttttttaaaaaaacccaacctcctagagaagcacaactgtcaagagtcttgtacacacaacttcagctttgcatcacgagtcttgtattccaagaaaatcaaagtggtacaatttgtttgtttacactatgatactttctaaataaactctttttttttaaaagtctggtctttccttcaatgttacagcaaaacagatataaaatagacaataaattatagtttatatttacaaaaaaagctgtaagtgcaaacagttgtagattataaatgtattatttaatcagtttagtatgaaattgccttcccagtacatgattgtgaaaaagacatttagaaaatattctaaaatttaatctgagcctcactttctacaagggaaatcatgatttccgttcataaacagcatgctcatccccctaacaccatt

SEQ ID NO: 220383 - protein, 133 aa, Artificial Sequence
  derived and/or modified sequence
MLSPEAERVLRYLVEVEELAEEVLADKRQIVDLDTKRNQNREGLRALQKDLSLSEDVMVCFGNMFIKMPHPETKEMIEKDQDHLDKEIEKLRKQLKVKVNRLFEAQGKPELKGFNLNPLNQDELKALKVILKG

SEQ ID NO: 220384 - DNA, 402 bp, Artificial Sequence
  derived and/or modified sequence
atgcttagtcccgaggctgaaagggtgctacggtacctggtggaggtcgaagagttggcagaagaggtcctcgcggataagagacagattgtggatctggataccaagcgtaaccagaatagggaaggcctcagggcattgcagaaagacctaagtctttctgaggatgttatggtatgcttcggcaacatgttcattaagatgccacaccccgaaactaaggagatgatcgaaaaggatcaggatcatctggacaaggagatagagaagctgaggaagcagctcaaagtaaaagtgaatagactctttgaggcccagggcaaaccagaactgaaaggctttaatctcaaccctctgaatcaggatgagctaaaggccctcaaagtgatactgaagggttag

SEQ ID NO: 220385 - DNA, 402 bp, Artificial Sequence
  derived and/or modified sequence
atgctgagccctgaggccgagcgggtgctgcgctacctggtggaggtggaggagctggccgaggaggtgctggccgacaagaggcagatcgtggacctggacaccaagaggaaccagaaccgggagggcctgcgggccctgcagaaggacctgagcctgtctgaagatgtgatggtgtgctttggaaacatgttcatcaagatgccccaccctgagaccaaggagatgattgagaaggaccaggaccacctggacaaggagattgagaagctgaggaagcagctgaaggtgaaggtgaaccggctgtttgaggcccagggcaagccagagctgaagggcttcaacctgaaccccctgaaccaggatgagctgaaggccctgaaggtgatcctgaagggctag

SEQ ID NO: 220386 - DNA, 402 bp, Artificial Sequence
  derived and/or modified sequence
atgctgagccccgaggccgagcgggtgctgcggtacctggtggaggtcgaagagctggccgaggaggtcctggcagataagagacagatagtagatctcgataccaagaggaaccagaatagggaaggcctccgcgctctgcagaaagatctctccttgtccgaggatgttatggtatgcttcgggaatatgttcatcaagatgcctcaccccgaaacaaaggaaatgattgaaaaagatcaggaccaccttgataaggagattgagaaattacggaaacagctcaaggttaaagtcaacaggctgtttgaagcccaaggtaaaccagagctaaaaggcttcaacctcaatcccctcaaccaggatgaactcaaagctctgaaggtaattctgaagggttag

SEQ ID NO: 220387 - DNA, 1385 bp, Artificial Sequence
  derived and/or modified sequence
agcctgcgcaccaccgttcttttaactgcgcaggcgcgccggaagcacctagagagcggcgcgtgcgcagcgggagtcgaagcggagatcccggggtcgcgcgagagccgcaagcggagttggtgggcgctatgctatcacccgaggcagagcgagtgctgcggtaccttgtagaagtggaggagctcgccgaggaggtgctggcggacaagcggcagattgtggacctggacactaaaaggaatcagaatcgagagggcctgagggccctgcagaaggatctcagcctctctgaagatgtgatggtttgcttcgggaacatgtttatcaagatgcctcaccctgagacaaaggaaatgattgaaaaagatcaagatcatctggataaagaaatagaaaaactgcggaagcaacttaaagtgaaggtcaaccgcctttttgaggcccaaggcaaaccggagctgaagggttttaacttgaaccccctcaaccaggatgagcttaaagctctcaaggtcatcttgaaaggatgagactcaagaaccaagatgggggaccagcaaccccccagggtcatggaggacccaggaccctccaaccttgacacctgtaaggacaggatctgccctgtaaggggccagccgtcaggaatctggccatgaaaacctctttgtagtgcttggctactctgtgatggcaggagggaaccttcagcctgtctggctgctggacctggacaccagggctcggtggacacaagatctattgacgggccttggtagccaccagtgggtgtgtggggcagtggctgtgggggtgtaagaatgactgcaacaggcacttcccaacaatggcctgctgttcacatggaccctgagcaaggaaggagggagggaggggcagagtggagtgtcattccagcattcctctcagaagggagagaggttttcaggctggtgccatgcgattggaataaagcaggaggctcatgggtggttgctgaatgaagaacagaatcttggtgctttgtggctcaccacagccatctgtggggcaggcacacacacctcccgccagctccaattttgcactttttccctgcttgattccaagagtaggtgctgcctagcagcccttcgtggccactctttactcaggagggccttgcagagtcctgcaccaggcctgggtgagtggatgcgcctcttaccatatgacacgtgtcaagatgcccttccgccccctctgaaagtggggcccggccagcactgctcgttactgtctgccttcagtggtctgaggtcccagtatgaactgccgtgaagtcaaaactcttatgtgttcattaagggctcaataaatgttagctgaatgaatgaatagca

SEQ ID NO: 220388 - DNA, 402 bp, Artificial Sequence
  derived and/or modified sequence
atgttgtctccggaagcggagagggtgttgaggtacctggtggaggtggaagaattggcggaagaagtgttagccgataagaggcaaatagtcgatctggatacgaagaggaatcagaaccgcgagggcctgagggctctgcagaaggacctatcattgagcgaggatgtaatggtttgtttcggaaacatgttcatcaaaatgccccatcctgaaacgaaagaaatgatagaaaaagaccaggaccatctggacaaagagatcgaaaagctcaggaagcaattgaaagtgaaagtgaaccgtctgttcgaggcccaagggaaacccgaattgaaaggctttaatctcaaccctttgaaccaggatgagcttaaggctctcaaggttattttgaagggctag

SEQ ID NO: 220389 - DNA, 402 bp, Artificial Sequence
  derived and/or modified sequence
atgctgagccccgaggccgagagagtgctgagatacctggtggaggtggaggagctggccgaggaggtgctggccgacaagagacagatcgtggacctggacaccaagagaaaccagaacagagagggcctgagagccctgcagaaggacctgagcctgagcgaggacgtgatggtgtgcttcggcaacatgttcatcaagatgccccaccccgagaccaaggagatgatcgagaaggaccaggaccacctggacaaggagatcgagaagctgagaaagcagctgaaggtgaaggtgaacagactgttcgaggcccagggcaagcccgagctgaagggcttcaacctgaaccccctgaaccaggacgagctgaaggccctgaaggtgatcctgaagggctag

SEQ ID NO: 220390 - protein, 248 aa, Artificial Sequence
  derived and/or modified sequence
MGMERPAAREPHGPDALRRFQGLLLDRRGRLHGQVLRLREVARRLERLRRRSLVANVAGSSLSATGALAAIVGLSLSPVTLGTSLLVSAVGLGVATAGGAVTITSDLSLIFCNSRELRRVQEIAATCQDQMREILSCLEFFCRWQGCGDRQLLQCGRNASIALYNSVYFIVFFGSRGFLIPRRAEGDTKVSQAVLKAKIQKLAESLESCTGALDELSEQLESRVQLCTKSSRGHDLKISADQRAGLFF

SEQ ID NO: 220391 - DNA, 747 bp, Artificial Sequence
  derived and/or modified sequence
atgggcatggagcggccagcggcccgtgaaccacatggccctgatgcccttcggagatttcaaggcctgcttcttgaccggcgcggtcgcctgcacggccaagtgctgcgattacgagaggtcgcccggagacttgagcggctcaggcgtagaagcctggtggctaacgtcgcaggaagtagtctttccgctactggcgctcttgccgctatcgtcgggttgtctttgtcacctgtgacactaggcaccagcctgctggtttccgccgttgggctcggcgtagccaccgctggcggggcagttacaattaccagtgacctgtcactcattttttgtaactcacgggagttaagacgcgtacaagagatcgctgccacctgtcaggaccagatgagagagatcctgtcctgtctggaatttttttgccgatggcagggttgtggtgatcgccagttactgcagtgcgggagaaatgccagcatcgctctttacaactccgtgtacttcatcgtgttttttgggagccgcggtttcctcataccaagacgcgcagaaggcgatactaaagtctctcaagcagtcctgaaggcaaaaatccagaagctggcagaaagcttggagtcttgcaccggtgcactcgacgagctctccgagcagctcgaatctcgagttcagctctgtactaagagttcccgtggccacgacctgaaaatctccgccgaccagagggccggactgttcttttag

SEQ ID NO: 220392 - DNA, 747 bp, Artificial Sequence
  derived and/or modified sequence
atgggcatggagaggcctgctgcccgggagccccacggcccagatgccctgcggcgcttccagggcctgctgctggacagaagaggccgcctgcacggccaggtgctgcggctgcgggaggtggcccggcggctggagcggctgcggcggcgcagcctggtggccaacgtggccggcagcagcctgagcgccactggagccctggccgccatcgtgggcctgagcctgagccctgtgaccctgggcaccagcctgctggtgtctgctgtgggcctgggcgtggccacagctggaggagctgtgaccatcaccagtgacctgagcctcatcttctgcaacagccgggagctgcggcgggtgcaggagattgctgccacctgccaggaccagatgagggagatcctgagctgcctggagttcttctgccgctggcagggctgtggggaccggcagctgctgcagtgtggcagaaatgccagcatcgccctgtacaacagcgtgtacttcatcgtgttcttcggcagccggggcttcctgatcccccggcgggcagagggggacaccaaggtgtcccaggccgtgctgaaggccaagatccagaagctggccgagagcctggagagctgcaccggggccctggatgagctgtctgagcagctggagagccgggtgcagctgtgcaccaagagcagccggggccatgacctgaagatctctgctgaccagagagctggcctcttcttctag

SEQ ID NO: 220393 - DNA, 747 bp, Artificial Sequence
  derived and/or modified sequence
atgggcatggagcggcccgccgcccgggagccccacggccccgacgccttgagacggtttcagggcttactgctcgaccgaagaggtcgactgcacgggcaggtgctccggttgcgggaagtcgcacgaagattagagcgtctaagacgccgctccctggttgcaaacgtcgccggctcaagtttgagcgccaccggagccctcgcggcgattgtcggcctgagtctcagccctgtgactctgggtacaagtctgttggtcagcgctgtcggattgggcgttgcgacagctggcggggcggtgaccattacaagcgacctgtccttgatcttctgcaatagtagggagctccgccgagtgcaggagatcgcagcaacatgtcaggaccagatgagagagatcctgtcctgcctggagttcttttgcagatggcaggggtgcggcgaccgtcagctgttgcaatgtgggcgcaatgcaagcatagctttgtacaactccgtatattttatcgtttttttcgggtcgcggggattccttatccctcgccgcgcagaaggagatacaaaggtgagccaggccgtcttaaaggctaagattcagaaactcgccgaatctctcgaatcatgtaccggagctctggacgaactgtccgagcagttggaatcaagagtccaactgtgtacaaagagctcaaggggacacgacctgaaaatcagcgccgaccagcgagccggccttttcttttag

SEQ ID NO: 220394 - DNA, 747 bp, Artificial Sequence
  derived and/or modified sequence
atgggaatggaacgtccagctgcacgggagccacatggcccagacgcgctgcggaggttccagggcctccttctagaccggcgtggaaggttacacgggcaagtcctgcggcttcgagaggtggccagaaggctggagcggttaaggcgcagatctctggtcgctaacgtggccggaagtagcttaagcgcaacgggggctctcgcagcaatcgtgggtctgtctctttcccctgtcacgctgggtacaagtctgctggtctcagccgttgggctgggcgtcgccactgctggcggagccgttaccattacgtcagatttgtctctcatcttctgcaatagcagggagctccgcagagtgcaggagattgccgctacatgccaggatcagatgagggaaatcctctcatgtctggaatttttctgcagatggcaaggctgcggcgaccgacagctgctgcagtgtgggcgtaacgcaagtatcgctttatataacagcgtctatttcatcgtatttttcggtagcagaggctttctcatccctcgcagggctgagggcgacacaaaggtgtctcaggccgtactgaaagcaaaaatacagaagctcgctgaatctctcgaatcttgtacaggagcactggacgaactgtccgaacagctggagtcccgggtgcagctatgcaccaaatcttcacgcggacatgacctgaagatttccgctgaccagcgagccggactgtttttctag

SEQ ID NO: 220395 - DNA, 4646 bp, Artificial Sequence
  derived and/or modified sequence
gcagccattggttctctggaactataaagcacactcatccagaaacagcctcagattttactttcctggaggcagacagaagtgaatgggaatggagaggccggcggcccgggagccgcatgggcccgacgcgctgcggcgcttccagggactgctgctggaccgccgaggccggctgcacggccaggtgctgcgcctgcgcgaggtggcccggcgcctggagcgcctgcgcaggcgctccctcgtagccaacgtggccggcagctcgctgagcgcaacgggcgccctcgccgccatcgtggggctctcgctcagcccggtcaccctggggacctcgctgctggtgtcggccgtggggctgggggtggccacagccggaggggccgtcaccatcacgtccgatctctcgctgatcttctgcaactcccgggagctgcggagggtgcaggagatcgcggccacctgccaggaccagatgcgagagatcctgagctgcctcgagtttttctgccgctggcagggctgcggggaccgccagctgctgcagtgcgggaggaacgcctccatcgccctgtacaattctgtctacttcatcgtcttctttggctcacgtggcttcctcatccccaggcgggcggagggggacaccaaggttagccaggccgtgctgaaggccaagattcagaaactggccgagagcctggagtcctgcaccggggctctggacgaactcagcgagcagctggagtctcgggttcagctctgcaccaagtccagtcgtggccacgacctcaagatctctgctgaccagcgtgcagggctgtttttctgagaacatcctttccccctaatgaccgaggccagcaaatcatcctcatgggatgctccagaatttgtagctcccttaggaaaacaccaagctgggttaggagccgaaggcaaaggatgagaaaaactgtttttgaagtgggcaggtccccaaagcccttcttttcccatcactgtgacatctgcctgggcttgagtgctacggacttttcagtcttcctagtggaaaaatgtgacccaaaaactctttttcctttatcaaaaactttctgtctaaacacagctgggcaggcactcctgttttaaagttatttcggggtccctgaccctgccctggtggcttggcctgagactggagagagtgccatcctctgggtcctctccaagtcctactagtctttgaagtcctcaaaatgtgcgtgaggaaggcgtttgcctctattccagaatttctgatacaaagaactccagaatccagagcaaatcagcccttctctgaacgttgtaggatggttcagaacccagagaggaccctggtgctgatatctcctcctcttccctttcccctcagcttacttactcccagatgcggcctgggtatgaagtaggcctttcctgagtggctcccaatccagtcctccaagtactcagaggggaagcccgtgaagccgtcatctaagtcctgctccctcacatgaagctgagggccagatagatggagcgactgccaacttcatttcccgacatcattgtgttcagaagagagtgatgggttttgagttagacagtcctgggcttgagacaggctttgtcactactgtgtgagtgtagccacctaatctctctgagactgtgtaaaacaaagatgataaaatctcaccctgttgtgagatattaaatgagccaaagtgcctagcatgatggtgctggctcatatagtgtagtccctggaatggcaaattaacatcacccaggaacttgttagaaaggcaaattcttggacacaaccctcctgatttatggaatcagaaactctggctgtggggcccagcaacctgagtttaaacaatttctctgggtggttctgcggcacactaaggtttgaaaatcactgcaacaaatgctaacttctaatccccttgatgagctttcacgaagtctcacggcttctctagggactccatggtcttcagagtcgttcacagatgaccaaggacagactgtgtcccagaagccaaaatgagagagagagagagagagcacgcgtacgtgcaccctggggcagtgtctcaccgtatgaacaagggatgtaacactaaaagcccattagggggcagtgtttcccgcctgttgtagaaactggtacagaaaggaatatgaagttcctgaaactgacctttgtctattattaccttctctgaaaagtgccagtccatgtattttttatttattttaagtttgtaatttaatttttaattattgtttagtgtttgcatttaattttatttaatcaccacatttagaaaataataagagcaagtttctaaatgggagactgctgaggctctttgcaagagatgagattaagtttgagtttctaaggcagggcatgagctggaaatagcattgctttccttgattgtctctctccttcagggagattctttttctctagtgttttaagtgatcctttgaagtaagtgtggagagtcttgaatggcaagaccaggagctgagtttaagcttgtaatggaagcttgcattgtgggatatataactgaggaagcatatttatcctgaaggtattttgccagaaggtatcacttgacctggaaaaggaatctatttagttcaggaaagataaaaagtttagaggtatgtgaaggaagcacttagaacttgcaagcctgatgtcctatcaagttatgtcttctgggtgacagacaaaatcgcttgtcttatggtggtgatgtgttgcattttcactttggggtctgtaagaaactgtcagtgaaaatatgtacaattccttcaatttccattcttaacaactgtaatgttgaaaaataagttgaaaagtctttgggaccatacatgcaaaaacggtgcctctgttacttaattatttaatattctataaatgtacccaatctgtccgcacccttcccagtgatggggcagtatgtctgaggaagtataatttcagtactggggtcggggagaggaggtgatgtttctacatttttattttttctataaattgcaattggtctgtatgctggtttattttgaaatttatattggtttcttttcaagctggtgtcatctcctagactgtttcacccagatgctagcattttttttttttttttgagacagagtctcactctgtcacctaggctggagttgcagtggtttgatctcggctcactgcaacctccgactcctgggttcaagcaattcttctgcctcagcctcctgagtagctgggattacagatgtgcaccagcacacccggctaattttttgtatttttagtagagacagggtttcgccatgttggccaggctggtcttgaactcctggccttatgtgatccgcccaccttggcttcccaaagtgctgggattacaggcatgagccacctcgcctggccagatgctagcattttagatcaaacaattcattttagatgaattgttttgtttcacaatcattttaaatcattttagaatgtacttcacattattagttgtgttatggcataaaggtacaaccattccctaactccatcttttattaatgcttaagtttaaattatattcttccaatgcctaagctattccctagaattaaactgggcacttttggaagcagcaacagtaacagcagcagcaaacttttcctctcatattttgggtgtatcaaaagttctagacttttgaagttatgatttcagtggcccactttatttctaaggaagagtgtctactttggaacgatactttgcacatagtaggaactcaagaaatacatttgaataattataattaactgtttagctatcttaatgagaatttgttgacaacaaaagatcatccatcgccttatgtgtgagtaagattggagcctctatcaagatttagtcaagttcagttagattgattctagaaacaaatatttatttctttcttttacggggatgtgaataaggcttttccttaaggccttcattctttaaacaaacaggttgaaatggtatgttgtaaaagagaagacgggagagaggtatttagatgataagtgtacttcacaaaaatgccaaagtttgaaaaataggtatgtttgttctaaatgtttaagtgcttctctgttaggttctggggcttgcaatcatttgaattgttctgtttcacaataaaggagattcactgggttctgcattttcaggattcaatagaactgctccattaaaaaaataatccttagcaagcattcgaatcctaactgctttgatgcacttgccctcgggcacctgtcatttccaatatggtaggtgtcaaagtcaaaagtatttactgggagaaaaaagagaggagtggttgtagaagtctccctaaatcagacatgtcaagcaatcagccaacgtggtgtatttctcattcaatattttagtgtgaattgagacactgagataaagacatcgtgcagagataaatggggatacagttaaatgtagcaactcttgagttcattttttcccactgtagcaaaattaatgctttctctttattgaaataaattgctcattcctcaaa

SEQ ID NO: 220396 - DNA, 747 bp, Artificial Sequence
  derived and/or modified sequence
atgggcatggagagacccgccgccagagagccccacggccccgacgccctgagaagattccagggcctgctgctggacagaagaggcagactgcacggccaggtgctgagactgagagaggtggccagaagactggagagactgagaagaagaagcctggtggccaacgtggccggcagcagcctgagcgccaccggcgccctggccgccatcgtgggcctgagcctgagccccgtgaccctgggcaccagcctgctggtgagcgccgtgggcctgggcgtggccaccgccggcggcgccgtgaccatcaccagcgacctgagcctgatcttctgcaacagcagagagctgagaagagtgcaggagatcgccgccacctgccaggaccagatgagagagatcctgagctgcctggagttcttctgcagatggcagggctgcggcgacagacagctgctgcagtgcggcagaaacgccagcatcgccctgtacaacagcgtgtacttcatcgtgttcttcggcagcagaggcttcctgatccccagaagagccgagggcgacaccaaggtgagccaggccgtgctgaaggccaagatccagaagctggccgagagcctggagagctgcaccggcgccctggacgagctgagcgagcagctggagagcagagtgcagctgtgcaccaagagcagcagaggccacgacctgaagatcagcgccgaccagagagccggcctgttcttctag

SEQ ID NO: 220397 - protein, 396 aa, Artificial Sequence
  derived and/or modified sequence
MGERKGVNKYYPPDFNPEKHGSLNRYHNSHPLRERARKLSQGILIIRFEMPYNIWCDGCKNHIGMGVRYNAEKKKVGNYYTTPIYRFRMKCHLCVNYIEMQTDPANCDYVIVSGAQRKEERWDMADNEQVLTTEHEKKQKLETDAMFRLEHGEADRSTLKKALPTLSHIQEAQSAWKDDFALNSMLRRRFREKKKAIQEEEERDQALQAKASLTIPLVPETEDDRKLAALLKFHTLDSYEDKQKLKRTEIISRSWFPSAPGSASSSKVSGVLKKLAQSRRTALATSPITVGDLGIVRRRSRDVPESPQHAADTPKSGEPRVPEEAAQDRPMSPGDCPPETTETPKCSSPRGQEGSRQDKPLSPAGSSQEAADTPDTRHPCSLGSSLVADYSDSESE

SEQ ID NO: 220398 - protein, 159 aa, Artificial Sequence
  derived and/or modified sequence
MGERKGVNKYYPPDFNPEKHGSLNRYHNSHPLRERARKLSQGILIIRFEMPYNIWCDGCKNHIGMGVRYNAEKKKVGNYYTTPIYRFRMKCHLCVNYIEMQTDPANCDYVIVSGAQRKEERWDMADNEQVLTTGERHPLTCLGALALSLRWGPQSPAEL

SEQ ID NO: 220399 - DNA, 1191 bp, Artificial Sequence
  derived and/or modified sequence
atgggcgagagaaagggcgtgaacaagtactacccccccgacttcaaccccgagaagcacggcagcctgaacagataccacaacagccaccccctgagagagagagccagaaagctgagccagggcatcctgatcatcagattcgagatgccctacaacatctggtgcgacggctgcaagaaccacatcggcatgggcgtgagatacaacgccgagaagaagaaggtgggcaactactacaccacccccatctacagattcagaatgaagtgccacctgtgcgtgaactacatcgagatgcagaccgaccccgccaactgcgactacgtgatcgtgagcggcgcccagagaaaggaggagagatgggacatggccgacaacgagcaggtgctgaccaccgagcacgagaagaagcagaagctggagaccgacgccatgttcagactggagcacggcgaggccgacagaagcaccctgaagaaggccctgcccaccctgagccacatccaggaggcccagagcgcctggaaggacgacttcgccctgaacagcatgctgagaagaagattcagagagaagaagaaggccatccaggaggaggaggagagagaccaggccctgcaggccaaggccagcctgaccatccccctggtgcccgagaccgaggacgacagaaagctggccgccctgctgaagttccacaccctggacagctacgaggacaagcagaagctgaagagaaccgagatcatcagcagaagctggttccccagcgcccccggcagcgccagcagcagcaaggtgagcggcgtgctgaagaagctggcccagagcagaagaaccgccctggccaccagccccatcaccgtgggcgacctgggcatcgtgagaagaagaagcagagacgtgcccgagagcccccagcacgccgccgacacccccaagagcggcgagcccagagtgcccgaggaggccgcccaggacagacccatgagccccggcgactgcccccccgagaccaccgagacccccaagtgcagcagccccagaggccaggagggcagcagacaggacaagcccctgagccccgccggcagcagccaggaggccgccgacacccccgacaccagacacccctgcagcctgggcagcagcctggtggccgactacagcgacagcgagagcgagtag

SEQ ID NO: 220400 - DNA, 1191 bp, Artificial Sequence
  derived and/or modified sequence
atgggtgaacgaaaaggggtcaacaaatactatccacccgattttaacccagaaaagcacggcagcctaaaccgctaccacaatagccacccactgagagagcgtgccagaaagctgagccaggggattctgattattcggttcgagatgccctataatatatggtgtgacggatgcaaaaatcacattggtatgggggtcaggtataatgccgaaaaaaagaaagtggggaattattatactacacctatctaccggtttcggatgaagtgtcacctgtgtgttaattacatcgaaatgcagactgaccctgctaattgcgactatgtgattgtctctggggcccagcgcaaagaggaaagatgggatatggcagacaacgaacaggtcctcactacagagcacgagaagaaacagaagttggaaacagatgctatgttccggctggaacatggagaagcagatagaagcacattaaagaaagcactaccgactctgagccacatccaggaagcccagtctgcatggaaggacgatttcgccctcaactccatgctccgccgccgctttcgcgagaaaaagaaagccatccaggaggaagaggaacgggatcaagccctacaggccaaagcttcactcacgatcccactggtgcccgagaccgaggatgaccggaaactcgcagcattgctaaaattccacacattagattcctatgaggataagcagaagctgaaacgtaccgagatcatttctcgtagctggttcccctctgctccaggctcagcatcgtcatccaaagtgtccggtgtcctcaaaaagctggcccagagcagaaggacagcattggccacttccccgattactgtcggtgatctcggtattgtaagacgtcgttcgcgggatgttccagagagccctcagcacgccgccgacacccctaaatccggcgaacctcgcgtccccgaagaagccgctcaagacagaccaatgtctcctggtgactgccctccagagacaacagagacgccaaaatgctccagtcccagaggacaggagggatctcggcaagataaaccactgtctcctgccgggagcagtcaggaggctgctgatacaccagatacacgccacccatgctcacttgggagctctctagtcgccgattattcagattccgagtcagaatag

SEQ ID NO: 220401 - DNA, 1191 bp, Artificial Sequence
  derived and/or modified sequence
atgggagagaggaaaggagtgaacaagtactaccccccagacttcaaccctgagaagcacggcagcctgaaccgctaccacaacagccaccccctgcgggagcgggccaggaagctgagccagggcatcctgatcatccgctttgagatgccctacaacatctggtgtgatggctgcaagaaccacatcggcatgggcgtgcgctacaatgctgagaagaagaaggtgggcaactactacaccacccccatctaccgcttcaggatgaagtgccacctgtgtgtgaactacatcgagatgcagacagatcctgccaactgtgactatgtgattgtgtctggggcccagaggaaggaggagcgctgggacatggctgacaatgagcaggtgctgaccacagaacatgagaagaagcagaagctggagacagatgccatgttccggctggagcacggggaggccgacaggagcaccctgaagaaggccctgcccaccctgagccacatccaggaggcccagagcgcctggaaggatgactttgccctgaacagcatgctgcggcggcgcttccgggagaagaagaaggccatccaggaggaggaggagcgggaccaggccctgcaggccaaggccagcctgaccatccccctggtgcctgagacagaagatgacaggaagctggccgccctgctgaagttccacaccctggacagctatgaggacaagcagaagctgaagaggacagagatcatcagccgctcctggttccccagcgcccctggcagcgccagcagcagcaaggtgtctggagtgctgaagaagctggcccagagcagaagaacagccctggccaccagccccatcaccgtgggggacctgggcatcgtgagaagaagaagcagagatgtgcctgagagcccccagcacgccgctgacacccccaagagcggggagccccgggtgcctgaggaggccgcccaggaccggcccatgagccctggggactgccccccagagaccacagagacccccaagtgcagcagcccccggggccaggagggcagccggcaggacaagcccctgagccctgctggcagcagccaggaggccgctgacaccccagacaccaggcacccctgcagcctgggcagcagcctggtggccgactacagcgacagcgagagcgagtag

SEQ ID NO: 220402 - DNA, 1191 bp, Artificial Sequence
  derived and/or modified sequence
atgggcgagcggaagggcgtgaacaagtactacccccccgacttcaatcccgaaaagcacggtagccttaacaggtatcacaactcacacccgttaagagaaagagctcgaaaattatctcaaggcattctgatcatccggttcgagatgccctataacatttggtgcgatggatgcaagaatcacatcggcatgggcgtacgttataacgcggagaaaaagaaagtcggcaactactacacgaccccaatttaccggtttcgtatgaagtgccatctttgtgtcaattacattgagatgcaaaccgatcctgccaattgcgattatgtaattgtgtcaggggcacaacggaaggaggagcggtgggacatggcagacaacgagcaggtgctgaccactgaacatgagaagaaacaaaagttagagacagacgcaatgttcagactcgaacatggcgaagccgaccggtccaccctgaagaaagcgctgccaaccttatcacacatccaagaggcccagagcgcctggaaagatgattttgctcttaactctatgctgcggaggaggtttagggagaaaaaaaaagcaatccaggaggaggaggagagggatcaagccctacaggccaaggcttctctaaccatccctctcgtcccggaaaccgaagacgatcgcaagttggcagctcttcttaagtttcatacacttgactcttatgaagataagcagaaactgaagcgcactgaaatcatctcacggagctggttccccagtgcgcccgggtccgctagttcgagtaaggtctccggagtgctcaagaagctggcgcagagccgcaggactgctcttgccacctcccccatcacagtgggcgacttgggaattgtgagaagaaggtctagagacgtgcctgagagccctcagcatgctgccgatacaccaaagtctggcgagccaagagtgccggaggaagctgcccaagaccggcctatgagccctggggattgtcctcccgaaacaactgagacccctaaatgcagctctcctagagggcaagaggggagtcgccaggataaacccctgagccccgccggatcatcgcaagaggccgccgacacacccgacacccggcacccctgttccttaggttctagcctagtggccgactacagtgattctgagtctgaatag

SEQ ID NO: 220403 - DNA, 1191 bp, Artificial Sequence
  derived and/or modified sequence
atgggcgaaaggaagggcgtgaacaaatattacccacccgattttaacccagagaagcatggaagcttgaatcgctaccacaatagccaccccctccgtgagagggccagaaaacttagccaaggcatcctgattatccgcttcgagatgccctacaacatctggtgcgacggctgtaagaaccacatcggaatgggtgtacgctacaatgcggaaaagaagaaggtaggtaattactacaccacgccaatttatcgcttccgcatgaaatgtcatctttgtgtaaattacatcgaaatgcagactgacccagccaactgcgattacgtcatcgtgtctggcgctcagaggaaggaagaaagatgggatatggccgacaacgaacaggtgctgactacagaacatgaaaagaaacagaagctggaaaccgatgccatgttccggcttgagcacggggaggcagacagatctacattgaaaaaagccctgcccaccctgagtcacatacaggaagcccagtctgcatggaaggacgactttgcccttaactctatgctgcgtcggaggttcagagaaaagaagaaggccatacaggaggaagaggagcgcgaccaggccctccaggctaaggcctcactcacaattccacttgttcccgagacggaagatgaccgaaagctcgccgcactgcttaaatttcacactctggattcttatgaggataagcagaagttaaaacggacggagattatctcacgctcctggtttccttcagcaccgggtagcgctagctctagcaaagtgtcaggcgttctgaagaagttagcgcaatcacggagaacggccctggctacctcgccgattactgtaggggatttaggcattgtgcgccgacggtctcgcgatgtcccagaaagtcctcagcacgcggctgatactcccaaatccggtgaaccaagagtgcccgaggaagctgcccaggatcggccaatgtcccctggagactgccctccagagaccaccgaaaccccaaaatgctccagtccgagggggcaagaaggatcaagacaggacaagccactgtcccccgctggaagcagccaggaggctgcagatacccccgatacacgccacccgtgtagtctgggcagctccttggttgctgattacagtgactccgaatcggagtag

SEQ ID NO: 220404 - DNA, 1665 bp, Artificial Sequence
  derived and/or modified sequence
agcgcgcacttccgggcacggtcagggcgtgacgtcgggaggagggcagacacgccgctttttggatgcctcctatgcctggcgggagtcttgtctgagctggcaccaccacacggcccacgacatcttcgcagggaagcctgtggaccctctgccaggctccacaagaggtcaggacagtgcagtgtgttcacaaggccagtttctgatcgtccgccccgaggctgaggaccagtaggcagctcccaagatgggtgaaaggaaaggggtcaacaagtactatcctccagacttcaaccctgagaagcatggctctctcaaccgataccacaacagccacccgcttcgggagcgggctcggaagctgtcacagggcatcctcatcatccgattcgaaatgccatataacatctggtgcgatggctgcaagaaccacatcggcatgggtgttcgttacaatgcagaaaagaagaaggtgggcaattactacacaaccccgatctacaggttccggatgaaatgccacctctgtgtcaactacatcgagatgcagacggaccccgccaactgcgactacgtgatcgtgagtggcgcccagcgcaaggaggagcgctgggacatggcggacaatgagcaggtgctgaccacagagcatgagaagaagcagaagctggagacggacgccatgttccggctggagcatggcgaggccgaccgcagcacactcaagaaggcgctgcccacactgagccacatccaggaggcccagagcgcctggaaggacgacttcgccctcaacagcatgctgcggagaaggttccgggaaaagaaaaaagccatccaggaggaggaggagagagaccaggccttgcaggccaaggcgagcctgaccatcccgctggtgcccgagacggaagatgaccgcaagctggcggctctgctgaagttccacaccctggactcctacgaggacaagcagaaactcaagcggaccgagatcatcagccgctcctggttcccctctgcccccggatccgcctccagcagcaaggtcagcggcgtcctgaagaagctggcacagagccgcagaaccgcgcttgccacctcccccatcaccgtcggggacctgggcatcgtgcggcggaggtctcgggacgtcccggagagcccccagcatgcggccgacacccccaagtctggggaaccgcgggtaccagaggaggctgcccaggaccggcccatgtcccccggagactgtcctccggaaacaactgagacccccaagtgcagcagcccgagggggcaggaagggagccgtcaggacaagcccctgtcgccagcaggctcctcccaggaggcagctgacacccccgacacgcggcacccctgcagtctcggctcctccctcgtggcggactactccgactcggagagtgagtgagcgatccccatcctggagactggacccgctctagaggcccggacacacccaggaggcccctcacagactgcagacccccggctcgcccaccagccctgggagagctcagatgccgcatcctccccagaccgcgccttcctgcaaccgtggagttatttatttggtcctggtgagggtgtttgtgccttgtgagactccgtacattaaagacctgtctcttcttc

SEQ ID NO: 220405 - protein, 957 aa, Artificial Sequence
  derived and/or modified sequence
MAHYITFLCMVLVLLLQNSVLAEDGEVRSSCRTAPTDLVFILDGSYSVGPENFEIVKKWLVNITKNFDIGPKFIQVGVVQYSDYPVLEIPLGSYDSGEHLTAAVESILYLGGNTKTGKAIQFALDYLFAKSSRFLTKIAVVLTDGKSQDDVKDAAQAARDSKITLFAIGVGSETEDAELRAIANKPSSTYVFYVEDYIAISKIREVMKQKLCEESVCPTRIPVAARDERGFDILLGLDVNKKVKKRIQLSPKKIKGYEVTSKVDLSELTSNVFPEGLPPSYVFVSTQRFKVKKIWDLWRILTIDGRPQIAVTLNGVDKILLFTTTSVINGSQVVTFANPQVKTLFDEGWHQIRLLVTEQDVTLYIDDQQIENKPLHPVLGILINGQTQIGKYSGKEETVQFDVQKLRIYCDPEQNNRETACEIPGFNGECLNGPSDVGSTPAPCICPPGKPGLQGPKGDPGLPGNPGYPGQPGQDGKPGYQGIAGTPGVPGSPGIQGARGLPGYKGEPGRDGDKGDRGLPGFPGLHGMPGSKGEMGAKGDKGSPGFYGKKGAKGEKGNAGFPGLPGPAGEPGRHGKDGLMGSPGFKGEAGSPGAPGQDGTRGEPGIPGFPGNRGLMGQKGEIGPPGQQGKKGAPGMPGLMGSNGSPGQPGTPGSKGSKGEPGIQGMPGASGLKGEPGATGSPGEPGYMGLPGIQGKKGDKGNQGEKGIQGQKGENGRQGIPGQQGIQGHHGAKGERGEKGEPGVRGAIGSKGESGVDGLMGPAGPKGQPGDPGPQGPPGLDGKPGREFSEQFIRQVCTDVIRAQLPVLLQSGRIRNCDHCLSQHGSPGIPGPPGPIGPEGPRGLPGLPGRDGVPGLVGVPGRPGVRGLKGLPGRNGEKGSQGFGYPGEQGPPGPPGPEGPPGISKEGPPGDPGLPGKDGDHGKPGIQGQPGPPGICDPSLCFSVIARRDPFRKGPNY

SEQ ID NO: 220406 - protein, 323 aa, Artificial Sequence
  derived and/or modified sequence
MIASGIPGFPGNRGLMGQKGEIGPPGQQGKKGAPGMPGLMGSNGSPGQPGTPGSKGSKGEPGIQGMPGASGLKGEPGATGSPGEPGYMGLPGIQGKKGDKGNQGEKGIQGQKGENGRQGIPGQQGIQGHHGAKGERGEKGEPGVRGAIGSKGESGVDGLMGPAGPKGQPGDPGPQGPPGLDGKPGREFSEQFIRQVCTDVIRGPEGPRGLPGLPGRDGVPGLVGVPGRPGVRGLKGLPGRNGEKGSQGFGYPGEQGPPGPPGPEGPPGISKEGPPGDPGLPGKDGDHGKPGIQGQPGPPGICDPSLCFSVIARRDPFRKGPNY

SEQ ID NO: 220407 - protein, 954 aa, Artificial Sequence
  derived and/or modified sequence
MAHYITFLCMVLVLLLQNSVLAEDGEVRSSCRTAPTDLVFILDGSYSVGPENFEIVKKWLVNITKNFDIGPKFIQVGVVQYSDYPVLEIPLGSYDSGEHLTAAVESILYLGGNTKTGKAIQFALDYLFAKSSRFLTKIAVVLTDGKSQDDVKDAAQAARDSKITLFAIGVGSETEDAELRAIANKPSSTYVFYVEDYIAISKIREVMKQKLCEESVCPTRIPVAARDERGFDILLGLDVNKKVKKRIQLSPKKIKGYEVTSKVDLSELTSNVFPEGLPPSYVFVSTQRFKVKKIWDLWRILTIDGRPQIAVTLNGVDKILLFTTTSVINGSQVVTFANPQVKTLFDEGWHQIRLLVTEQDVTLYIDDQQIENKPLHPVLGILINGQTQIGKYSGKEETVQFDVQKLRIYCDPEQNNRETACEIPGFCLNGPSDVGSTPAPCICPPGKPGLQGPKGDPGLPGNPGYPGQPGQDGKPGYQGIAGTPGVPGSPGIQGARGLPGYKGEPGRDGDKGDRGLPGFPGLHGMPGSKGEMGAKGDKGSPGFYGKKGAKGEKGNAGFPGLPGPAGEPGRHGKDGLMGSPGFKGEAGSPGAPGQDGTRGEPGIPGFPGNRGLMGQKGEIGPPGQQGKKGAPGMPGLMGSNGSPGQPGTPGSKGSKGEPGIQGMPGASGLKGEPGATGSPGEPGYMGLPGIQGKKGDKGNQGEKGIQGQKGENGRQGIPGQQGIQGHHGAKGERGEKGEPGVRGAIGSKGESGVDGLMGPAGPKGQPGDPGPQGPPGLDGKPGREFSEQFIRQVCTDVIRAQLPVLLQSGRIRNCDHCLSQHGSPGIPGPPGPIGPEGPRGLPGLPGRDGVPGLVGVPGRPGVRGLKGLPGRNGEKGSQGFGYPGEQGPPGPPGPEGPPGISKEGPPGDPGLPGKDGDHGKPGIQGQPGPPGICDPSLCFSVIARRDPFRKGPNY

SEQ ID NO: 220408 - protein, 136 aa, Artificial Sequence
  derived and/or modified sequence
MAHYITFLCMVLVLLLQNSVLAEDGEVRSSCRTAPTDLVFILDGSYSVGPENFEIVKKWLVNITKNFDIGPKFIQVGVVQYSDYPVLEIPLGSYDSGEHLTAAVESILYLGGNTKTGKAIQFALDYLFAKSSRFLT

SEQ ID NO: 220409 - protein, 957 aa, Artificial Sequence
  derived and/or modified sequence
MAHYITFLCMVLVLLLQNSVLAEDGEVRSSCRTAPTDLVFILDGSYSVGPENFEIVKKWLVNITKNFDIGPKFIQVGVVQYSDYPVLEIPLGSYDSGEHLTAAVESILYLGGNTKTGKAIQFALDYLFAKSSRFLTKIAVVLTDGKSQDDVKDAAQAARDSKITLFAIGVGSETEDAELRAIANKPSSTYVFYVEDYIAISKIREVMKQKLCEESVCPTRIPVAARDERGFDILLGLDVNKKVKKRIQLSPKKIKGYEVTSKVDLSELTSNVFPEGLPPSYVFVSTQRFKVKKIWDLWRILTIDGRPQIAVTLNGVDKILLFTTTSVINGSQVVTFANPQVKTLFDEGWHQIRLLVTEQDVTLYIDDQQIENKPLHPVLGILINGQTQIGKYSGKEETVQFDVQKLRIYCDPEQNNRETACEIPGFVMECLNGPSDVGSTPAPCICPPGKPGLQGPKGDPGLPGNPGYPGQPGQDGKPGYQGIAGTPGVPGSPGIQGARGLPGYKGEPGRDGDKGDRGLPGFPGLHGMPGSKGEMGAKGDKGSPGFYGKKGAKGEKGNAGFPGLPGPAGEPGRHGKDGLMGSPGFKGEAGSPGAPGQDGTRGEPGIPGFPGNRGLMGQKGEIGPPGQQGKKGAPGMPGLMGSNGSPGQPGTPGSKGSKGEPGIQGMPGASGLKGEPGATGSPGEPGYMGLPGIQGKKGDKGNQGEKGIQGQKGENGRQGIPGQQGIQGHHGAKGERGEKGEPGVRGAIGSKGESGVDGLMGPAGPKGQPGDPGPQGPPGLDGKPGREFSEQFIRQVCTDVIRAQLPVLLQSGRIRNCDHCLSQHGSPGIPGPPGPIGPEGPRGLPGLPGRDGVPGLVGVPGRPGVRGLKGLPGRNGEKGSQGFGYPGEQGPPGPPGPEGPPGISKEGPPGDPGLPGKDGDHGKPGIQGQPGPPGICDPSLCFSVIARRDPFRKGPNY

SEQ ID NO: 220410 - DNA, 2874 bp, Artificial Sequence
  derived and/or modified sequence
atggcccactacatcaccttcctgtgcatggtgctggtgctgctgctgcagaacagcgtgctggccgaggacggcgaggtgagaagcagctgcagaaccgcccccaccgacctggtgttcatcctggacggcagctacagcgtgggccccgagaacttcgagatcgtgaagaagtggctggtgaacatcaccaagaacttcgacatcggccccaagttcatccaggtgggcgtggtgcagtacagcgactaccccgtgctggagatccccctgggcagctacgacagcggcgagcacctgaccgccgccgtggagagcatcctgtacctgggcggcaacaccaagaccggcaaggccatccagttcgccctggactacctgttcgccaagagcagcagattcctgaccaagatcgccgtggtgctgaccgacggcaagagccaggacgacgtgaaggacgccgcccaggccgccagagacagcaagatcaccctgttcgccatcggcgtgggcagcgagaccgaggacgccgagctgagagccatcgccaacaagcccagcagcacctacgtgttctacgtggaggactacatcgccatcagcaagatcagagaggtgatgaagcagaagctgtgcgaggagagcgtgtgccccaccagaatccccgtggccgccagagacgagagaggcttcgacatcctgctgggcctggacgtgaacaagaaggtgaagaagagaatccagctgagccccaagaagatcaagggctacgaggtgaccagcaaggtggacctgagcgagctgaccagcaacgtgttccccgagggcctgccccccagctacgtgttcgtgagcacccagagattcaaggtgaagaagatctgggacctgtggagaatcctgaccatcgacggcagaccccagatcgccgtgaccctgaacggcgtggacaagatcctgctgttcaccaccaccagcgtgatcaacggcagccaggtggtgaccttcgccaacccccaggtgaagaccctgttcgacgagggctggcaccagatcagactgctggtgaccgagcaggacgtgaccctgtacatcgacgaccagcagatcgagaacaagcccctgcaccccgtgctgggcatcctgatcaacggccagacccagatcggcaagtacagcggcaaggaggagaccgtgcagttcgacgtgcagaagctgagaatctactgcgaccccgagcagaacaacagagagaccgcctgcgagatccccggcttcaacggcgagtgcctgaacggccccagcgacgtgggcagcacccccgccccctgcatctgcccccccggcaagcccggcctgcagggccccaagggcgaccccggcctgcccggcaaccccggctaccccggccagcccggccaggacggcaagcccggctaccagggcatcgccggcacccccggcgtgcccggcagccccggcatccagggcgccagaggcctgcccggctacaagggcgagcccggcagagacggcgacaagggcgacagaggcctgcccggcttccccggcctgcacggcatgcccggcagcaagggcgagatgggcgccaagggcgacaagggcagccccggcttctacggcaagaagggcgccaagggcgagaagggcaacgccggcttccccggcctgcccggccccgccggcgagcccggcagacacggcaaggacggcctgatgggcagccccggcttcaagggcgaggccggcagccccggcgcccccggccaggacggcaccagaggcgagcccggcatccccggcttccccggcaacagaggcctgatgggccagaagggcgagatcggcccccccggccagcagggcaagaagggcgcccccggcatgcccggcctgatgggcagcaacggcagccccggccagcccggcacccccggcagcaagggcagcaagggcgagcccggcatccagggcatgcccggcgccagcggcctgaagggcgagcccggcgccaccggcagccccggcgagcccggctacatgggcctgcccggcatccagggcaagaagggcgacaagggcaaccagggcgagaagggcatccagggccagaagggcgagaacggcagacagggcatccccggccagcagggcatccagggccaccacggcgccaagggcgagagaggcgagaagggcgagcccggcgtgagaggcgccatcggcagcaagggcgagagcggcgtggacggcctgatgggccccgccggccccaagggccagcccggcgaccccggcccccagggcccccccggcctggacggcaagcccggcagagagttcagcgagcagttcatcagacaggtgtgcaccgacgtgatcagagcccagctgcccgtgctgctgcagagcggcagaatcagaaactgcgaccactgcctgagccagcacggcagccccggcatccccggcccccccggccccatcggccccgagggccccagaggcctgcccggcctgcccggcagagacggcgtgcccggcctggtgggcgtgcccggcagacccggcgtgagaggcctgaagggcctgcccggcagaaacggcgagaagggcagccagggcttcggctaccccggcgagcagggcccccccggcccccccggccccgagggcccccccggcatcagcaaggagggcccccccggcgaccccggcctgcccggcaaggacggcgaccacggcaagcccggcatccagggccagcccggcccccccggcatctgcgaccccagcctgtgcttcagcgtgatcgccagaagagaccccttcagaaagggccccaactactag

SEQ ID NO: 220411 - DNA, 2865 bp, Artificial Sequence
  derived and/or modified sequence
atggcccactacatcaccttcctgtgcatggtgctggtgctgctgctgcagaacagcgtgctggccgaggacggcgaggtgagaagcagctgcagaaccgcccccaccgacctggtgttcatcctggacggcagctacagcgtgggccccgagaacttcgagatcgtgaagaagtggctggtgaacatcaccaagaacttcgacatcggccccaagttcatccaggtgggcgtggtgcagtacagcgactaccccgtgctggagatccccctgggcagctacgacagcggcgagcacctgaccgccgccgtggagagcatcctgtacctgggcggcaacaccaagaccggcaaggccatccagttcgccctggactacctgttcgccaagagcagcagattcctgaccaagatcgccgtggtgctgaccgacggcaagagccaggacgacgtgaaggacgccgcccaggccgccagagacagcaagatcaccctgttcgccatcggcgtgggcagcgagaccgaggacgccgagctgagagccatcgccaacaagcccagcagcacctacgtgttctacgtggaggactacatcgccatcagcaagatcagagaggtgatgaagcagaagctgtgcgaggagagcgtgtgccccaccagaatccccgtggccgccagagacgagagaggcttcgacatcctgctgggcctggacgtgaacaagaaggtgaagaagagaatccagctgagccccaagaagatcaagggctacgaggtgaccagcaaggtggacctgagcgagctgaccagcaacgtgttccccgagggcctgccccccagctacgtgttcgtgagcacccagagattcaaggtgaagaagatctgggacctgtggagaatcctgaccatcgacggcagaccccagatcgccgtgaccctgaacggcgtggacaagatcctgctgttcaccaccaccagcgtgatcaacggcagccaggtggtgaccttcgccaacccccaggtgaagaccctgttcgacgagggctggcaccagatcagactgctggtgaccgagcaggacgtgaccctgtacatcgacgaccagcagatcgagaacaagcccctgcaccccgtgctgggcatcctgatcaacggccagacccagatcggcaagtacagcggcaaggaggagaccgtgcagttcgacgtgcagaagctgagaatctactgcgaccccgagcagaacaacagagagaccgcctgcgagatccccggcttctgcctgaacggccccagcgacgtgggcagcacccccgccccctgcatctgcccccccggcaagcccggcctgcagggccccaagggcgaccccggcctgcccggcaaccccggctaccccggccagcccggccaggacggcaagcccggctaccagggcatcgccggcacccccggcgtgcccggcagccccggcatccagggcgccagaggcctgcccggctacaagggcgagcccggcagagacggcgacaagggcgacagaggcctgcccggcttccccggcctgcacggcatgcccggcagcaagggcgagatgggcgccaagggcgacaagggcagccccggcttctacggcaagaagggcgccaagggcgagaagggcaacgccggcttccccggcctgcccggccccgccggcgagcccggcagacacggcaaggacggcctgatgggcagccccggcttcaagggcgaggccggcagccccggcgcccccggccaggacggcaccagaggcgagcccggcatccccggcttccccggcaacagaggcctgatgggccagaagggcgagatcggcccccccggccagcagggcaagaagggcgcccccggcatgcccggcctgatgggcagcaacggcagccccggccagcccggcacccccggcagcaagggcagcaagggcgagcccggcatccagggcatgcccggcgccagcggcctgaagggcgagcccggcgccaccggcagccccggcgagcccggctacatgggcctgcccggcatccagggcaagaagggcgacaagggcaaccagggcgagaagggcatccagggccagaagggcgagaacggcagacagggcatccccggccagcagggcatccagggccaccacggcgccaagggcgagagaggcgagaagggcgagcccggcgtgagaggcgccatcggcagcaagggcgagagcggcgtggacggcctgatgggccccgccggccccaagggccagcccggcgaccccggcccccagggcccccccggcctggacggcaagcccggcagagagttcagcgagcagttcatcagacaggtgtgcaccgacgtgatcagagcccagctgcccgtgctgctgcagagcggcagaatcagaaactgcgaccactgcctgagccagcacggcagccccggcatccccggcccccccggccccatcggccccgagggccccagaggcctgcccggcctgcccggcagagacggcgtgcccggcctggtgggcgtgcccggcagacccggcgtgagaggcctgaagggcctgcccggcagaaacggcgagaagggcagccagggcttcggctaccccggcgagcagggcccccccggcccccccggccccgagggcccccccggcatcagcaaggagggcccccccggcgaccccggcctgcccggcaaggacggcgaccacggcaagcccggcatccagggccagcccggcccccccggcatctgcgaccccagcctgtgcttcagcgtgatcgccagaagagaccccttcagaaagggccccaactactag

SEQ ID NO: 220412 - DNA, 2874 bp, Artificial Sequence
  derived and/or modified sequence
atggcccactacatcaccttcctgtgcatggtgctggtgctgctgctgcagaacagcgtgctggccgaggacggcgaggtgagaagcagctgcagaaccgcccccaccgacctggtgttcatcctggacggcagctacagcgtgggccccgagaacttcgagatcgtgaagaagtggctggtgaacatcaccaagaacttcgacatcggccccaagttcatccaggtgggcgtggtgcagtacagcgactaccccgtgctggagatccccctgggcagctacgacagcggcgagcacctgaccgccgccgtggagagcatcctgtacctgggcggcaacaccaagaccggcaaggccatccagttcgccctggactacctgttcgccaagagcagcagattcctgaccaagatcgccgtggtgctgaccgacggcaagagccaggacgacgtgaaggacgccgcccaggccgccagagacagcaagatcaccctgttcgccatcggcgtgggcagcgagaccgaggacgccgagctgagagccatcgccaacaagcccagcagcacctacgtgttctacgtggaggactacatcgccatcagcaagatcagagaggtgatgaagcagaagctgtgcgaggagagcgtgtgccccaccagaatccccgtggccgccagagacgagagaggcttcgacatcctgctgggcctggacgtgaacaagaaggtgaagaagagaatccagctgagccccaagaagatcaagggctacgaggtgaccagcaaggtggacctgagcgagctgaccagcaacgtgttccccgagggcctgccccccagctacgtgttcgtgagcacccagagattcaaggtgaagaagatctgggacctgtggagaatcctgaccatcgacggcagaccccagatcgccgtgaccctgaacggcgtggacaagatcctgctgttcaccaccaccagcgtgatcaacggcagccaggtggtgaccttcgccaacccccaggtgaagaccctgttcgacgagggctggcaccagatcagactgctggtgaccgagcaggacgtgaccctgtacatcgacgaccagcagatcgagaacaagcccctgcaccccgtgctgggcatcctgatcaacggccagacccagatcggcaagtacagcggcaaggaggagaccgtgcagttcgacgtgcagaagctgagaatctactgcgaccccgagcagaacaacagagagaccgcctgcgagatccccggcttcgtgatggagtgcctgaacggccccagcgacgtgggcagcacccccgccccctgcatctgcccccccggcaagcccggcctgcagggccccaagggcgaccccggcctgcccggcaaccccggctaccccggccagcccggccaggacggcaagcccggctaccagggcatcgccggcacccccggcgtgcccggcagccccggcatccagggcgccagaggcctgcccggctacaagggcgagcccggcagagacggcgacaagggcgacagaggcctgcccggcttccccggcctgcacggcatgcccggcagcaagggcgagatgggcgccaagggcgacaagggcagccccggcttctacggcaagaagggcgccaagggcgagaagggcaacgccggcttccccggcctgcccggccccgccggcgagcccggcagacacggcaaggacggcctgatgggcagccccggcttcaagggcgaggccggcagccccggcgcccccggccaggacggcaccagaggcgagcccggcatccccggcttccccggcaacagaggcctgatgggccagaagggcgagatcggcccccccggccagcagggcaagaagggcgcccccggcatgcccggcctgatgggcagcaacggcagccccggccagcccggcacccccggcagcaagggcagcaagggcgagcccggcatccagggcatgcccggcgccagcggcctgaagggcgagcccggcgccaccggcagccccggcgagcccggctacatgggcctgcccggcatccagggcaagaagggcgacaagggcaaccagggcgagaagggcatccagggccagaagggcgagaacggcagacagggcatccccggccagcagggcatccagggccaccacggcgccaagggcgagagaggcgagaagggcgagcccggcgtgagaggcgccatcggcagcaagggcgagagcggcgtggacggcctgatgggccccgccggccccaagggccagcccggcgaccccggcccccagggcccccccggcctggacggcaagcccggcagagagttcagcgagcagttcatcagacaggtgtgcaccgacgtgatcagagcccagctgcccgtgctgctgcagagcggcagaatcagaaactgcgaccactgcctgagccagcacggcagccccggcatccccggcccccccggccccatcggccccgagggccccagaggcctgcccggcctgcccggcagagacggcgtgcccggcctggtgggcgtgcccggcagacccggcgtgagaggcctgaagggcctgcccggcagaaacggcgagaagggcagccagggcttcggctaccccggcgagcagggcccccccggcccccccggccccgagggcccccccggcatcagcaaggagggcccccccggcgaccccggcctgcccggcaaggacggcgaccacggcaagcccggcatccagggccagcccggcccccccggcatctgcgaccccagcctgtgcttcagcgtgatcgccagaagagaccccttcagaaagggccccaactactag

SEQ ID NO: 220413 - DNA, 2874 bp, Artificial Sequence
  derived and/or modified sequence
atggctcactacattacattcctgtgtatggtgctggtattactattacagaactcggtgctggcagaggacggagaagttagatctagttgcaggaccgcacccaccgacctggtcttcattctcgatggctcttactcggtgggacctgaaaacttcgagattgtaaagaaatggctcgtcaatatcacaaagaatttcgacatcgggcctaagttcatccaagttggagtagtgcagtattccgactaccccgtgttggagatccccttagggagctatgatagtggcgagcacctgaccgcggccgtggagtcgatcctgtatctcggggggaataccaaaactggcaaggccatccagttcgccctagactacctgtttgccaagtcttcgcgctttctgacaaagatagccgtcgtattgaccgacggaaagtctcaggacgatgttaaggacgccgcacaggccgcacgagacagcaagattaccctgttcgcaatcggagtcggaagcgagactgaagacgcagaattacgagctatagccaataaaccatcttctacctacgtgttctacgtggaggactatatagctatcagcaagatccgcgaggtgatgaagcaaaagctttgtgaagagtcagtgtgcccaactagaattcccgtcgcagcacgggatgagagaggattcgacatcttgctgggactcgacgttaataaaaaggtgaagaagcgcatccaactttcgcccaagaagatcaagggctacgaggtgacgtccaaagtcgacctatccgaactgaccagcaatgtgtttcccgaggggttaccccccagctatgttttcgtgtcaacacaaaggttcaaggtaaaaaagatttgggacctttggcgaatactgacgattgatggccgcccacagatcgctgtaacactgaacggcgtagataagattctgctgtttaccaccacttccgttatcaatggctctcaggtggtgactttcgctaacccccaagtcaaaacactgttcgatgagggatggcaccaaatacgcctcctggtgacagaacaggacgttacattgtacattgacgaccagcaaatcgagaataaaccactgcatcctgtgctgggcatcttgattaacggacaaactcagattggcaaatattcagggaaggaggagaccgtgcagtttgacgtgcagaaactgcgaatctattgcgatcccgaacagaacaatagggagaccgcctgtgagatccctggatttaacggagaatgcttgaatggaccaagcgacgtcggctctacacctgcaccttgtatatgcccacccggtaagcccggcctccagggtcccaagggagatcctggattgcctgggaatccaggctaccctgggcagccaggacaggatggaaaaccgggctaccagggcatagctggcaccccaggggtccccggcagccccggaatacaaggtgcgaggggtctgcccgggtataagggcgagcctggccgggatggtgacaaaggcgataggggcctcccggggtttcctggactgcatgggatgcccggtagcaaaggtgaaatgggagcaaaaggggataaaggcagtccgggcttttatggaaagaaaggggccaagggggagaagggcaacgctgggttcccaggacttccagggcctgcgggtgagcctggtaggcacggtaaagatggtctgatggggtcccccggctttaaaggcgaggcaggaagccccggcgcgcctggccaagacgggacccgaggagaacctggaattcctggctttcctggtaatcgcgggctgatggggcagaagggggaaatcggacctcccggccagcaggggaagaagggagcacccggaatgcccggcctgatgggatctaacggcagccctggccagccaggcacacccggtagtaagggatccaagggggagccgggcatacagggaatgcccggcgcatctggtctgaaaggagaaccaggtgctacggggtcccctggagaacctgggtacatgggtctgcctgggatccagggtaaaaagggggataaggggaatcaaggcgagaagggcattcagggacagaagggcgaaaatggacggcaaggaattccaggacagcagggtatccagggtcaccacggggctaaaggggagagaggcgaaaagggggagcctggtgtgcggggggctatcggttccaaaggggagagcggggttgatggcctcatgggacccgccggtcccaaaggacaacccggggatcccggtccacaggggccacctggcctagacgggaagccaggacgggaattcagtgaacagttcatacgccaggtatgtacagatgtgattagggcccaattacccgttctcctgcaatctggcagaatccgtaattgtgatcactgcttgtcccagcacggatctcctggaattcctggtccacctggtcccattggtcctgagggcccacgggggttgccggggctgcctggacgtgatggggtgcccggtttggtgggcgtgcctgggaggcctggagtccggggcctgaagggactacccggaaggaacggggaaaaaggctcccaggggtttggttatcccggtgagcaggggcccccaggaccgcccgggcctgagggaccccctgggatctctaaggaaggaccgccaggcgacccaggcttacccggcaaagacggtgaccatggcaaaccgggcatccagggccagccaggcccgcctggaatatgcgacccatctctgtgcttctccgtcatcgctagacgcgaccctttcagaaagggccctaattattag

SEQ ID NO: 220414 - DNA, 2865 bp, Artificial Sequence
  derived and/or modified sequence
atggcgcactacatcaccttcctgtgtatggtgctggtgctccttctgcaaaacagcgtattggcagaggatggggaagtgagatctagttgtcggactgcacccactgatctcgtcttcatccttgatggtagctactccgtgggcccagaaaactttgagatcgtgaaaaaatggctggttaatatcaccaagaacttcgacataggaccgaagttcatccaggtgggcgtggtacagtactcggactaccctgtcctcgagataccactcgggtcatacgacagcggtgaacacctgaccgccgccgttgaatccatcttgtacctgggcggaaacaccaagactggcaaagcaatccagttcgccttggactatctattcgccaagagcagcagattcctaaccaagattgccgtggtgttaacagatggaaaatctcaagacgacgtgaaggacgccgcacaggctgcaagagatagcaagatcacattattcgcgatcggcgttggaagcgagacagaagacgcagagctacgtgcaattgcgaacaaaccatctagtacatacgtattctatgtggaggattacatcgccatatcgaaaatacgcgaggtcatgaagcagaagctttgcgaggagtccgtctgcccaacgcgcatccccgttgcagctcgtgatgagcgaggcttcgatattctcctcggcctcgacgtgaataaaaaggtgaagaagcgaattcagctgagtccaaaaaagattaaaggttatgaagtcacatccaaagtagacctttcagagctaacaagtaacgtgtttccggagggcctgcctcccagttatgttttcgttagcactcaacggtttaaagtgaagaagatctgggacctgtggcgcatactgaccattgatggccgcccccagattgccgttactctgaacggcgttgacaaaattctgctgtttaccactactagcgttattaatggatctcaggtggtcaccttcgccaacccacaagtgaagactttattcgacgagggctggcatcagatccgtctgctagtcaccgaacaggatgtgactctttacatagacgatcaacagatcgaaaacaaacctctgcatcccgtgttgggcattttgattaatggccagacccaaatcgggaaatactccggtaaggaggaaacagtgcagttcgacgtgcagaaacttagaatttactgcgaccccgaacaaaacaaccgggaaaccgcgtgcgaaatcccagggttctgcctgaacggtccatctgatgtgggaagcacacctgctccatgcatttgtccccccggaaagcctggtctgcaggggccaaaaggcgaccccggcctgccaggcaaccctggatacccaggacagccaggtcaggacggcaaaccgggataccagggcatagcaggtacaccaggcgtgcctggctccccaggcatccagggcgccaggggtctgcctggatacaaaggtgagccggggcgcgatggtgacaagggagacaggggcctcccaggctttccgggtctgcatggtatgccggggtctaagggcgagatgggcgccaaaggcgataaaggttctccagggttttacggaaaaaagggtgccaaaggcgaaaaagggaacgctggctttccaggtctgcccggccctgccggcgaaccaggccggcacggaaaggacggcctgatggggtcccctggattcaaaggggaggcaggctcacccggagcccctggacaggatggtactaggggagagcccggtattccaggcttcccgggcaatcggggccttatggggcagaagggagaaatcggtccacctgggcaacagggcaaaaagggagcaccggggatgcccgggctgatgggaagtaacggcagtcctgggcagcccggaactcccggcagcaagggttctaaaggcgaacctggtattcagggaatgccaggcgcgagcggcctgaaaggagagccaggagcgacagggagcccaggtgagcccgggtatatgggactcccaggaattcagggcaagaaaggcgataaaggaaaccaaggcgaaaagggcatccaaggacaaaagggggagaacggtaggcaaggcatccctggtcagcaagggatccagggccaccatggagcgaagggcgagcgcggagagaaaggggaacctggcgtccgaggggccatcggttccaagggcgaaagcggcgttgatggacttatggggcccgctggcccgaaagggcaacccggagaccccggtccacagggtcccccaggactggacggcaaacccggacgagaattctccgagcagttcattcgccaagtgtgtactgatgtgattagggcccagctgcctgttctgctgcagagcggcaggatcaggaattgcgaccattgtttatcccaacatggcagccctggaattccggggccgcctggacctatcggacccgaaggacccaggggtctgcccggcctccctgggagggacggagtgcctggcctcgtgggagtgccaggacggcctggcgtgagggggcttaagggactgcccggaagaaacggtgaaaagggatctcagggattcgggtaccccggagaacaaggtcccccgggtccccctggcccagaaggacctccaggcataagcaaggagggtccacctggggacccaggactccctggaaaggatggagaccacggcaagcctggaatacagggccaacccggaccccccggaatttgcgatccatctctgtgcttctccgtaatagcgcgaagggaccccttccgcaagggccccaattactag

SEQ ID NO: 220415 - DNA, 2865 bp, Artificial Sequence
  derived and/or modified sequence
atggctcactatataacatttctgtgcatggtgttagtgctactgctgcagaactcggtcttagctgaggacggcgaagtgagatcctcttgccgcaccgccccaacggacctggtcttcattttagatggttcttactccgtgggcccagaaaacttcgaaattgttaagaagtggctggtgaatatcacaaagaactttgacattggtccgaagttcattcaggttggcgtggtgcagtattccgactacccagttctggaaattccactggggagctacgatagcggagagcacttgactgccgccgttgaaagcatcttgtaccttggtgggaacacaaagaccggcaaagccattcagttcgccctcgactacctattcgccaagagcagtaggtttcttacaaagatcgcagttgtgctgacagacggcaaatctcaggatgacgtgaaagacgccgctcaggctgccagggactcaaagattacactgttcgctatcggcgtgggaagcgaaactgaggatgctgaacttcgagcgattgcaaataagccatcatcgacatacgtgttctacgtcgaagactatatcgctatttcaaagattagggaagttatgaaacagaaactgtgcgaagagtcagtttgccctacgagaatccctgtggcagcccgggacgagaggggattcgacattttgctgggtctggatgtaaacaaaaaagttaagaaacggatccagctgagcccaaagaagatcaaaggatacgaagtcacatccaaagtggacctctccgagttgacttctaatgtcttccctgaaggtttaccccctagctacgtgttcgtctctacccagaggttcaaggtaaaaaagatttgggatctttggcgaatcctcactatcgacggacgtccccagattgcagtgaccttgaatggcgtggacaagattcttcttttcacaaccacctccgtgattaacggttcccaggttgtgaccttcgccaacccccaagtgaaaacactgttcgatgagggatggcaccagattcgcctgctagtgaccgagcaggatgtcactctctacatcgatgaccagcagatagaaaacaagccgctccacccagtgctaggcatactaattaacggccagacgcaaatcggtaagtactctggcaaggaggaaaccgtgcagttcgatgtacagaaacttagaatctactgtgaccccgagcagaataaccgagagaccgcatgtgagatcccaggattctgcctaaatggcccctccgatgtaggttcaaccccagccccctgcatatgcccacctggaaagcctggcctccaaggacccaaaggcgatcctgggctgcccgggaatcctggatacccaggacaacctggtcaggatggtaaaccaggctatcagggcatcgctggcacgcccggcgtgccaggaagtcccgggatccagggcgcccgcggactcccgggatataagggggagcctggcagagacggcgacaagggagacagggggctgcccggctttcctggtctgcacggtatgccaggaagcaagggagaaatgggggcgaagggtgacaaaggcagccccggattttatggcaagaaaggggccaagggggaaaaggggaatgccggcttcccaggcctacccgggccggcgggggaacctggcaggcacggaaaagatggtctgatgggcagtccggggttcaagggcgaggctggcagcccaggggcccccgggcaggacggaactagaggcgagcctgggatcccaggtttcccaggcaatagggggcttatgggccagaaaggggagattggccctccgggccagcagggaaaaaagggcgccccgggaatgccaggtttgatgggttcgaatggatcccctgggcagcccggaacacccggcagcaaagggtccaaaggggagccagggattcaaggcatgccaggtgctagcgggttgaaaggtgaaccaggagctacagggagcccaggggaacccggatacatgggtctccccgggattcagggtaagaagggggataagggcaatcagggggaaaaagggatccagggtcagaaaggcgagaacggtaggcagggcatccccggccaacagggtatacagggacatcatggcgcgaagggggagcgcggggagaagggggaacccggtgtgagaggcgctatcgggtccaagggcgaaagcggggttgacggactgatggggccggccggacccaagggtcaacctggggacccaggcccccaggggccgcctggcctcgacggaaagccaggccgcgaattctcggaacagtttataaggcaagtgtgcactgacgtgattagagcgcagcttcccgtgctgctccagtccgggcgcattagaaattgcgatcattgcctcagccagcatggcagtccagggatacccggaccacccggtcccatagggccagagggcccccggggcttacctgggctccccggccgtgacggcgtgccaggacttgtcggagtgcccggaaggccaggagtgcgcggtctgaagggccttcctggacggaatggcgagaaaggatcacaggggttcggctacccgggggaacagggaccacccggtccccccggcccagaagggccacctgggattagcaaagaaggtccacccggtgatccaggattgcctggcaaggatggcgatcacggaaagcctgggattcagggtcagcccgggccacccggcatttgcgaccccagcctatgcttctccgtgatcgccaggagagacccattccgtaaggggccaaattattag

SEQ ID NO: 220416 - DNA, 2874 bp, Artificial Sequence
  derived and/or modified sequence
atggcacactacattaccttcttgtgtatggtgttggtactgctcctgcaaaacagtgttctggctgaggatggagaggtacgcagttcatgtaggacagctccaacagaccttgtgttcattctggatgggtcctactcagtcggtcccgaaaattttgagattgttaagaagtggttggtcaacatcacaaaaaacttcgatatcggccctaagttcatccaggttggagttgtgcagtactcagactaccccgtcctcgaaataccattaggatcatacgactccggagaacacctaacggcggccgtagagagtatcctatatctcggggggaacacgaagactgggaaggcaattcagtttgcactcgactacctattcgccaagagctcgagattcttgaccaaaattgcagtcgtcctcacagatggaaagtcacaggatgacgtgaaggatgctgcccaagctgctcgggatagcaagatcactctcttcgcgatcggggtcgggtcagagactgaggacgcagagctacgcgccatagccaacaagccgagctcaacttacgtgttctatgtcgaggattatattgccattagcaagattcgagaagtgatgaaacaaaagctgtgcgaagagtctgtgtgtccaacaagaattcctgtggccgctcgcgacgagaggggcttcgatatacttctcggcttagacgtgaataaaaaagtgaaaaaacgcattcaactctcacctaaaaagattaaaggctacgaagttacgagcaaggttgacctttccgagctgacatctaacgtatttcccgagggcctccctccaagttacgtgtttgtgtctacacagaggttcaaggtgaaaaagatatgggacctatggcgtatacttaccatcgacggccgcccgcagatcgccgtgaccttgaatggcgtggacaagatccttctgttcactaccacttctgttataaacggttctcaggtcgtcacatttgccaatccacaggtcaagactctgtttgacgaaggatggcaccagatccggctgttggtaaccgaacaggacgtgaccttatacatcgatgatcagcagatagaaaacaagccgctacaccctgttctggggatcctaattaatgggcagacccaaatcgggaaatactcaggcaaagaagaaacagtccagtttgacgtacaaaagttacggatttactgtgacccagagcagaataaccgtgagactgcatgtgaaatccctggattcgtgatggaatgtctgaacgggccaagtgatgtcgggtcaactcccgccccctgcatctgcccacccggaaaaccgggactacagggacctaagggcgatcccggcttaccaggcaaccccggttatcctggccagcctgggcaggatggtaaaccagggtatcaaggtattgccggtacacccggagtgcctggctcacctggtatccaaggagcccgagggctgcctggttataagggcgagcccggcagagacggagataaaggagatagaggccttcccgggttccccggacttcatggcatgcccggctctaaaggtgaaatgggggcaaaaggcgacaaaggaagcccaggcttttatggcaagaaaggcgcaaaaggggaaaaaggtaatgccgggtttcctggcctgcctggtccagccggagagcctgggcggcacgggaaagacggccttatgggatctcctggatttaaaggtgaggccggcagtccaggcgcaccgggccaggacggaacacgcggggaaccaggcatccccggcttccccggaaatagagggctcatgggacagaaaggcgagatcgggccccctggacaacagggaaagaagggtgcacccggtatgccggggctgatgggtagtaatggctccccaggtcagcccggtacgcctgggagcaaaggaagtaaaggggagcccggcatccagggcatgcccggcgcctccggcctgaagggagagcctggagcaacaggaagcccaggggaacctgggtacatggggttgccaggcatccaagggaagaagggagacaaaggaaaccagggagaaaagggaatccagggccagaagggggaaaatggcaggcagggcatccctggtcagcagggcatacaaggacaccatggcgctaaaggagagcggggtgaaaagggagagcctggagttagaggtgcaatcggctctaaaggcgagtcaggggtggatggtctgatgggtcccgcaggccccaaggggcagcccggtgaccctggccctcaagggcctcccggactcgatggtaagcccggcagagagttcagtgagcagtttatccggcaggtgtgtaccgatgttatccgcgcccagctgcctgtcctcttgcagtccggtagaattcgtaattgcgaccactgcctcagtcagcatggctcccctgggatacccggccccccaggccccatcggacccgaagggccgcggggcctgcccgggctgccaggaagggatggagtgcccgggctggtgggggtaccaggccggcctggcgtcaggggccttaaaggcctgcccggaaggaatggggaaaaaggatcgcaggggttcgggtacccaggggaacagggcccccccgggcctcccggtcctgaaggccctcccggaatctctaaagagggccctccaggcgacccggggctgccagggaaagacggtgaccatggtaaaccaggaatacaggggcaacccggcccaccaggcatctgtgatccctccctgtgcttttccgtgatcgctagacgcgacccatttcggaaaggccccaattattag

SEQ ID NO: 220417 - DNA, 2874 bp, Artificial Sequence
  derived and/or modified sequence
atggcccactacatcaccttcctgtgcatggtgctggtgctgctgctgcagaacagcgtgctggctgaagatggagaggtgcgcagcagctgcaggacagcccccacagacctggtgttcatcctggatggcagctacagcgtgggcccagaaaattttgaaattgtgaagaagtggctggtgaacatcaccaagaactttgatattggccccaagttcatccaggtgggcgtggtgcagtacagcgactaccctgtgctggagatccccctgggcagctatgacagcggggagcacctgacagctgctgtggagagcatcctgtacctgggcggcaacaccaagacaggcaaggccatccagtttgccctggactacctgtttgccaagagcagccgcttcctgaccaagattgctgtggtgctgacagatggcaagagccaggatgatgtgaaggatgctgcccaggccgcccgggacagcaagatcaccctgtttgccatcggcgtgggcagcgagacagaagatgctgagctgcgggccatcgccaacaagcccagcagcacctacgtgttctacgtggaggactacatcgccatcagcaagatccgggaggtgatgaagcagaagctgtgtgaggagagcgtgtgccccacccgcatccctgtggccgccagagatgagcggggctttgacatcctgctgggcctggatgtgaacaagaaggtgaagaagaggatccagctgagccccaagaagatcaagggctatgaggtgaccagcaaggtggacctgtctgagctgaccagcaatgtgtttcctgagggcctgccccccagctatgtgtttgtgtccacccagcgcttcaaggtgaagaagatctgggacctgtggaggatcctgaccattgatggccggccccagattgctgtgaccctgaatggagtggacaagatcctgctcttcaccaccaccagcgtcatcaatggcagccaggtggtgacctttgccaacccccaggtgaagaccctgtttgatgagggctggcaccagatccggctgctggtgacagagcaggatgtgaccctgtacattgatgaccagcagatcgagaacaagcccctgcaccctgtgctgggcatcctgatcaatggccagacccagatcggcaagtacagcggcaaggaggagaccgtgcagtttgatgtgcagaagctgcgcatctactgtgaccctgagcagaacaaccgggagacagcctgtgagatccctggcttcaatggagaatgtctgaatggccccagtgatgtgggcagcaccccagccccctgcatctgccccccaggcaagccaggcctgcagggccccaagggggaccccggcctgcccggcaaccctggctacccaggccagcccggccaggacggcaagccaggctaccagggcattgctggcaccccaggagtgcccggcagccctggcatccagggcgcccggggcctgcccggctacaagggggagcccggcagagatggagacaagggggaccggggcctgcccggcttccctggcctgcacggcatgcctggcagcaagggggagatgggcgccaagggggacaagggcagccctggcttctacggcaagaagggggccaagggggagaagggaaatgccggcttccctggcctgcccggccctgctggggagcccggccgccacggcaaggatggcctgatgggcagccctggcttcaagggggaggccggcagccctggggcccctggccaggacggcaccagaggagagcccggcatccctggcttccctggcaacagaggcctgatgggccagaagggggagatcggccccccaggccagcagggcaagaagggggcccctggcatgcctggcctgatgggcagcaatggcagccctggccagcccggcaccccaggcagcaagggcagcaagggggagcccggcatccagggcatgcctggggccagcggcctgaagggggagcccggggccaccggcagccctggagagcccggctacatgggcctgcccggcatccagggcaagaagggggacaagggcaaccagggcgagaagggcatccagggccagaagggggagaatggccggcagggcatccctggccagcagggcatccagggccaccacggggccaagggggagcggggggagaagggggagcccggggtgcggggggccatcggcagcaaaggagagagcggcgtggatggcctgatgggccctgctggccccaagggccagcccggggaccccggcccccagggccccccaggcctggatggcaagccaggccgggagttcagcgagcagttcatccggcaggtgtgcacagatgtgatccgggcccagctgcctgtgctgctgcagagcggccgcatccggaactgtgaccactgcctgagccagcacggcagccctggcatccctggccccccaggccccatcggccctgagggcccccggggcctgcccggcctgcccggcagagatggagtgcccggcctggtgggcgtgcccggccggcctggggtgcggggcctgaagggcctgcccggcagaaatggagagaagggcagccagggcttcggctacccaggagagcagggccccccaggccccccaggccctgagggccccccaggcatcagcaaggagggccccccaggggaccccggcctgcccgggaaggatggagaccacggcaagccaggcatccagggccagcccggccccccaggcatctgtgaccccagcctgtgcttctctgtgattgcccggcgggaccccttcaggaagggccccaactactag

SEQ ID NO: 220418 - DNA, 2865 bp, Artificial Sequence
  derived and/or modified sequence
atggcccactacatcaccttcctgtgcatggtgctggtgctgctgctgcagaacagcgtgctggctgaagatggagaggtgcgcagcagctgcaggacagcccccacagacctggtgttcatcctggatggcagctacagcgtgggcccagaaaattttgaaattgtgaagaagtggctggtgaacatcaccaagaactttgatattggccccaagttcatccaggtgggcgtggtgcagtacagcgactaccctgtgctggagatccccctgggcagctatgacagcggggagcacctgacagctgctgtggagagcatcctgtacctgggcggcaacaccaagacaggcaaggccatccagtttgccctggactacctgtttgccaagagcagccgcttcctgaccaagattgctgtggtgctgacagatggcaagagccaggatgatgtgaaggatgctgcccaggccgcccgggacagcaagatcaccctgtttgccatcggcgtgggcagcgagacagaagatgctgagctgcgggccatcgccaacaagcccagcagcacctacgtgttctacgtggaggactacatcgccatcagcaagatccgggaggtgatgaagcagaagctgtgtgaggagagcgtgtgccccacccgcatccctgtggccgccagagatgagcggggctttgacatcctgctgggcctggatgtgaacaagaaggtgaagaagaggatccagctgagccccaagaagatcaagggctatgaggtgaccagcaaggtggacctgtctgagctgaccagcaatgtgtttcctgagggcctgccccccagctatgtgtttgtgtccacccagcgcttcaaggtgaagaagatctgggacctgtggaggatcctgaccattgatggccggccccagattgctgtgaccctgaatggagtggacaagatcctgctcttcaccaccaccagcgtcatcaatggcagccaggtggtgacctttgccaacccccaggtgaagaccctgtttgatgagggctggcaccagatccggctgctggtgacagagcaggatgtgaccctgtacattgatgaccagcagatcgagaacaagcccctgcaccctgtgctgggcatcctgatcaatggccagacccagatcggcaagtacagcggcaaggaggagaccgtgcagtttgatgtgcagaagctgcgcatctactgtgaccctgagcagaacaaccgggagacagcctgtgagatccctggcttctgcctgaatggccccagtgatgtgggcagcaccccagccccctgcatctgccccccaggcaagccaggcctgcagggccccaagggggaccccggcctgcccggcaaccctggctacccaggccagcccggccaggacggcaagccaggctaccagggcattgctggcaccccaggagtgcccggcagccctggcatccagggcgcccggggcctgcccggctacaagggggagcccggcagagatggagacaagggggaccggggcctgcccggcttccctggcctgcacggcatgcctggcagcaaaggagagatgggcgccaagggggacaagggcagccctggcttctacggcaagaagggggccaagggggagaagggaaatgccggcttccctggcctgcccggccctgctggggagcccggcagacatggcaaggatggcctgatgggcagccctggcttcaagggggaggccggcagccctggggcccctggccaggacggcaccagaggagagcccggcatccctggcttccctggcaacagaggcctgatgggccagaagggggagatcggccccccaggccagcagggcaagaagggggcccctggcatgcctggcctgatgggcagcaatggcagccctggccagcccggcaccccaggcagcaagggcagcaaaggagagcccggcatccagggcatgcctggggccagcggcctgaagggggagcccggggccaccggcagccctggagagcccggctacatgggcctgcccggcatccagggcaagaagggggacaagggcaaccagggcgagaagggcatccagggccagaagggagaaaatggccggcagggcatccctggccagcagggcatccagggccaccacggggccaagggggagcggggggagaagggggagcccggggtgcggggggccatcggcagcaagggggagagcggcgtggatggcctgatgggccctgctggccccaagggccagcccggggaccccggcccccagggccccccaggcctggatggcaagccaggccgggagttcagcgagcagttcatccggcaggtgtgcacagatgtgatccgggcccagctgcctgtgctgctgcagagcggccgcatccggaactgtgaccactgcctgagccagcacggcagccctggcatccctggccccccaggccccatcggccctgagggcccccggggcctgcccggcctgcccggcagagatggagtgcccggcctggtgggcgtgcccggccggcctggggtgcggggcctgaagggcctgcctggaagaaatggagagaagggcagccagggcttcggctacccaggagagcagggccccccaggccccccaggccctgagggccccccaggcatcagcaaggagggccccccaggggaccccggcctgcccgggaaggatggagaccacggcaagccaggcatccagggccagcccggccccccaggcatctgtgaccccagcctgtgcttcagcgtcatcgcccggcgggaccccttcaggaagggccccaactactag

SEQ ID NO: 220419 - DNA, 2874 bp, Artificial Sequence
  derived and/or modified sequence
atggcccactacatcaccttcctgtgcatggtgctggtgctgctgctgcagaacagcgtgctggctgaagatggagaggtgcgcagcagctgcaggacagcccccacagacctggtgttcatcctggatggcagctacagcgtgggcccagaaaattttgaaattgtgaagaagtggctggtgaacatcaccaagaactttgatattggccccaagttcatccaggtgggcgtggtgcagtacagcgactaccctgtgctggagatccccctgggcagctatgacagcggggagcacctgacagctgctgtggagagcatcctgtacctgggcggcaacaccaagacaggcaaggccatccagtttgccctggactacctgtttgccaagagcagccgcttcctgaccaagattgctgtggtgctgacagatggcaagagccaggatgatgtgaaggatgctgcccaggccgcccgggacagcaagatcaccctgtttgccatcggcgtgggcagcgagacagaagatgctgagctgcgggccatcgccaacaagcccagcagcacctacgtgttctacgtggaggactacatcgccatcagcaagatccgggaggtgatgaagcagaagctgtgtgaggagagcgtgtgccccacccgcatccctgtggccgccagagatgagcggggctttgacatcctgctgggcctggatgtgaacaagaaggtgaagaagaggatccagctgagccccaagaagatcaagggctatgaggtgaccagcaaggtggacctgtctgagctgaccagcaatgtgtttcctgagggcctgccccccagctatgtgtttgtgtccacccagcgcttcaaggtgaagaagatctgggacctgtggaggatcctgaccattgatggccggccccagattgctgtgaccctgaatggagtggacaagatcctgctcttcaccaccaccagcgtcatcaatggcagccaggtggtgacctttgccaacccccaggtgaagaccctgtttgatgagggctggcaccagatccggctgctggtgacagagcaggatgtgaccctgtacattgatgaccagcagatcgagaacaagcccctgcaccctgtgctgggcatcctgatcaatggccagacccagatcggcaagtacagcggcaaggaggagaccgtgcagtttgatgtgcagaagctgcgcatctactgtgaccctgagcagaacaaccgggagacagcctgtgagatccctggctttgtgatggagtgcctgaatggccccagtgatgtgggcagcaccccagccccctgcatctgccccccaggcaagccaggcctgcagggccccaagggggaccccggcctgcccggcaaccctggctacccaggccagcccggccaggacggcaagccaggctaccagggcattgctggcaccccaggagtgcccggcagccctggcatccagggcgcccggggcctgcccggctacaagggggagcccggcagagatggagacaagggggaccggggcctgcccggcttccctggcctgcacggcatgcctggcagcaagggggagatgggcgccaagggggacaagggcagccctggcttctacggcaagaagggggccaagggggagaagggaaatgccggcttccctggcctgcccggccctgctggggagcccggccgccacggcaaggatggcctgatgggcagccctggcttcaagggggaggccggcagccctggggcccctggccaggacggcaccagaggagagcccggcatccctggcttccctggcaacagaggcctgatgggccagaagggggagatcggccccccaggccagcagggcaagaagggggcccctggcatgcctggcctgatgggcagcaatggcagccctggccagcccggcaccccaggcagcaagggcagcaagggggagcccggcatccagggcatgcctggggccagcggcctgaagggggagcccggggccaccggcagccctggagagcccggctacatgggcctgcccggcatccagggcaagaagggggacaagggcaaccagggcgagaagggcatccagggccagaagggggagaatggccggcagggcatccctggccagcagggcatccagggccaccacggggccaagggggagcggggggagaagggggagcccggggtgcggggggccatcggcagcaaaggagagagcggcgtggatggcctgatgggccctgctggccccaagggccagcccggggaccccggcccccagggccccccaggcctggatggcaagccaggccgggagttcagcgagcagttcatccggcaggtgtgcacagatgtgatccgggcccagctgcctgtgctgctgcagagcggccgcatccggaactgtgaccactgcctgagccagcacggcagccctggcatccctggccccccaggccccatcggccctgagggcccccggggcctgcccggcctgcccggcagagatggagtgcccggcctggtgggcgtgcccggccggcctggggtgcggggcctgaagggcctgcccggcagaaatggagagaagggcagccagggcttcggctacccaggagagcagggccccccaggccccccaggccctgagggccccccaggcatcagcaaggagggccccccaggggaccccggcctgcccgggaaggatggagaccacggcaagccaggcatccagggccagcccggccccccaggcatctgtgaccccagcctgtgcttctctgtgattgcccggcgggaccccttcaggaagggccccaactactag

SEQ ID NO: 220420 - DNA, 2874 bp, Artificial Sequence
  derived and/or modified sequence
atggcccactacatcaccttcctgtgcatggtgctggtgctgctgttacagaacagtgtactggcggaagacggagaagttaggtcatcttgcaggaccgcccccactgacctggtttttatattagatggaagctatagtgtaggcccagagaatttcgaaattgtgaagaaatggctggtcaatattaccaagaactttgacatcgggcctaaatttatccaggttggggtcgtgcagtattccgactacccagtgctggagatccccttagggtcatacgactccggtgaacatctcaccgctgccgttgaaagtatactgtatcttggaggcaacaccaagactggcaaagcaatccaatttgctttggattatttgtttgcaaaatcatcacggtttctgactaagattgccgtcgtgctcaccgatgggaaatctcaagacgatgtgaaagacgccgctcaagctgcccgagattccaagatcactctttttgccataggggtgggctctgaaactgaggatgccgaactacgtgccatcgctaacaagccctcctcaacctacgtgttttacgtggaagattacattgccatctccaaaattagagaggtaatgaagcaaaaactgtgtgaggagtctgtttgccccaccagaatcccggtggctgccagagacgagcgtggctttgatatcctgctggggctcgatgtgaataagaaagtgaagaagcggattcagctatcacctaaaaaaattaagggctacgaagtgaccagtaaggttgatctgagcgaacttaccagtaatgtattcccagagggactcccgcctagttatgtgtttgtgtccacacagagatttaaagtcaagaaaatttgggatttgtggcgaattctcacgatcgatgggcgccctcaaatagctgtgaccctgaacggtgtcgacaagatcttgctcttcacgactacttcagtcataaatgggtctcaggtggtgacattcgcaaatccgcaggtcaagacactattcgacgagggctggcaccagattcggctcctggtcaccgagcaggacgtgaccctgtacattgacgatcaacagattgagaacaaaccactgcatccagttctcggcatcttgattaatgggcagacgcaaattggaaagtattcgggcaaggaggagacagtacagtttgatgtgcagaagttaaggatctactgcgaccccgagcagaacaacagggaaacggcctgtgagattccaggattcaacggggagtgtctcaacggaccctcagatgtgggatcaacccctgccccttgcatttgtcccccaggcaaacctggtctccaagggcctaaaggcgatccaggactgcccggcaaccccgggtatcctggacagcccgggcaggacggcaaacccgggtatcaaggaatcgcaggaaccccaggagtgccaggttctcccggtatccagggcgccagaggtctgcctggctataagggggaaccagggcgcgacggtgacaagggagaccgcggactcccaggattcccaggtttacacggcatgcccggatccaagggagagatgggagctaagggggacaagggttcccccggcttctacggaaagaagggcgctaaaggcgaaaaagggaacgcaggattccctgggcttcccggtcccgctggagagccgggcagacacggcaaagatggacttatgggttctcccggcttcaagggtgaagcaggatcaccaggcgcccccggccaggatggtactaggggggagccagggattccaggctttcctggcaatagaggtcttatgggccagaagggcgagattgggcctccaggccaacagggcaagaagggagcccccggcatgcctgggctgatgggctccaatggttcccctgggcagcccgggaccccggggtctaaagggagtaagggagaacccggcatccaaggcatgccaggagcaagcggcctgaagggggagcccggcgcaacaggctccccaggggagcctggttatatgggactgccgggaatccagggtaagaaaggcgataagggaaatcagggggagaaggggattcagggccagaagggggagaacggcaggcaaggcatcccaggccaacaggggattcagggacaccacggagccaaaggtgagcgcggagagaagggcgaacccggggtccgaggtgctattgggagcaagggcgagtctggcgtcgatggccttatgggacccgcggggccgaaggggcagcccggcgatcccggtccgcagggaccgcctgggctggatggtaaacccgggagagaattctctgagcagttcatccgccaagtctgcactgatgtgatccgggcccagttgccagtgctgctacagtcaggaaggatccgtaactgtgatcattgtctctcccagcatgggagcccaggtatacccggccccccgggtccgatcggccccgaaggccctaggggcctccctggcctgcctgggcgggatggggtcccagggttagtcggcgtgccgggaaggccaggggttaggggattgaaggggttgcccgggcgaaacggcgaaaaaggatcccaaggcttcgggtaccccggagaacagggcccaccggggcctcccgggcctgagggtcccccaggcatatccaaagagggcccccccggagaccccggactgcctggcaaagatggagatcatggcaagccgggcatccaggggcagcctgggcctccaggaatttgcgacccatccctgtgctttagcgttatcgcgcggagagaccctttccgaaagggaccaaattattag

SEQ ID NO: 220421 - DNA, 972 bp, Artificial Sequence
  derived and/or modified sequence
atgatcgccagcggcatccccggcttccccggcaaccggggcctgatgggccagaagggtgagattggaccgcccggccagcagggcaagaaaggagccccgggcatgcctggcctgatggggtccaatggtagccccgggcaaccggggaccccagggtccaaaggtagcaaaggggaaccgggaatccaagggatgcccggggcttccggtctgaaaggagagccaggagctaccgggtcacccggggaaccagggtacatgggcctgcccggaatccagggcaaaaaaggagataaaggtaaccagggggagaagggcattcagggtcaaaaaggtgaaaacggcaggcaaggtatcccaggccaacaggggattcagggccaccatggtgccaagggagagcgcggcgagaagggagaaccaggagttcgaggggccataggatccaaaggtgagagcggtgtcgatggcctgatgggacctgctggtccaaagggacagcccggggatcctggcccccaaggtccacctgggttagacgggaagccaggtagggaattctcagagcagttcatcaggcaagtctgcaccgacgtgattagagggccagaagggcctcgaggactgcctgggcttccagggcgtgacggcgtgcctggtttggtcggtgtgcccggcaggcccggcgtccgggggctgaaagggctgcctggcagaaatggggagaaaggcagccagggctttggctacccaggcgaacagggcccccctgggcccccaggaccggagggcccccctgggataagcaaggagggcccacccggcgatcctggattgcctgggaaagacggcgatcatgggaagcccggtattcaggggcagccaggcccccccggcatatgcgacccatccctgtgtttcagcgttatagcacggagggatcctttcagaaaggggcctaattactag

SEQ ID NO: 220422 - DNA, 2865 bp, Artificial Sequence
  derived and/or modified sequence
atggcccactacatcaccttcctgtgcatggtgctggtgctgctgctgcagaactccgtgctagctgaggatggtgaggtccgaagctcctgtcgtacagcccctactgacctggtgttcattctcgacgggtcgtactctgtcgggcccgaaaactttgaaatcgtcaagaaatggctggtcaacatcacaaagaattttgatatcggacccaagttcattcaggtcggcgtcgtccagtactcagactaccccgtgttggaaatacctttgggtagttacgacagtggagaacacctcacagccgcagtggagagtattctgtacttggggggaaatacaaagacggggaaagccatccagtttgcactggactatctattcgcgaagtcgtctcgctttttgacaaaaatagctgtcgtgttgacagatggcaaaagtcaggacgacgttaaggatgccgcacaggctgctagagactcaaaaatcaccctttttgctatcggagttggtagtgagaccgaagatgccgagttgagagcaatcgccaacaagccgagctctacctacgtgttttatgtcgaggactatatcgccatatccaagatccgcgaagttatgaaacagaagctgtgtgaggagtccgtttgcccaacccgcatccccgtagccgccagagacgagcgtggttttgatatcctgcttggcctcgacgtaaataagaaggttaagaaaaggattcagctgtctcccaagaagatcaagggttatgaagttacctctaaggtggacctgagcgaactgactagcaacgtttttcccgaaggattgccaccatcttatgtctttgtctccacacagcgtttcaaggtgaaaaagatttgggatctatggcgcatactcactattgatgggcggccccagattgctgttacgctgaatggggtggataagattctgttgttcactaccacctccgtcatcaatgggagccaggttgtgacctttgcaaacccccaggtgaagacccttttcgatgagggctggcaccagatccggctcttagtgactgagcaggacgtgaccctctacatagatgatcaacagatcgagaataagccgctgcatcccgtgctcggaattctgataaatggacagacgcagattgggaagtatagcggtaaggaggagaccgttcagtttgacgtgcagaagctgaggatctattgcgacccagagcaaaataatcgcgaaacggcttgcgaaatcccagggttctgcttgaacggcccatcagacgtaggatcaaccccggccccttgcatctgtcctccaggcaagcctggccttcaaggccctaaaggggaccctgggctacccgggaacccgggataccctgggcagcctggtcaggacgggaaaccgggctaccagggcattgccggaacgcctggcgttcctgggtccccgggaatacagggcgcccggggcctccctggttataagggcgagcccggcagagacggcgataagggcgatcgcggacttccagggtttccgggccttcatggtatgcctggcagcaagggtgagatgggggccaagggggacaagggatctcccggcttctatggtaagaaaggagccaaaggggagaaagggaatgctgggtttcccgggcttccaggcccagccggcgagcccggacgccacggcaaggacggtctgatggggagtcccggattcaagggagaagctggttcacctggcgcccctggacaggatggtactcgcggtgagcctgggattcctgggttccccggcaacagggggttgatggggcaaaagggggaaataggtcctccaggccagcagggaaagaagggcgcacccgggatgccaggtttgatggggagtaacggctcccccggacagcccggtacacccggtagcaaaggctctaagggagagcccggtatccagggcatgcctggtgcgagcggcctcaaaggtgaacccggggccaccgggagcccgggagaacctggctacatgggcttacccggaatacagggcaaaaaaggcgacaaggggaatcagggtgaaaaggggatccagggccagaagggggaaaacggaaggcagggaataccggggcagcagggaatccaaggccaccatggagccaaaggggaacgcggggagaagggcgagccgggtgttcggggagccattgggtctaagggcgaatcaggcgtagatggattaatgggccccgcgggaccaaaaggtcagccaggagatccaggaccccagggaccacccgggctcgatggaaaaccagggcgggagttcagtgaacagttcatacggcaggtctgcactgatgtgatccgtgctcagctgcccgtgctcttgcagagcggtagaatccgtaactgcgatcactgcctgtcccagcacgggagcccgggaatccctggcccccccggaccaatcgggcctgaaggtcctcgtgggttacccggtctcccgggccgagacggagtacccggcttagtaggtgtgccaggtaggcctggcgtcaggggtctaaagggattgccaggtaggaatggcgagaagggctcacagggctttgggtatcctggtgaacagggtcctcccgggccccctggccctgagggaccacccgggatcagcaaggaaggcccaccaggagatcccggattgcccggtaaggacggagatcacgggaagccggggatacagggccagccaggcccaccaggcatctgtgacccatcgctctgttttagcgtgatcgcgagaagggatccatttaggaaaggaccaaattactag

SEQ ID NO: 220423 - DNA, 2865 bp, Artificial Sequence
  derived and/or modified sequence
atggcccactacatcaccttcctgtgcatggtgctggtgctgctgttgcagaactccgtactggctgaggatggggaagtacgaagttcatgccgcaccgctccaacagatctggtctttattctggatgggagttatagcgtggggccagagaacttcgagatagtaaaaaagtggctggtgaacatcacaaagaactttgatatcggaccaaagttcattcaagtgggtgtggtccagtactctgactaccctgtactagaaattccactagggtcgtacgactccggcgagcacctgacggctgcagttgagagcatcctttatctgggagggaatactaagaccggaaaggccatccagtttgcactggattacctctttgccaaatcctcaaggttcctcaccaaaatcgcggtcgtcctgacagatgggaaatctcaagacgatgtgaaggatgccgcacaagctgcgagggactccaaaattaccctcttcgcaatcggtgttggaagcgaaacagaggacgcggagcttagggccatcgccaacaagccgagctccacttacgtattttacgtggaggactatatcgcgatctctaagatccgcgaagtgatgaaacagaagttgtgcgaagagagcgtctgccccacgagaatacccgtagcagctagagatgagagaggcttcgatatcctgctgggattagatgtgaataaaaaggtaaaaaagaggatccagctgagtccaaaaaagatcaagggctatgaagtgacatccaaagtcgacctcagcgaactcacctctaatgtgttcccagaaggactgccaccatcatacgtcttcgtaagcacacaacggttcaaagtgaagaagatctgggatctttggagaatactgactatcgatgggcgaccacagattgctgtgaccctcaacggcgtggacaagattttgcttttcactaccacctccgttatcaacgggtcacaggtagtcacatttgcaaacccacaagtaaagaccctctttgacgagggttggcatcagattaggctcctggtgaccgaacaggacgtgacgctgtacatcgacgaccagcaaattgagaataagcctctacaccccgtgctcgggatcctgatcaatggccagactcagattggcaagtattccggaaaggaggaaacagtccagtttgacgtgcagaaactccgtatttactgcgatcccgagcagaacaaccgtgaaacagcttgtgaaatacctggattttgcctgaatgggccatccgacgttggatccacccccgctccttgcatctgtcctcccggcaagccaggtctgcagggtccgaagggcgaccccggactgcccggtaatccgggctaccccgggcagccaggccaggatgggaaacccgggtatcagggaatagcaggaacccctggggtccctggttcgccaggcatccaaggagccagaggcctgccaggttacaagggcgaacctggaagagatggagacaagggagatagaggactcccaggattccctggcctgcatggaatgccaggctccaaaggtgaaatgggggccaaaggggacaaaggatccccggggttctacggcaaaaagggcgccaagggtgaaaaaggcaacgcaggattcccagggttgcccggtcccgctggcgagccaggaaggcacggtaaggacgggctcatgggcagccccggttttaagggcgaagccggaagtcccggtgccccgggacaagacggcactcgaggggaaccaggtatcccgggctttccagggaatagaggcttgatgggacagaagggcgaaataggtcctccgggccagcaggggaaaaaaggcgctcccggtatgcccgggcttatgggatcgaacggtagcccaggccagccaggtacaccaggctctaagggatccaagggagagcccggtattcagggtatgcctggcgcgtcaggtcttaagggtgagcccggagcaactggaagtcccggtgaacccgggtacatggggttgcctggaattcagggcaagaaaggcgacaagggtaaccagggggagaaaggcatccaaggacagaaaggcgaaaacgggcgacagggaattcctggtcagcagggcattcagggacatcatggagccaaaggtgagcggggtgaaaagggtgagcccggagttcgcggcgccatcgggagtaaaggagagtctggggtcgacggattgatggggcctgccgggccaaaaggccagccaggtgaccccgggcctcagggcccgcctggccttgacggtaaaccagggcgcgagttttcagagcaattcattcgtcaggtttgcacagacgtaatccgtgcccagctccccgtcctgctgcagagcggacggattaggaactgcgaccactgtctgagccagcatggaagtccaggtatccctggtccccctggtcccattgggccagagggccctaggggcctgcccggactacctgggcgcgacggggtgccagggctggttggagttcctggcaggcctggcgtgcggggccttaagggcctgccgggccgcaatggagaaaaaggctctcagggttttggttaccccggagagcaagggcctccagggccccccgggccagagggaccacctgggatttctaaggaaggacctccaggggaccctggactacctggcaaggatggcgatcatggcaaaccaggaattcagggccagcctggacccccaggcatatgcgatcccagtctgtgtttttccgtaatagccagacgtgacccttttagaaaaggccccaactattag

SEQ ID NO: 220424 - DNA, 2874 bp, Artificial Sequence
  derived and/or modified sequence
atggcccactacatcaccttcctgtgcatggtgctggtgctgctgctccagaattccgtgctggccgaggatggcgaggttaggtccagctgtcgaactgcccccaccgacctagtgttcatcctggatgggtcatacagcgtggggcctgagaactttgaaattgttaaaaagtggttggtgaacattacaaaaaacttcgacattggccccaagttcatccaggtcggcgttgtccagtacagcgactatcctgtgttggaaataccactaggtagctacgattccggcgagcacttgactgcagctgtggaatctattctgtaccttggcggtaacactaaaaccggaaaggcaatacagttcgccctggactacttatttgcaaaatcaagcagatttctgacaaagattgccgtggttctcactgatggcaaatcccaggatgatgtcaaagacgccgcacaggcagcccgcgactcaaaaattacactgttcgccatcggggtggggtcagagactgaagatgccgagctgagagccatcgccaacaaaccgtcttctacatacgtgttctacgtcgaagattacatcgctatctccaagattcgagaagtgatgaaacagaaactttgtgaagagtctgtttgtcccactagaattccggtagccgcccgcgacgagcgaggcttcgacatcctcctcggactggacgtgaataaaaaggtcaaaaagcgcattcagctttcccccaaaaagatcaaaggatatgaagtcaccagtaaagtagacctgagcgagcttacatccaacgtgttccctgagggcctccccccgagttatgtgtttgtgtctacacagaggttcaaagtgaagaaaatttgggatttgtggaggatccttaccatcgacggaaggccgcaaatcgcagtgaccctgaatggagtggacaaaattctgctatttacgactacatctgtgataaacggtagtcaggttgtgacttttgctaatccccaggtcaaaaccctgttcgatgagggctggcatcagatcaggttactggtcactgaacaagacgtgactttatatattgatgatcaacagatcgagaacaagcctctccaccccgtgctcggtattctgatcaatgggcagacccaaataggcaaatatagcggcaaggaggagacggtgcagttcgatgtgcagaaactaaggatttattgcgaccctgagcagaataacagagaaactgcatgcgagatccctggatttgtaatggagtgcttgaacggcccatcagacgtcggctccactccagccccatgtatctgcccccccggcaagcccggcttgcaaggtcctaagggagatcctggactgccagggaaccccggttaccctgggcaaccaggccaagacggtaagccggggtatcaaggcatcgccggaacaccaggcgtgcctggttcgcctggcatccaaggggcacgcggcctcccgggctataagggtgagccgggccgcgacggtgacaaaggggatcggggcctacctggctttcctggcctgcacggcatgcccgggagtaaaggtgaaatgggtgccaagggagacaaggggtcccctggcttttacgggaaaaaaggagctaagggcgaaaaaggcaatgccgggttccctggcttaccagggccggctggtgagcctggaaggcacggcaaagacgggctaatggggtctcctggctttaagggcgaggcaggtagccccggtgccccaggtcaggacggaacccgcggggagcccggcattccaggctttcccggcaatcgagggctgatgggccaaaagggggaaataggcccccccgggcagcaaggcaaaaaaggtgcgccaggtatgcccggcttgatggggtcaaacggatcaccaggacagccgggcaccccagggagcaaggggtccaagggcgagcccggaatccaagggatgccaggtgctagtggactcaagggggagcccggcgctacaggaagcccaggagaaccaggctatatgggactgcccgggattcaaggtaagaagggagacaaaggcaaccagggtgagaaaggcatccagggccaaaaaggagaaaacggcagacaaggaatcccagggcaacagggcattcaggggcatcacggcgccaagggcgagcgcggggagaagggtgagcccggagtgcggggtgccattggcagtaaaggagagagcggggtcgacggcctgatgggacccgccggacccaaagggcaaccaggtgaccccggaccccagggtccacccgggctggacggaaagccgggccgcgaattttcagaacagtttatcagacaggtttgcaccgacgtgatccgcgcgcagctgcccgtgctgctccagagtggccgcatcagaaactgcgaccactgtctgtcccaacacggatcacccgggatacctggtcctccaggacctattggccctgagggtccaagagggctgccaggcctgcccggacgcgatggcgttcctggcctggtgggagtcccagggcggccaggcgttcgcggcctcaaaggactccccggacgtaacggtgagaaggggagccagggcttcggatacccgggggaacagggcccgcctggcccaccaggacctgaaggccctcccggtattagcaaggaaggtccgcccggcgacccaggtctgcccgggaaggatggcgaccacggcaagcctggaattcagggccagcccgggccccccggtatttgcgatcccagcttgtgcttttccgtgattgcgagaagagacccgttcaggaaaggccctaactactag

SEQ ID NO: 220425 - DNA, 4339 bp, Artificial Sequence
  derived and/or modified sequence
attttctgatgctagcaggatttgaactgagtgtttccaccagggcgacactagcagttcgcccttcaagatccagatccaaaatccaccctctggtcttcggccaaggaaagggggcgggtggggagcgcgaaccttatctcccgggctccgcctccagggggctgagagcgagtttctgagcctctgagctctgcactggccgctgcagggagaacggactccgggcggagggcagccaatccgtttcagcgcaggtcttgctcgggttgggcttgccactgcctggaacatacctgtccccctggcgcaacactcagctggctgcgacggcaaccccgagcctggacactgcgccaggaatcctaaaaccaaaatattagaacgaaaacagaaacatggctcactatattacatttctctgcatggttttggtgctgcttcttcagaattctgtgttagctgaagatggggaagtaagatcaagttgtcgtactgctccgacagatttagttttcatcttagatggctcttatagtgttggcccagaaaactttgaaatagtgaaaaagtggcttgtcaatatcacaaaaaactttgacatagggccgaagtttattcaagttggagtggttcaatatagtgactaccctgtgctggagattcctctcggaagctatgattcaggagaacatttgacggcagcagtggaatccatactctacttaggaggaaacacaaagacagggaaggccatccagtttgcgctcgattacctttttgccaagtcctcacgatttctgactaagatagcagtggtacttacggatggcaaatcccaagatgacgtcaaggatgcagctcaagcagcaagagatagtaagataacattatttgctattggtgttggttcagaaacagaagatgccgaacttagagctattgccaacaagccttcgtctacttatgtgttttatgtggaagactatattgcaatatccaaaataagggaagtgatgaagcagaaactttgtgaagaatctgtctgtccaacacgaattccagtggcagctcgtgatgaaaggggatttgatattcttttaggtttagatgtaaataaaaaggttaagaaaagaatacagctttcaccaaaaaagataaaaggatatgaagtaacatcaaaagttgatttatcagaactcacaagcaatgttttcccagaaggtcttcctccatcatatgtatttgtgtctactcaaagatttaaagtcaagaaaatttgggatttatggagaatattaactattgatggaaggccacaaatagcagttaccttaaatggtgtggacaaaatcttattatttacaacaaccagcgtaattaatggctcacaagtggttacctttgctaaccctcaagttaagacgttgtttgatgaaggctggcaccaaattcgtctcttagtaacagaacaagatgtgactttgtatattgatgaccaacaaattgaaaacaagcccttacatccagttttagggatcttgatcaatgggcaaacccaaattggaaaatattctggaaaagaagaaactgttcagtttgatgtccaaaagttgcgaatctactgtgacccagaacagaacaaccgggagacagcatgtgagattcctggatttaatggagagtgccttaatggtcccagtgatgtaggttcaactccagctccctgtatttgtcctccgggaaaaccaggacttcaaggccccaaaggtgaccctggactgcctgggaaccctggctaccctggacaacctggtcaagatggtaagcctggatatcagggaattgcagggacaccaggtgttccaggatctccaggaatacaaggagctcgaggactaccaggttacaaaggagaaccagggcgagatggtgacaagggtgatcgtggacttcctggttttcctgggcttcatggcatgccaggatcaaagggtgaaatgggtgccaaaggagacaaaggatcacctggattttatggcaaaaagggtgcaaaaggtgaaaaggggaatgctggcttccctggcctccctggacctgctggagaaccaggaagacatggaaaggatggattaatgggtagtcccggtttcaagggagaagcaggatcccctggtgctccggggcaggatggaacacggggagagcctggaatcccaggatttcctggaaaccgaggattaatgggccaaaagggagaaattgggcctccaggacagcaaggaaaaaaaggagccccagggatgcctggtttaatgggaagcaatggctcaccaggccagcctggaacaccgggatctaagggaagcaaaggtgaacctggaattcaagggatgcctggggcttctgggctcaagggagaaccaggagcaacgggttccccaggagaaccaggatacatgggtttacccgggattcaaggaaaaaagggggacaaaggaaatcaaggtgaaaaaggtattcagggtcaaaagggagaaaatggaagacagggaattccagggcaacagggaattcaaggccatcatggtgcaaaaggagagagaggtgaaaagggagaacctggtgtccgaggtgccattggatcaaaaggagaatctggggtggatggcttgatggggcccgcaggtcctaaggggcaacctggggatccaggtcctcagggacccccaggtttggatgggaagcccggaagagagttttcagaacaatttattcgacaagtttgcacagatgtaataagagcccagctaccagtcttacttcagagtggaagaattagaaattgtgatcattgcctgtcccaacatggctccccgggtattcctgggccacctggtccgataggcccagagggtcccagaggattacctggtttgccaggaagagatggtgttcctggattagtgggtgtccctggacgtccaggtgtcagaggattaaaaggcctaccaggaagaaatggggaaaaagggagccaagggtttgggtatcctggagaacaaggtcctcctggtcccccaggtccagagggccctcctggaataagcaaagaaggtcctccaggagacccaggtctccctggcaaagatggagaccatggaaaacctggaatccaagggcaaccaggccccccaggcatctgcgacccatcactatgttttagtgtaattgccagaagagatccgttcagaaaaggaccaaactattagtgtctgatgcctcattcagcagcctaggcatggtgctttttctgtggtcttttgcatctcaggaagataaccaacagtaatcccttgaaaagaaacttaagtacctcggtgtttttattttttttttcttatggaaaaaaatataaaagatcacatatactgattttaaaggctcctcagtcatttggagcccttggattagcagcattaattaaatctcaagggtttcttgtaaagtccatttatgttaatcaaagttgaatataaaaatccaccattgcctgttagccagtcagttttagtcactgtgaaatatttcacattcagcctccatgcagtagagatttgagtttaatttcatgtccatgtgactttcatgtttcctatctcatagctcatgctactacataagccaaaacatgtatctcatcattggaagtaagatcagggctgatattcacctgggatagacagtattggtgaactactcatttactacagtgtctcagccttgataaggggcagtggattgcctgttgttcggtgttgtgaatagcacctctgaataagattagagtgtttcttaattcatttcaaactctaaaattagattaatggtggtgctaagaaagagtattaattactttgggaatggtcaaaattaacattaaaaacattttagacaaaaagtttcattgtacattcaaagaaaatgtaagtttggaagtactaaaagactattttatacttgttgattaatcggaatgtttgttgtatgccttcattttccatttcacttatatgtgtatgtccatatatgttaattttcattgtagcaaagctaatggaaataaagctaatgctctagttgaaagaaaaggaaaactcctgaaatcctagaatgtcttgttatttttagctgactgtaaaatattatgaacagtctttgtgtattgtgcttaatgcttttgtaagaaacagaatttgaaatatttcatccttgtcatgctcaaaattttgttacatgcttgttattcagagtataataaagttttgtacaggcctga

SEQ ID NO: 220426 - DNA, 4163 bp, Artificial Sequence
  derived and/or modified sequence
gagagcgagtttctgagcctctgagctctgcactggccgctgcagggagaacggactccgggcggagggcagccaatccgtttcagcgcaggtcttgctcgggttgggcttgccactgcctggaacatacctgtccccctggcgcaacactcagctggctgcgacggcaaccccgagcctggacactgcgccaggaatcctaaaaccaaaatattagaacgaaaacagaaacatggctcactatattacatttctctgcatggttttggtgctgcttcttcagaattctgtgttagctgaagatggggaagtaagatcaagttgtcgtactgctccgacagatttagttttcatcttagatggctcttatagtgttggcccagaaaactttgaaatagtgaaaaagtggcttgtcaatatcacaaaaaactttgacatagggccgaagtttattcaagttggagtggttcaatatagtgactaccctgtgctggagattcctctcggaagctatgattcaggagaacatttgacggcagcagtggaatccatactctacttaggaggaaacacaaagacagggaaggccatccagtttgcgctcgattacctttttgccaagtcctcacgatttctgactaagatagcagtggtacttacggatggcaaatcccaagatgacgtcaaggatgcagctcaagcagcaagagatagtaagataacattatttgctattggtgttggttcagaaacagaagatgccgaacttagagctattgccaacaagccttcgtctacttatgtgttttatgtggaagactatattgcaatatccaaaataagggaagtgatgaagcagaaactttgtgaagaatctgtctgtccaacacgaattccagtggcagctcgtgatgaaaggggatttgatattcttttaggtttagatgtaaataaaaaggttaagaaaagaatacagctttcaccaaaaaagataaaaggatatgaagtaacatcaaaagttgatttatcagaactcacaagcaatgttttcccagaaggtcttcctccatcatatgtatttgtgtctactcaaagatttaaagtcaagaaaatttgggatttatggagaatattaactattgatggaaggccacaaatagcagttaccttaaatggtgtggacaaaatcttattatttacaacaaccagcgtaattaatggctcacaagtggttacctttgctaaccctcaagttaagacgttgtttgatgaaggctggcaccaaattcgtctcttagtaacagaacaagatgtgactttgtatattgatgaccaacaaattgaaaacaagcccttacatccagttttagggatcttgatcaatgggcaaacccaaattggaaaatattctggaaaagaagaaactgttcagtttgatgtccaaaagttgcgaatctactgtgacccagaacagaacaaccgggagacagcatgtgagattcctggattttgccttaatggtcccagtgatgtaggttcaactccagctccctgtatttgtcctccgggaaaaccaggacttcaaggccccaaaggtgaccctggactgcctgggaaccctggctaccctggacaacctggtcaagatggtaagcctggatatcagggaattgcagggacaccaggtgttccaggatctccaggaatacaaggagctcgaggactaccaggttacaaaggagaaccagggcgagatggtgacaagggtgatcgtggacttcctggttttcctgggcttcatggcatgccaggatcaaagggtgaaatgggtgccaaaggagacaaaggatcacctggattttatggcaaaaagggtgcaaaaggtgaaaaggggaatgctggcttccctggcctccctggacctgctggagaaccaggaagacatggaaaggatggattaatgggtagtcccggtttcaagggagaagcaggatcccctggtgctccggggcaggatggaacacggggagagcctggaatcccaggatttcctggaaaccgaggattaatgggccaaaagggagaaattgggcctccaggacagcaaggaaaaaaaggagccccagggatgcctggtttaatgggaagcaatggctcaccaggccagcctggaacaccgggatctaagggaagcaaaggtgaacctggaattcaagggatgcctggggcttctgggctcaagggagaaccaggagcaacgggttccccaggagaaccaggatacatgggtttacccgggattcaaggaaaaaagggggacaaaggaaatcaaggtgaaaaaggtattcagggtcaaaagggagaaaatggaagacagggaattccagggcaacagggaattcaaggccatcatggtgcaaaaggagagagaggtgaaaagggagaacctggtgtccgaggtgccattggatcaaaaggagaatctggggtggatggcttgatggggcccgcaggtcctaaggggcaacctggggatccaggtcctcagggacccccaggtttggatgggaagcccggaagagagttttcagaacaatttattcgacaagtttgcacagatgtaataagagcccagctaccagtcttacttcagagtggaagaattagaaattgtgatcattgcctgtcccaacatggctccccgggtattcctgggccacctggtccgataggcccagagggtcccagaggattacctggtttgccaggaagagatggtgttcctggattagtgggtgtccctggacgtccaggtgtcagaggattaaaaggcctaccaggaagaaatggggaaaaagggagccaagggtttgggtatcctggagaacaaggtcctcctggtcccccaggtccagagggccctcctggaataagcaaagaaggtcctccaggagacccaggtctccctggcaaagatggagaccatggaaaacctggaatccaagggcaaccaggccccccaggcatctgcgacccatcactatgttttagtgtaattgccagaagagatccgttcagaaaaggaccaaactattagtgtctgatgcctcattcagcagcctaggcatggtgctttttctgtggtcttttgcatctcaggaagataaccaacagtaatcccttgaaaagaaacttaagtacctcggtgtttttattttttttttcttatggaaaaaaatataaaagatcacatatactgattttaaaggctcctcagtcatttggagcccttggattagcagcattaattaaatctcaagggtttcttgtaaagtccatttatgttaatcaaagttgaatataaaaatccaccattgcctgttagccagtcagttttagtcactgtgaaatatttcacattcagcctccatgcagtagagatttgagtttaatttcatgtccatgtgactttcatgtttcctatctcatagctcatgctactacataagccaaaacatgtatctcatcattggaagtaagatcagggctgatattcacctgggatagacagtattggtgaactactcatttactacagtgtctcagccttgataaggggcagtggattgcctgttgttcggtgttgtgaatagcacctctgaataagattagagtgtttcttaattcatttcaaactctaaaattagattaatggtggtgctaagaaagagtattaattactttgggaatggtcaaaattaacattaaaaacattttagacaaaaagtttcattgtacattcaaagaaaatgtaagtttggaagtactaaaagactattttatacttgttgattaatcggaatgtttgttgtatgccttcattttccatttcacttatatgtgtatgtccatatatgttaattttcattgtagcaaagctaatggaaataaagctaatgctctagttgaaagaaaaggaaaactcctgaaatcctagaatgtcttgttatttttagctgactgtaaaatattatgaacagtctttgtgtattgtgcttaatgcttttgtaagaaacagaatttgaaatatttcatccttgtcatgctcaaaattttgttacatgcttgttattcagagtataataaagttttgtacaggcctg

SEQ ID NO: 220427 - DNA, 4094 bp, Artificial Sequence
  derived and/or modified sequence
tggttctggccaagggagttcatacccactcaaagattatattacgaatttcagatgggagcttctctcaacctgcagccaccacatgagttagctggccgacttctgtgaggttcccagtgaggaatcctaaaaccaaaatattagaacgaaaacagaaacatggctcactatattacatttctctgcatggttttggtgctgcttcttcagaattctgtgttagctgaagatggggaagtaagatcaagttgtcgtactgctccgacagatttagttttcatcttagatggctcttatagtgttggcccagaaaactttgaaatagtgaaaaagtggcttgtcaatatcacaaaaaactttgacatagggccgaagtttattcaagttggagtggttcaatatagtgactaccctgtgctggagattcctctcggaagctatgattcaggagaacatttgacggcagcagtggaatccatactctacttaggaggaaacacaaagacagggaaggccatccagtttgcgctcgattacctttttgccaagtcctcacgatttctgactaagatagcagtggtacttacggatggcaaatcccaagatgacgtcaaggatgcagctcaagcagcaagagatagtaagataacattatttgctattggtgttggttcagaaacagaagatgccgaacttagagctattgccaacaagccttcgtctacttatgtgttttatgtggaagactatattgcaatatccaaaataagggaagtgatgaagcagaaactttgtgaagaatctgtctgtccaacacgaattccagtggcagctcgtgatgaaaggggatttgatattcttttaggtttagatgtaaataaaaaggttaagaaaagaatacagctttcaccaaaaaagataaaaggatatgaagtaacatcaaaagttgatttatcagaactcacaagcaatgttttcccagaaggtcttcctccatcatatgtatttgtgtctactcaaagatttaaagtcaagaaaatttgggatttatggagaatattaactattgatggaaggccacaaatagcagttaccttaaatggtgtggacaaaatcttattatttacaacaaccagcgtaattaatggctcacaagtggttacctttgctaaccctcaagttaagacgttgtttgatgaaggctggcaccaaattcgtctcttagtaacagaacaagatgtgactttgtatattgatgaccaacaaattgaaaacaagcccttacatccagttttagggatcttgatcaatgggcaaacccaaattggaaaatattctggaaaagaagaaactgttcagtttgatgtccaaaagttgcgaatctactgtgacccagaacagaacaaccgggagacagcatgtgagattcctggattttgccttaatggtcccagtgatgtaggttcaactccagctccctgtatttgtcctccgggaaaaccaggacttcaaggccccaaaggtgaccctggactgcctgggaaccctggctaccctggacaacctggtcaagatggtaagcctggatatcagggaattgcagggacaccaggtgttccaggatctccaggaatacaaggagctcgaggactaccaggttacaaaggagaaccagggcgagatggtgacaagggtgatcgtggacttcctggttttcctgggcttcatggcatgccaggatcaaagggtgaaatgggtgccaaaggagacaaaggatcacctggattttatggcaaaaagggtgcaaaaggtgaaaaggggaatgctggcttccctggcctccctggacctgctggagaaccaggaagacatggaaaggatggattaatgggtagtcccggtttcaagggagaagcaggatcccctggtgctccggggcaggatggaacacggggagagcctggaatcccaggatttcctggaaaccgaggattaatgggccaaaagggagaaattgggcctccaggacagcaaggaaaaaaaggagccccagggatgcctggtttaatgggaagcaatggctcaccaggccagcctggaacaccgggatctaagggaagcaaaggtgaacctggaattcaagggatgcctggggcttctgggctcaagggagaaccaggagcaacgggttccccaggagaaccaggatacatgggtttacccgggattcaaggaaaaaagggggacaaaggaaatcaaggtgaaaaaggtattcagggtcaaaagggagaaaatggaagacagggaattccagggcaacagggaattcaaggccatcatggtgcaaaaggagagagaggtgaaaagggagaacctggtgtccgaggtgccattggatcaaaaggagaatctggggtggatggcttgatggggcccgcaggtcctaaggggcaacctggggatccaggtcctcagggacccccaggtttggatgggaagcccggaagagagttttcagaacaatttattcgacaagtttgcacagatgtaataagagcccagctaccagtcttacttcagagtggaagaattagaaattgtgatcattgcctgtcccaacatggctccccgggtattcctgggccacctggtccgataggcccagagggtcccagaggattacctggtttgccaggaagagatggtgttcctggattagtgggtgtccctggacgtccaggtgtcagaggattaaaaggcctaccaggaagaaatggggaaaaagggagccaagggtttgggtatcctggagaacaaggtcctcctggtcccccaggtccagagggccctcctggaataagcaaagaaggtcctccaggagacccaggtctccctggcaaagatggagaccatggaaaacctggaatccaagggcaaccaggccccccaggcatctgcgacccatcactatgttttagtgtaattgccagaagagatccgttcagaaaaggaccaaactattagtgtctgatgcctcattcagcagcctaggcatggtgctttttctgtggtcttttgcatctcaggaagataaccaacagtaatcccttgaaaagaaacttaagtacctcggtgtttttattttttttttcttatggaaaaaaatataaaagatcacatatactgattttaaaggctcctcagtcatttggagcccttggattagcagcattaattaaatctcaagggtttcttgtaaagtccatttatgttaatcaaagttgaatataaaaatccaccattgcctgttagccagtcagttttagtcactgtgaaatatttcacattcagcctccatgcagtagagatttgagtttaatttcatgtccatgtgactttcatgtttcctatctcatagctcatgctactacataagccaaaacatgtatctcatcattggaagtaagatcagggctgatattcacctgggatagacagtattggtgaactactcatttactacagtgtctcagccttgataaggggcagtggattgcctgttgttcggtgttgtgaatagcacctctgaataagattagagtgtttcttaattcatttcaaactctaaaattagattaatggtggtgctaagaaagagtattaattactttgggaatggtcaaaattaacattaaaaacattttagacaaaaagtttcattgtacattcaaagaaaatgtaagtttggaagtactaaaagactattttatacttgttgattaatcggaatgtttgttgtatgccttcattttccatttcacttatatgtgtatgtccatatatgttaattttcattgtagcaaagctaatggaaataaagctaatgctctagttgaaagaaaaggaaaactcctgaaatcctagaatgtcttgttatttttagctgactgtaaaatattatgaacagtctttgtgtattgtgcttaatgcttttgtaagaaacagaatttgaaatatttcatccttgtcatgctcaaaattttgttacatgcttgttattcagagtataataaagttttgtacaggcctga

SEQ ID NO: 220428 - DNA, 4172 bp, Artificial Sequence
  derived and/or modified sequence
gagagcgagtttctgagcctctgagctctgcactggccgctgcagggagaacggactccgggcggagggcagccaatccgtttcagcgcaggtcttgctcgggttgggcttgccactgcctggaacatacctgtccccctggcgcaacactcagctggctgcgacggcaaccccgagcctggacactgcgccaggaatcctaaaaccaaaatattagaacgaaaacagaaacatggctcactatattacatttctctgcatggttttggtgctgcttcttcagaattctgtgttagctgaagatggggaagtaagatcaagttgtcgtactgctccgacagatttagttttcatcttagatggctcttatagtgttggcccagaaaactttgaaatagtgaaaaagtggcttgtcaatatcacaaaaaactttgacatagggccgaagtttattcaagttggagtggttcaatatagtgactaccctgtgctggagattcctctcggaagctatgattcaggagaacatttgacggcagcagtggaatccatactctacttaggaggaaacacaaagacagggaaggccatccagtttgcgctcgattacctttttgccaagtcctcacgatttctgactaagatagcagtggtacttacggatggcaaatcccaagatgacgtcaaggatgcagctcaagcagcaagagatagtaagataacattatttgctattggtgttggttcagaaacagaagatgccgaacttagagctattgccaacaagccttcgtctacttatgtgttttatgtggaagactatattgcaatatccaaaataagggaagtgatgaagcagaaactttgtgaagaatctgtctgtccaacacgaattccagtggcagctcgtgatgaaaggggatttgatattcttttaggtttagatgtaaataaaaaggttaagaaaagaatacagctttcaccaaaaaagataaaaggatatgaagtaacatcaaaagttgatttatcagaactcacaagcaatgttttcccagaaggtcttcctccatcatatgtatttgtgtctactcaaagatttaaagtcaagaaaatttgggatttatggagaatattaactattgatggaaggccacaaatagcagttaccttaaatggtgtggacaaaatcttattatttacaacaaccagcgtaattaatggctcacaagtggttacctttgctaaccctcaagttaagacgttgtttgatgaaggctggcaccaaattcgtctcttagtaacagaacaagatgtgactttgtatattgatgaccaacaaattgaaaacaagcccttacatccagttttagggatcttgatcaatgggcaaacccaaattggaaaatattctggaaaagaagaaactgttcagtttgatgtccaaaagttgcgaatctactgtgacccagaacagaacaaccgggagacagcatgtgagattcctggatttgtaatggaatgccttaatggtcccagtgatgtaggttcaactccagctccctgtatttgtcctccgggaaaaccaggacttcaaggccccaaaggtgaccctggactgcctgggaaccctggctaccctggacaacctggtcaagatggtaagcctggatatcagggaattgcagggacaccaggtgttccaggatctccaggaatacaaggagctcgaggactaccaggttacaaaggagaaccagggcgagatggtgacaagggtgatcgtggacttcctggttttcctgggcttcatggcatgccaggatcaaagggtgaaatgggtgccaaaggagacaaaggatcacctggattttatggcaaaaagggtgcaaaaggtgaaaaggggaatgctggcttccctggcctccctggacctgctggagaaccaggaagacatggaaaggatggattaatgggtagtcccggtttcaagggagaagcaggatcccctggtgctccggggcaggatggaacacggggagagcctggaatcccaggatttcctggaaaccgaggattaatgggccaaaagggagaaattgggcctccaggacagcaaggaaaaaaaggagccccagggatgcctggtttaatgggaagcaatggctcaccaggccagcctggaacaccgggatctaagggaagcaaaggtgaacctggaattcaagggatgcctggggcttctgggctcaagggagaaccaggagcaacgggttccccaggagaaccaggatacatgggtttacccgggattcaaggaaaaaagggggacaaaggaaatcaaggtgaaaaaggtattcagggtcaaaagggagaaaatggaagacagggaattccagggcaacagggaattcaaggccatcatggtgcaaaaggagagagaggtgaaaagggagaacctggtgtccgaggtgccattggatcaaaaggagaatctggggtggatggcttgatggggcccgcaggtcctaaggggcaacctggggatccaggtcctcagggacccccaggtttggatgggaagcccggaagagagttttcagaacaatttattcgacaagtttgcacagatgtaataagagcccagctaccagtcttacttcagagtggaagaattagaaattgtgatcattgcctgtcccaacatggctccccgggtattcctgggccacctggtccgataggcccagagggtcccagaggattacctggtttgccaggaagagatggtgttcctggattagtgggtgtccctggacgtccaggtgtcagaggattaaaaggcctaccaggaagaaatggggaaaaagggagccaagggtttgggtatcctggagaacaaggtcctcctggtcccccaggtccagagggccctcctggaataagcaaagaaggtcctccaggagacccaggtctccctggcaaagatggagaccatggaaaacctggaatccaagggcaaccaggccccccaggcatctgcgacccatcactatgttttagtgtaattgccagaagagatccgttcagaaaaggaccaaactattagtgtctgatgcctcattcagcagcctaggcatggtgctttttctgtggtcttttgcatctcaggaagataaccaacagtaatcccttgaaaagaaacttaagtacctcggtgtttttattttttttttcttatggaaaaaaatataaaagatcacatatactgattttaaaggctcctcagtcatttggagcccttggattagcagcattaattaaatctcaagggtttcttgtaaagtccatttatgttaatcaaagttgaatataaaaatccaccattgcctgttagccagtcagttttagtcactgtgaaatatttcacattcagcctccatgcagtagagatttgagtttaatttcatgtccatgtgactttcatgtttcctatctcatagctcatgctactacataagccaaaacatgtatctcatcattggaagtaagatcagggctgatattcacctgggatagacagtattggtgaactactcatttactacagtgtctcagccttgataaggggcagtggattgcctgttgttcggtgttgtgaatagcacctctgaataagattagagtgtttcttaattcatttcaaactctaaaattagattaatggtggtgctaagaaagagtattaattactttgggaatggtcaaaattaacattaaaaacattttagacaaaaagtttcattgtacattcaaagaaaatgtaagtttggaagtactaaaagactattttatacttgttgattaatcggaatgtttgttgtatgccttcattttccatttcacttatatgtgtatgtccatatatgttaattttcattgtagcaaagctaatggaaataaagctaatgctctagttgaaagaaaaggaaaactcctgaaatcctagaatgtcttgttatttttagctgactgtaaaatattatgaacagtctttgtgtattgtgcttaatgcttttgtaagaaacagaatttgaaatatttcatccttgtcatgctcaaaattttgttacatgcttgttattcagagtataataaagttttgtacaggcctg

SEQ ID NO: 220429 - DNA, 2874 bp, Artificial Sequence
  derived and/or modified sequence
atggcacattacataactttcctttgtatggtcctggtgttactgctgcaaaattctgtactcgctgaagatggcgaagtccgctcgtcctgcagaaccgcgcctacagatctcgtctttattctggacgggtcttactctgtgggccctgaaaatttcgagattgtgaagaagtggctagtcaacatcactaaaaacttcgacattggtcctaagttcatccaggtgggcgtggtgcaatattctgactaccctgtgctggaaataccccttgggagttatgattccggggagcatctcactgctgccgtggaaagcattctgtacctcggtggtaacacaaagaccggcaaggccatccagttcgccctcgactatctgttcgcaaaaagttcaagatttctcacaaagatagcagtagtcctgacggacgggaagagccaggatgacgttaaggatgctgcccaggccgctagagacagcaaaatcactctgttcgcaataggagtgggaagcgaaaccgaagacgcagaattacgggcaatagccaataaacccagttctacctacgtgttctacgttgaggattacattgccatcagtaagattcgcgaggtgatgaaacagaaactttgcgaagaatccgtgtgcccaacaagaatccctgttgcggctcgtgacgagcgcggttttgatatcctgctaggccttgatgttaataaaaaggtcaagaaaagaatacagttgtcacccaagaagattaaagggtacgaggtgacctcaaaggttgatctcagtgaattgacgagcaacgtgttccccgaaggactaccaccctcgtacgtctttgtcagtacccaaagattcaaagttaaaaagatttgggacctgtggagaatacttaccatcgacgggcgtccgcaaatcgctgttacacttaatggtgtggataagatcttactcttcacgactacctctgtgataaacgggtctcaagtggtgacctttgccaacccgcaagtgaagactctgttcgatgagggctggcaccagatccgcctcctcgtgaccgaacaggatgtcacactatacattgatgaccagcagatcgagaataaaccactacaccctgtgctagggatcctgattaacggtcagacccagataggtaaatattctggcaaggaggagacggtgcagttcgatgttcagaagctcaggatatattgcgatccagagcagaataaccgtgaaaccgcatgtgagataccgggtttcaatggagaatgtttgaatggcccatcagacgtgggctctacacccgcaccttgcatttgccctcccggtaagcccggtcttcagggcccaaagggggaccccggacttccaggcaatccaggctacccaggacagcctggccaagacgggaagccaggataccaggggattgctggaacaccaggagttccgggaagcccaggtatacagggtgccaggggactcccaggatataaaggggaacctggaagagatggggacaagggtgacaggggactgcctggcttccccggactgcatggtatgccgggaagcaaaggtgagatgggagccaagggtgacaaaggtagcccaggattctacggcaaaaaaggagccaagggcgaaaagggaaacgccggatttccaggcctcccaggacctgccggagagccaggcagacacgggaaagacggactgatgggcagccccggattcaaaggggaggctggaagcccaggagcacctggacaggacggtacaaggggagaacctggcattccagggttccccggaaatagggggcttatgggacagaaaggagagattggtccacctggccagcaaggaaagaagggcgctcctggcatgcctggacttatgggcagcaacggcagccccggacaacccggaaccccgggatcaaagggttccaagggggagcccggaatccagggcatgccaggagccagtgggctcaagggtgaacctggcgcaactggctctcccggtgaacccggttacatgggtctcccagggatacaaggcaagaaaggcgataagggaaaccaaggtgagaaggggatccagggtcagaagggcgagaacggcagacagggaattccagggcagcaggggatccaaggacaccacggggcaaaaggcgaacggggagagaaaggtgagccaggggtcagaggcgcaatcggttccaaaggcgaaagtggggttgatgggctaatggggcctgccggtcctaaaggccaacctggcgatccaggacctcagggaccacccggactcgatggcaaacctgggagagaattctccgagcagtttattaggcaggtctgcacagatgtgatccgggcacaacttccagtattgctacagtcaggacgaattaggaattgcgatcattgcctgagccaacacggctcccccggtatccccggtccgccaggcccaattggcccagagggtcctcgcggactgcctggcctgcccggaagggacggagtgcccggactggtgggcgtgccaggacggccaggcgttagggggctcaaaggcctgcccggtaggaacggcgagaagggctcccagggatttggctatccaggcgaacaaggcccaccaggacctcccggaccggagggcccacccggtatctccaaagaaggtcctcccggtgaccctggtctgccaggcaaggacggagatcatggaaagccgggtatccaggggcagcctggaccccctggcatttgtgatccttcactttgtttctcagtcattgcgcgacgcgaccccttcagaaagggacccaattattag

SEQ ID NO: 220430 - DNA, 2865 bp, Artificial Sequence
  derived and/or modified sequence
atggcccattatattacatttttatgtatggtgctggtccttctgttacaaaacagcgtgttagccgaggacggcgaggtccgctcttcctgtcggacagcccctaccgatctggtgtttattctcgacggctcatactccgtcggaccagaaaacttcgaaatcgttaaaaaatggttagtgaacatcacgaaaaattttgatatcggtcccaaatttatacaggttggggtcgttcagtattccgattatcccgttcttgagattccgttagggtcatacgacagcggtgagcacctaaccgccgctgtagaaagcatcctgtacctcggtggcaacacgaagacggggaaagccatacagttcgccctggactacctttttgctaagtccagcaggttccttaccaagatcgctgttgtgctgactgatggaaaaagccaggacgacgtcaaagacgcggctcaggcggcaagagacagtaagattacccttttcgcaatcggggtgggaagcgaaaccgaggacgccgagctccgcgctatcgccaacaagccctcatcaacatacgtgttttatgtcgaggactacattgccataagcaaaatcagggaggttatgaaacagaagttgtgtgaagagtcagtgtgtccaactcgaatcccggtggccgctagagacgagcggggatttgatattctgttagggctggacgtgaataagaaggtaaagaagagaattcagctgagcccaaagaaaatcaaaggctacgaggtcacatcaaaggtcgacctctccgaattgacatccaacgtgttccctgaaggccttcctccgtcatatgtgttcgtgagcacccagaggttcaaggtgaaaaaaatttgggacctgtggcgcatactcacaatagacgggcgtccacaaattgcagttactttgaatggagttgacaagattttgctgttcaccaccacctctgtcattaatggatcccaagtcgtcacatttgcgaaccctcaagttaagacattgtttgatgaggggtggcatcagatcagactcctcgttacagagcaggatgtcacgctctacatcgatgatcagcaaattgagaataagccgctacatccagtgctgggaattctcatcaacggacagacccagatcggcaaatacagcggcaaggaagaaacagtacaattcgacgtgcaaaagcttaggatttattgcgatccagaacagaataacagggagaccgcatgtgagattcccggattttgtctgaacgggccttctgatgtggggtccactcctgcaccttgtatttgtcccccaggcaagcccggtctccagggcccaaagggcgatcccggtttacccggaaatcccggataccctggacagcccggtcaggatggaaagcctggctaccaaggaatcgctggaacgcccggagtgccaggctccccgggtattcaaggtgctaggggtctccccggatataagggcgaacccggaagagatggagataaaggagatagaggcctccctggttttccagggctccacggcatgcctggctccaagggagagatgggggctaaaggtgacaaaggttctccagggttttatgggaagaaaggcgcaaagggtgaaaaagggaacgcgggttttcctggactcccgggaccagcaggcgagcccggacggcacggaaaggacgggttgatgggctcccctgggtttaaaggggaagccggttcaccaggtgcccctgggcaggacggtaccagaggcgaaccaggaataccaggatttcctggcaataggggactgatgggacagaagggggaaattgggcctccaggccaacagggaaaaaagggagcacctggcatgcccggtcttatggggtcgaacgggagcccaggtcagccagggactcccggatccaagggctcaaagggcgagcccggtattcagggaatgccaggagcctccggattaaaaggagagcccggagctacaggatcaccgggagagcctgggtacatgggcctgccaggcattcaaggcaagaagggcgataagggcaatcagggcgaaaagggcatccaggggcaaaaaggggaaaacgggcgtcaaggcattcctggacagcagggcattcagggccaccacggggcaaaaggggagcgtggcgagaagggagagccaggagtaagaggagctatcggctccaagggcgaatcaggcgtagatggcctcatggggcctgccggacctaagggacagcccggtgaccctggaccgcagggacctccaggcttggacgggaaacctgggagagagttctctgaacaatttattcgccaggtttgcactgacgttattcgtgcacagctacctgtgctgctgcaatccggcaggatcaggaattgtgaccactgtttatcacaacatggttctcctggcattccaggtcccccaggccctattggacctgaagggcctagaggcctcccaggacttcctggtagagatggggtccccggacttgtgggtgtgcccggtcgaccaggcgtcagaggtctgaaaggcttgcccggacggaatggggagaagggatctcaagggtttggctatcctggtgagcaagggccaccaggcccaccgggacctgagggccctcccggtatttccaaagaaggaccgccaggcgacccaggccttccaggaaaggacggagaccacgggaaaccgggaatccaaggccagcccggtcctcctgggatctgcgacccttcattatgtttcagtgtgattgcccgtagggacccatttcgaaagggccctaactattag

SEQ ID NO: 220431 - DNA, 2865 bp, Artificial Sequence
  derived and/or modified sequence
atggctcactatatcacctttttatgtatggtgctagtgttgctcctgcagaatagcgttcttgccgaggatggtgaagtccggtcctcctgcaggactgctcctacagatttggtgttcattctcgacggctcttattctgtggggcctgagaattttgagatcgtaaagaagtggctggttaacatcactaagaactttgacatcggtccaaagtttatccaggtgggagttgtgcagtatagcgattaccctgttctggagatcccactaggaagctatgattcaggagaacacctgacggctgctgtggagtcaattttgtacctagggggaaatacaaagacaggtaaggcaatccagtttgccctggattatctgtttgctaaatcgtctcgattccttactaagattgccgtcgttttaactgacggtaagtctcaagatgacgtgaaagacgcagctcaagccgctagggactccaagattacacttttcgccatcggcgtgggatcggagacagaagatgcagagctgcgagcaatcgcgaacaagccatcctccacatacgttttctacgtcgaagactacatcgccatttctaaaattagggaagtcatgaagcaaaagctatgcgaagagtctgtttgccccacacggatcccagtggcagcgagagatgaacgcggattcgatatcctgctggggctggatgttaacaagaaggtgaaaaagcgcattcagctttcaccaaaaaaaatcaaaggatatgaggtaacctccaaggtcgatctgagcgaattaactagcaacgtgttccctgaaggtctacctccaagctatgtgtttgtgtcaacgcaacgttttaaagtgaagaagatctgggatctctggaggattctaacaattgatgggcgacctcagattgctgtgacactgaatggggtggacaagatcctcctctttaccactacatccgtgatcaacgggtctcaagtggtcacattcgccaatcctcaggttaaaacgctcttcgatgagggatggcaccagatccgtctgttggtcacagagcaggatgttaccttatacatagatgatcaacaaatcgaaaacaaaccgttacatcctgtgttagggattctgatcaacggacagacacagataggaaaatactctgggaaagaggaaacagtgcagttcgacgttcagaagctgagaatttattgcgatccagagcagaacaatagggagacagcttgtgagatcccgggattttgcctcaacggcccttccgacgtgggaagcacacccgcaccttgcatctgtcccccaggtaagcccggacttcagggtcctaaaggggacccaggtctgccaggaaacccaggttaccctggtcagcctggtcaggacggtaagcccggttaccagggcatagccggaacccctggcgtgccaggatctccaggtattcagggtgccagggggttaccaggctataagggtgaacctggaagggacggagacaaaggcgacagggggcttcctggcttccccggactccacggaatgcctggatctaaaggcgagatgggagcaaaaggtgacaaagggtcaccaggtttttacggcaagaaaggcgctaagggagaaaagggcaatgccggatttccaggactacctggcccagctggcgagcccggtcgtcacggaaaggatggattgatgggatctccaggttttaaaggcgaggccggatcgccaggtgcccctgggcaggacggaacaaggggcgaacccggaattcctggatttcctggaaatcgcggactcatgggtcagaaaggggagattggcccacccggacaacagggcaagaagggggcaccgggaatgcctggcctgatggggagtaacggatccccaggccagcccggaactcctggttccaaggggtcaaaaggtgagcctgggatccaggggatgccgggagcctccggattaaaaggagaacccggtgccacaggctctccaggagagcctgggtatatggggctgcccggtatccaaggcaaaaaaggggacaagggcaaccagggcgagaaaggtatccaaggccagaagggggaaaacggcaggcaggggattccgggacagcaggggatccaggggcatcacggagccaagggcgaaagaggagaaaagggtgaaccgggtgtgagaggggctataggcagtaaaggtgaatctggtgtggatggccttatggggcctgcaggcccaaagggtcagcccggagatcccggtcctcagggacccccagggcttgacggtaaacccggaagagaattcagcgaacagttcatcaggcaggtgtgcaccgatgtaatacgggctcagctaccagttctgctgcagagcggcaggataagaaactgcgatcactgcctaagtcagcacggctctccaggaatccctggacctccaggacccattggaccagaaggtccacgagggctgcctggtctgcccggacgtgatggggtgcccggactagtcggtgtacccggaaggcccggtgtcagaggcctaaaggggctcccagggagaaatggcgaaaaaggctcacagggcttcggatacccgggtgaacagggcccacccggacctccaggccctgaaggccctccaggcataagcaaagaaggacccccaggggatccaggtttgcccggaaaggatggggaccacgggaaaccaggaatccagggtcagcccggtcccccaggaatctgtgaccctagcttgtgcttttcagtcatcgctcgaagggacccctttcgtaagggccctaactactag

SEQ ID NO: 220432 - DNA, 2874 bp, Artificial Sequence
  derived and/or modified sequence
atggctcactatattaccttcctatgcatggtgctcgtactgctgctgcaaaactcagtgcttgccgaggatggggaggtccgttcatcatgccggactgcacccactgatctggtgtttattttggatggaagctattcagttggcccagaaaacttcgagattgtaaagaagtggctggtcaatatcacgaaaaattttgacattggtccaaaatttattcaggtaggagtcgttcaatacagtgattaccctgtgctagagatccccctggggtcgtacgatagcggcgagcatctgaccgcagctgttgaatcgatcctctacctggggggaaataccaaaacaggcaaagctattcagtttgccctagattacctcttcgctaaatcatccagattcctgactaagatcgctgtggttttaacagacggaaaaagccaggatgatgtcaaagacgctgcacaggccgctcgagattcaaagataaccctgttcgccattggagttggctctgaaaccgaggacgctgagctgagagcaattgccaataagccttcatcaacctatgtgttttacgttgaagattatatcgctatttccaagattcgagaggtaatgaaacaaaagttgtgcgaagagagtgtctgtccgaccaggatccccgtggccgcaagggacgaacggggtttcgacatccttcttggccttgacgtgaataagaaagtcaagaagagaatccagcttagcccaaaaaagatcaagggctacgaggtgacttctaaggtcgatctgtctgaattgacttccaacgtatttcccgagggcttgccaccatcgtacgtgttcgtttctactcagaggtttaaagtgaagaagatctgggatctgtggcggattctgaccatagatggcagaccacagatagccgtgaccctgaacggggtcgataagattctcctgttcacaaccaccagcgtgattaacggaagtcaggtggtaacgttcgcaaaccctcaggtaaagaccctctttgacgaaggttggcaccagatcagattgctagttaccgagcaggatgtgacgctctacattgacgatcagcagatagaaaacaaacctttgcatccagtgttgggcatcctgataaatggacagacacagatcggtaagtacagtgggaaagaagaaacagtgcaattcgatgtccagaagctgaggatatattgtgaccccgagcagaacaaccgggaaactgcatgcgaaattcccggttttgttatggagtgcctgaacggcccttccgacgtcggtagtactccagccccatgtatctgccccccagggaagccaggactgcagggccctaaaggtgaccccggactgcctggtaatcctggatatccgggtcaacccggacaggacggcaaaccaggctaccagggcatcgcaggaacgcccggtgtgccagggtcccccggaattcagggtgcacgagggctacccggatacaagggggaacccggaagggatggagataaaggggaccgcggtctgcccggattcccaggcctgcacggcatgccaggttcaaagggggagatgggagctaagggggataaaggctcccctggtttctacgggaaaaagggagccaagggggaaaagggcaacgcaggtttccctggcctacccggacccgcaggcgagcccggacgtcacgggaaggatggcctgatggggtcccccggatttaaaggcgaggctggaagcccaggcgctcccggacaggatggaacccggggtgaacccggaatcccagggtttcccggaaaccggggattgatggggcagaagggggaaattggccctcccggacagcagggaaaaaaaggggctccaggcatgcccggtctgatgggatcgaacggtagccctggccagccaggcacccccggatctaagggttccaagggcgagccaggcatccagggaatgcctggggcttctggcctgaagggagaacctggcgcaacgggctcacccggagaacctgggtatatgggtctcccaggtatccaaggaaagaaaggcgacaagggaaaccaaggagagaaaggcatccaaggccagaagggggaaaacggccgacaaggcatccccggacagcaggggattcagggccaccacggcgctaaaggcgagcgcggagaaaaaggagagcccggagtgagaggggctatcggttctaaaggggagagcggagtagatggactgatgggtcctgcgggacctaaggggcagcctggcgacccaggcccacaaggacctcccggactggatggcaagccagggagggagttttccgagcagttcattagacaggtgtgtactgatgtgataagagctcagcttccagtgcttttgcagtccggacggattcgcaactgcgaccactgcctgtcgcagcacgggtcacccggtatccctggacctcccggaccaataggaccagaaggtcccagaggactccccggtttgcccggacgagatggagtccccggactggtaggcgtgcctggacgcccaggcgtacgcggtctgaagggtttacctggaaggaacggcgagaagggatctcagggattcgggtaccccggagagcagggcccacctggtccccctggtcctgagggccctcccggaataagcaaagaggggccacctggggaccccggactgcccggtaaagacggagaccacgggaagccagggatccagggtcagcccggaccccctggcatttgcgatccctccctctgtttttctgtgatagctcgtcgtgatcctttcaggaaaggacctaattactag

SEQ ID NO: 220433 - protein, 189 aa, Artificial Sequence
  derived and/or modified sequence
MALLSRPALTLLLLLMAAVVRCQEQAQTTDWRATLKTIRNGVHKIDTYLNAALDLLGGEDGLCQYKCSDGSKPFPRYGYKPSPPNGCGSPLFGVHLNIGIPSLTKCCNQHDRCYETCGKSKNDCDEEFQYCLSKICRDVQKTLGLTQHVQACETTVELLFDSVIHLGCKPYLDSQRAACRCHYEEKTDL

SEQ ID NO: 220434 - protein, 70 aa, Artificial Sequence
  derived and/or modified sequence
MALLSRPALTLLLLLMAAVVRCQEQAQTTDWRATLKTIRNGVHKIDTYLNAALDLLGGEDGLCQYKCSDA

SEQ ID NO: 220435 - DNA, 570 bp, Artificial Sequence
  derived and/or modified sequence
atggccctgctgagcagacccgccctgaccctgctgctgctgctgatggccgccgtggtgagatgccaggagcaggcccagaccaccgactggagagccaccctgaagaccatcagaaacggcgtgcacaagatcgacacctacctgaacgccgccctggacctgctgggcggcgaggacggcctgtgccagtacaagtgcagcgacggcagcaagcccttccccagatacggctacaagcccagcccccccaacggctgcggcagccccctgttcggcgtgcacctgaacatcggcatccccagcctgaccaagtgctgcaaccagcacgacagatgctacgagacctgcggcaagagcaagaacgactgcgacgaggagttccagtactgcctgagcaagatctgcagagacgtgcagaagaccctgggcctgacccagcacgtgcaggcctgcgagaccaccgtggagctgctgttcgacagcgtgatccacctgggctgcaagccctacctggacagccagagagccgcctgcagatgccactacgaggagaagaccgacctgtag

SEQ ID NO: 220436 - DNA, 213 bp, Artificial Sequence
  derived and/or modified sequence
atggccctgctgagcagacccgccctgaccctgctgctgctgctgatggccgccgtggtgagatgccaggagcaggcccagaccaccgactggagagccaccctgaagaccatcagaaacggcgtgcacaagatcgacacctacctgaacgccgccctggacctgctgggcggcgaggacggcctgtgccagtacaagtgcagcgacgcctag

SEQ ID NO: 220437 - DNA, 570 bp, Artificial Sequence
  derived and/or modified sequence
atggcgcttctgagtaggcccgctctgacactgttacttcttttaatggccgctgtcgtgcggtgtcaagaacaggcccagacaacagattggagagcgaccttgaagactattcgaaacggagtgcataagattgatacgtatctgaatgctgccctggatctcctggggggtgaggacggactgtgccagtataaatgttctgacggatccaagccctttcctcggtatggttacaaaccctccccgcctaacggatgtggctcacccctctttggcgtgcaccttaacattggcataccgagcttgaccaagtgctgtaatcagcatgataggtgctatgagacttgtggtaaatccaagaacgactgcgatgaggagttccagtattgcctatctaagatatgccgggatgtgcaaaaaacactgggtctcactcagcacgtccaggcatgcgaaacaaccgtggagttgctattcgatagtgtgatccacctgggctgcaagccctatctggactcacaacgtgcagcctgtagatgccattacgaagaaaaaacagatttatag

SEQ ID NO: 220438 - DNA, 213 bp, Artificial Sequence
  derived and/or modified sequence
atggccctactgtcgcgtcccgctcttacattgcttttgctgctgatggccgcggtggtgaggtgccaggaacaggcccaaaccacagattggcgagcgaccctgaagactatccggaatggcgttcataagatcgatacctacttgaatgcagcattagacctcttgggcggggaagatgggctgtgccagtataagtgcagtgacgcatag

SEQ ID NO: 220439 - DNA, 570 bp, Artificial Sequence
  derived and/or modified sequence
atggccctgctgagcaggcctgccctgaccctgctgctgctgctgatggctgctgtggtgcgctgccaggagcaggcccagaccacagactggagggccaccctgaagaccatcagaaatggagtgcacaagattgacacctacctgaatgctgccctggacctgctgggcggagaagatggcctgtgccagtacaagtgcagtgatggcagcaagcccttccccaggtatggctacaagcccagccccccaaatggctgcggcagccccctgtttggagtgcacctgaacatcggcatccccagcctgaccaagtgctgcaaccagcacgaccgctgctatgagacctgtgggaagagcaagaatgactgtgatgaggagttccagtactgcctgagcaagatctgcagagatgtgcagaagaccctgggcctgacccagcacgtgcaggcctgtgagaccaccgtggagctgctgtttgacagcgtcatccacctgggctgcaagccctacctggacagccagagagctgcctgccgctgccactatgaggagaagacagacctgtag

SEQ ID NO: 220440 - DNA, 213 bp, Artificial Sequence
  derived and/or modified sequence
atggccctgctgagcaggcctgccctgaccctgctgctgctgctgatggctgctgtggtgcgctgccaggagcaggcccagaccacagactggagggccaccctgaagaccatcagaaatggagtgcacaagattgacacctacctgaatgctgccctggacctgctgggcggagaagatggcctgtgccagtacaagtgcagtgatgcctag

SEQ ID NO: 220441 - DNA, 570 bp, Artificial Sequence
  derived and/or modified sequence
atggccctgctgagccggcccgccctgaccctgctgctgctgctgatggctgcagtggtccggtgtcaggagcaagcgcagaccacggactggcgcgccaccttaaaaacaatccgcaatggagtgcataagatagatacttatctgaatgcagctctggatctcttgggcggtgaagatggcttatgccagtacaagtgttcggacggctctaagccatttccaaggtatggctacaaaccctctcctcccaatgggtgtggctctcccctgttcggcgtccacttgaatattggaatcccctccctcacgaaatgctgtaatcaacacgaccgctgttatgaaacttgtggaaagtcaaagaatgactgtgacgaggagtttcagtactgcttatctaaaatttgtcgcgatgtgcaaaaaacgctcggtttgacccagcacgttcaagcgtgtgaaactactgtagagctgttgttcgactccgtgatccatctcgggtgcaagccgtacctggattcacagagagctgcatgccggtgtcattatgaggaaaaaaccgatctgtag

SEQ ID NO: 220442 - DNA, 213 bp, Artificial Sequence
  derived and/or modified sequence
atggccctgctgagccggcccgccctgaccctgctgctgctgctgatggctgcggttgtccgatgtcaggaacaggcacagacaaccgattggcgggccaccctgaagactatcagaaacggggtacataagatagatacatatctgaacgccgccctcgacctcttgggaggcgaagatggactttgtcagtataaatgctccgatgcctag

SEQ ID NO: 220443 - DNA, 570 bp, Artificial Sequence
  derived and/or modified sequence
atggcactgctgtccagacctgccttgacgcttctgctgcttctaatggctgcggttgtgaggtgtcaggaacaggctcagactactgactggcgggcaacactgaagaccattcggaacggagtgcacaagatcgatacatatctgaatgcggcactcgatctcctgggaggagaggacggactgtgccaatacaagtgcagcgatgggtcaaaaccatttccaaggtatggctataagccaagtcccccaaatggctgcggcagcccactgtttggggtgcacctgaatattggaatcccgagtctgactaagtgttgcaaccagcatgacaggtgttatgagacatgtggaaagagcaagaatgattgcgacgaggaattccaatattgtctctccaagatctgccgggacgtgcagaagacattgggactgacccagcatgttcaggcgtgtgagacaaccgtagagctcctgtttgactctgtgatccatttaggctgtaaaccttacctcgatagccaaagagccgcatgtcggtgccattacgaggaaaaaaccgatctatag

SEQ ID NO: 220444 - DNA, 213 bp, Artificial Sequence
  derived and/or modified sequence
atggctctgctctcccggcctgccctcaccttgctgttgcttttaatggccgcagtggtccgctgtcaggagcaggcgcagactacagattggcgcgctacactgaagacaatccggaacggcgtgcataagatcgatacttacctgaacgcggcacttgacctgctgggaggggaggatggactctgccagtacaaatgctctgatgcttag

SEQ ID NO: 220445 - DNA, 1808 bp, Artificial Sequence
  derived and/or modified sequence
cgcaggcgcacaggggacggttgctggcccaggtgagcgggcgcgctggtccaggtgagcgggcgcgtccccgcgacggcgctgcctgcccgaggcggttcacgtaaagacagcgagatcctgagggccagccgggaaggaggcgtggatatggagctggctgctgccaagtccggggcccgcgccgctgcctagcgcgtcctggggactctgtggggacgcgccccgcgccgcggctcggggacccgtagagcccggcgctgcgcgcatggccctgctctcgcgccccgcgctcaccctcctgctcctcctcatggccgctgttgtcaggtgccaggagcaggcccagaccaccgactggagagccaccctgaagaccatccggaacggcgttcataagatagacacgtacctgaacgccgccttggacctcctgggaggcgaggacggtctctgccagtataaatgcagtgacggatctaagcctttcccacgttatggttataaaccctccccaccgaatggatgtggctctccactgtttggtgttcatcttaacattggtatcccttccctgacaaagtgttgcaaccaacacgacaggtgctatgagacctgtggcaaaagcaagaatgactgtgatgaagaattccagtattgcctctccaagatctgccgagatgtacagaaaacactaggactaactcagcatgttcaggcatgtgaaacaacagtggagctcttgtttgacagtgttatacatttaggttgtaaaccatatctggacagccaacgagccgcatgcaggtgtcattatgaagaaaaaactgatctttaaaggagatgccgacagctagtgacagatgaagatggaagaacatacctttgacaaataactaatgtttttacaacataaaactgtcttatttttgtgaaaggattattttgagaccttaaaataatttatatcttgatgttaaaacctcaaagcaaaaaaagtgagggagatagtgaggggagggcacgcttgtcttctcaggtatcttccccagcattgctcccttacttagtatgccaaatgtcttgaccaatatcaaaaacaagtgcttgtttagcggagaattttgaaaagaggaatatataactcaattttcacaaccacatttaccaaaaaaagagatcaaatataaaattcatcataatgtctgttcaacattatcttatttggaaaatggggaaattatcacttacaagtatttgtttactatgaaattttaaatacacatttatgcctagaaggaacggactttttttttctattttaattacacataatatgtaattaaagtacaacataatatgttgtttctctgtagcccgttgagcatatgagtaagtcacatttctattaggactacttacaaggacaaggtttccatttttccagttgtaaaattggaaccatcagctgataacctcgtagggagcaaccccaggatagctaagtgttatgtaatatgcctagaaggtgatgtgaatgcgattcagaagcatagccactcccattttatgagctactcacatgacaaatgtcatcttttgctataacctttgccaagttagagaaaagatggatttaatgagataaatgaaaagatatttaacctaatatatcaaggcactatttgctgttatgctttgttatttatttcccagcacttgttccttattgtagattttttaaagactgtaaccttttactaactgtggtcttactaaaatttgtgcttgatactgcttttcaaaaa

SEQ ID NO: 220446 - DNA, 755 bp, Artificial Sequence
  derived and/or modified sequence
tgagggccagccgggaaggaggcgtggatatggagctggctgctgccaagtccggggcccgcgccgctgcctagcgcgtcctggggactctgtggggacgcgccccgcgccgcggctcggggacccgtagagcccggcgctgcgcgcatggccctgctctcgcgccccgcgctcaccctcctgctcctcctcatggccgctgttgtcaggtgccaggagcaggcccagaccaccgactggagagccaccctgaagaccatccggaacggcgttcataagatagacacgtacctgaacgccgccttggacctcctgggaggcgaggacggtctctgccagtataaatgcagtgacgcttaacattggtatcccttccctgacaaagtgttgcaaccaacacgacaggtgctatgagacctgtggcaaaagcaagaatgactgtgatgaagaattccagtattgcctctccaagatctgccgagatgtacagaaaacactaggactaactcagcatgttcaggcatgtgaaacaacagtggagctcttgtttgacagtgttatacatttaggttgtaaaccatatctggacagccaacgagccgcatgcaggtgtcattatgaagaaaaaactgatctttaaaggagatgccgacagctagtgacagatgaagatggaagaacatacctttgacaaataactaatgtttttacaacataaaactgtcttatttttgtgaaaggattattttgagacc

SEQ ID NO: 220447 - DNA, 570 bp, Artificial Sequence
  derived and/or modified sequence
atggcactgctgtctcggccagctctcaccctgctgctcctgctgatggccgcagtggtgaggtgtcaagaacaagcccagaccactgactggcgggctaccttaaaaacaatcaggaacggagtgcacaaaattgatacgtacttaaatgctgctctcgatcttctaggcggcgaggatggattgtgtcagtacaaatgtagtgatggtagcaaacctttccccaggtatggctataaaccttccccccccaatgggtgcggcagccccctgttcggcgtccacctgaacatcggcatccccagtctgaccaagtgctgcaatcaacatgaccggtgctatgaaacttgcggtaagtccaagaacgattgcgatgaagagtttcagtattgcttatcgaaaatctgccgcgatgtccagaagacgctcggcctgacccaacatgtgcaagcttgtgaaaccaccgttgagttactttttgattctgtgatccatctaggttgtaaaccttatctcgattcccagagagccgcatgtcggtgtcattacgaagagaagacagatttgtag

SEQ ID NO: 220448 - DNA, 213 bp, Artificial Sequence
  derived and/or modified sequence
atggccctactgagtcgccccgccctcacactactcctgctgctcatggctgccgtagtccgttgccaggaacaggcccagacaaccgattggcgcgctaccctgaagacaataaggaacggagtccataaaatcgatacctaccttaatgcagccttagatctgcttggcggagaagacggactctgtcaatacaagtgctctgatgcctag

SEQ ID NO: 220449 - DNA, 570 bp, Artificial Sequence
  derived and/or modified sequence
atggctttgttgtctcgccccgctcttaccctgctgctgctgttaatggccgctgtggtgcgatgtcaggagcaggcccagactacagattggagagccactttaaagaccattcgcaatggggtgcacaaaattgacacctacttaaacgcagcactggatctcctcggcggggaagacggactttgccagtacaagtgcagcgacgggtcaaaaccatttcctcgatacggctacaaaccctccccccccaacggctgcggttcaccactgttcggagtccaccttaacataggcatccccagtcttaccaaatgttgcaatcaacatgaccgatgctatgaaacttgtgggaagagcaaaaacgactgtgatgaggagtttcaatactgtctctcgaaaatttgcagggacgttcagaagaccctgggcctcacccaacacgtacaagcatgtgagactacagtcgaacttctctttgattccgtcattcacctggggtgcaagccttatctcgacagccaacgagcagcctgccgatgtcactatgaggaaaaaacagatctgtag

SEQ ID NO: 220450 - RNA, 570 nt, Artificial Sequence
  derived and/or modified sequence
auggcacugcugucucggccagcucucacccugcugcuccugcugauggccgcaguggugaggugucaagaacaagcccagaccacugacuggcgggcuaccuuaaaaacaaucaggaacggagugcacaaaauugauacguacuuaaaugcugcucucgaucuucuaggcggcgaggauggauugugucaguacaaauguagugaugguagcaaaccuuuccccagguauggcuauaaaccuuccccccccaaugggugcggcagcccccuguucggcguccaccugaacaucggcauccccagucugaccaagugcugcaaucaacaugaccggugcuaugaaacuugcgguaaguccaagaacgauugcgaugaagaguuucaguauugcuuaucgaaaaucugccgcgauguccagaagacgcucggccugacccaacaugugcaagcuugugaaaccaccguugaguuacuuuuugauucugugauccaucuagguuguaaaccuuaucucgauucccagagagccgcaugucggugucauuacgaagagaagacagauuuguag

SEQ ID NO: 220451 - RNA, 213 nt, Artificial Sequence
  derived and/or modified sequence
auggcccuacugagucgccccgcccucacacuacuccugcugcucauggcugccguaguccguugccaggaacaggcccagacaaccgauuggcgcgcuacccugaagacaauaaggaacggaguccauaaaaucgauaccuaccuuaaugcagccuuagaucugcuuggcggagaagacggacucugucaauacaagugcucugaugccuag

SEQ ID NO: 220452 - RNA, 570 nt, Artificial Sequence
  derived and/or modified sequence
auggcuuuguugucucgccccgcucuuacccugcugcugcuguuaauggccgcuguggugcgaugucaggagcaggcccagacuacagauuggagagccacuuuaaagaccauucgcaauggggugcacaaaauugacaccuacuuaaacgcagcacuggaucuccucggcggggaagacggacuuugccaguacaagugcagcgacgggucaaaaccauuuccucgauacggcuacaaacccuccccccccaacggcugcgguucaccacuguucggaguccaccuuaacauaggcauccccagucuuaccaaauguugcaaucaacaugaccgaugcuaugaaacuugugggaagagcaaaaacgacugugaugaggaguuucaauacugucucucgaaaauuugcagggacguucagaagacccugggccucacccaacacguacaagcaugugagacuacagucgaacuucucuuugauuccgucauucaccuggggugcaagccuuaucucgacagccaacgagcagccugccgaugucacuaugaggaaaaaacagaucuguag

SEQ ID NO: 220453 - protein, 321 aa, Artificial Sequence
  derived and/or modified sequence
MERKNQTAITEFIILGFSNLNELQFLLFTIFFLTYFCTLGGNILIILTTVTDPHLHTPMYYFLGNLAFIDICYTTSNVPQMMVHLLSKKKSISYVGCVVQLFAFVFFVGSECLLLAAMAYDRYIAICNPLRYSVILSKVLCNQLAASCWAAGFLNSVVHTVLTFCLPFCGNNQINYFFCDIPPLLILSCGNTSVNELALLSTGVFIGWTPFLCIVLSYICIISTILRIQSSEGRRKAFSTCASHLAIVFLFYGSAIFTYVRPISTYSLKKDRLVSVLYSVVTPMLNPIIYTLRNKDIKEAVKTIGSKWQPPISSLDSKLTY

SEQ ID NO: 220454 - DNA, 966 bp, Artificial Sequence
  derived and/or modified sequence
atggagagaaagaaccagaccgccatcaccgagttcatcatcctgggcttcagcaacctgaacgagctgcagttcctgctgttcaccatcttcttcctgacctacttctgcaccctgggcggcaacatcctgatcatcctgaccaccgtgaccgacccccacctgcacacccccatgtactacttcctgggcaacctggccttcatcgacatctgctacaccaccagcaacgtgccccagatgatggtgcacctgctgagcaagaagaagagcatcagctacgtgggctgcgtggtgcagctgttcgccttcgtgttcttcgtgggcagcgagtgcctgctgctggccgccatggcctacgacagatacatcgccatctgcaaccccctgagatacagcgtgatcctgagcaaggtgctgtgcaaccagctggccgccagctgctgggccgccggcttcctgaacagcgtggtgcacaccgtgctgaccttctgcctgcccttctgcggcaacaaccagatcaactacttcttctgcgacatcccccccctgctgatcctgagctgcggcaacaccagcgtgaacgagctggccctgctgagcaccggcgtgttcatcggctggacccccttcctgtgcatcgtgctgagctacatctgcatcatcagcaccatcctgagaatccagagcagcgagggcagaagaaaggccttcagcacctgcgccagccacctggccatcgtgttcctgttctacggcagcgccatcttcacctacgtgagacccatcagcacctacagcctgaagaaggacagactggtgagcgtgctgtacagcgtggtgacccccatgctgaaccccatcatctacaccctgagaaacaaggacatcaaggaggccgtgaagaccatcggcagcaagtggcagccccccatcagcagcctggacagcaagctgacctactag

SEQ ID NO: 220455 - DNA, 966 bp, Artificial Sequence
  derived and/or modified sequence
atggagcgcaaaaatcagaccgcgatcacagaatttataatactgggattctccaatctaaacgagctccagttcttgctgtttaccatcttcttcctcacctacttttgtacactgggcggcaatatcctgatcatattgacaacagtcacagatccccatctccacacccccatgtattatttcctgggcaatcttgcatttatcgacatctgctatacgaccagcaacgtgccacagatgatggtgcatctattgagcaagaagaagagcatttcctacgtaggatgcgtggtccaactttttgcttttgtgttctttgtggggagtgagtgcttactcctggccgccatggcttatgataggtatatcgcaatctgtaacccgctacgctattctgtcatattaagtaaggtcctctgtaaccagctggccgcctcctgctgggcagccggctttctgaattctgtggtccacaccgtgttgaccttctgcctgcctttttgtggcaacaaccagattaattatttcttctgcgatatccctcccctcctcattctctcatgtggaaacacttccgtgaacgagctggccctcttatctacaggggtgttcattggctggacacctttcctgtgcattgtcctgagctacatttgtattataagcaccattttgcgtatccaatcttctgagggtcggcgcaaggcttttagcacatgcgcgtcccacttggctattgtatttctgttttacgggtcagcgattttcacgtacgtcagacccatctccacctacagtctgaagaaggaccgtctcgtgtcagtactgtacagcgtagtaaccccgatgctgaaccctattatttacacactgaggaacaaggatatcaaggaggctgtgaaaacgatagggtccaagtggcaacctcctattagttctttagacagtaagctgacctactag

SEQ ID NO: 220456 - DNA, 966 bp, Artificial Sequence
  derived and/or modified sequence
atggaacggaaaaatcaaaccgccataacggaatttatcattctgggcttcagcaatcttaacgagttgcagttcctactgtttacaattttcttcctgacctatttttgcacacttggcggcaacatacttataatacttaccaccgtcacggatcctcatctgcacacaccaatgtactacttcctggggaaccttgcttttatcgatatctgctataccacaagcaatgtcccccagatgatggtgcacctgttatcaaagaagaagtctataagttacgttggatgcgtcgtgcaattgtttgcgtttgtgttctttgtcggttccgagtgcctgctccttgcggctatggcctatgacagatacattgccatttgtaatccactccgctacagtgtgattttgtcgaaggtcctgtgcaatcaactggcagcaagctgttgggccgctggattcctgaatagcgtcgtgcacacagtcctgactttttgcctgcccttttgcggcaataaccagatcaattattttttttgtgatatcccccctctccttatcttgagttgcgggaacacttctgtgaacgagcttgccctgctatccacaggggtgttcatcggttggactccctttctttgtatagtcctgtcctatatttgcattattagcacgattcttcgcatccagagcagtgaggggcgccgcaaggccttctctacttgcgcttcgcacttggccatagtgttcctgttctatggcagtgcaatttttacatatgtccggcctatctccacttattcgctcaagaaagatcggctagtctcagtgctttatagtgtcgtcacccccatgctgaaccccatcatctacaccttacgaaacaaggacattaaagaggcagtgaagaccattggctccaagtggcagccacccatctcctctcttgacagcaagttaacttattag

SEQ ID NO: 220457 - DNA, 966 bp, Artificial Sequence
  derived and/or modified sequence
atggaaaggaaaaaccagactgctatcacagagttcattattctcggattttccaatctgaatgagctccaattcctcctgtttaccatttttttcctcacttacttctgtactctaggaggcaatatcctcattatccttaccacagtgacagatccccatctgcataccccaatgtattacttcctggggaatcttgcttttatagatatttgctatacaacatctaacgtgcctcagatgatggtgcatctgctcagtaagaagaagtcaatatcatatgtgggctgcgtcgttcagttgttcgcatttgtgttcttcgtcggctccgagtgcctgctgctggcagccatggcttatgatcgctacatagctatttgcaatcctttgcggtactctgtgattctgtcaaaagttctgtgcaaccagctcgccgcctcctgctgggccgccggtttccttaatagcgtagtgcacactgtcctcaccttttgtcttccattttgtggcaacaatcaaatcaactacttcttttgcgacataccccctctgctaatcctcagttgcggcaacacctctgtaaacgaactggccctcctgtccacaggcgtgttcataggttggacgcctttcctgtgcatcgtcctcagctacatctgcattatcagcacaattctacgtattcaatcgagcgaggggcgcagaaaggcattttctacgtgtgcttcacaccttgccattgtgtttctcttctatggatccgccatcttcacttacgtgcgccccatctctacctactcactcaaaaaggatagattggtgtctgttctgtatagtgtggtcaccccaatgctgaatcctataatttataccctgcgtaacaaggacattaaggaggccgtgaagactattggctctaagtggcagccacccatttccagcctggactccaagctgacctattag

SEQ ID NO: 220458 - DNA, 966 bp, Artificial Sequence
  derived and/or modified sequence
atggagcgaaaaaaccagactgcaattacggaattcattatattgggatttagcaatcttaatgagctgcaattcctgctcttcaccatattcttcttgacatacttctgtacactgggtggcaatattctcatcattctgactaccgtgacggatccacaccttcacaccccgatgtattactttctggggaatctggccttcattgacatctgctacacgacctctaacgtccctcaaatgatggttcacctgctgagcaagaaaaagtccatctcctacgttgggtgtgtggttcaactgttcgcctttgtcttttttgtgggatctgaatgcctgctattagcagccatggcctatgataggtatattgccatctgtaaccccctgaggtattcagtgatcctcagcaaagttctatgcaatcaacttgctgcgagctgttgggccgcaggatttctgaactctgtggtgcacacagtcctgactttctgtttacccttctgtgggaacaaccagattaactattttttctgcgatatcccaccactcctcatcctgtcctgcggcaatacaagcgtgaatgagctggcactactttccactggtgtgtttatcggctggacgcctttcctgtgcattgtgctgagctacatctgtatcatctctacaatccttaggatccagagctccgagggacggcggaaggctttttccacatgtgcatcccatctggcaatagttttcttattttatggttctgccattttcacttacgtgcggcccatttccacttatagtctgaaaaaggaccgccttgtatccgtcctatacagtgtggtcaccccaatgctgaaccccattatatacacactgcgtaacaaagacattaaggaggcagtgaagaccatcggctccaagtggcaaccccctatcagttcgctcgactcaaaactgacatactag

SEQ ID NO: 220459 - DNA, 966 bp, Artificial Sequence
  derived and/or modified sequence
atggagaggaaaaatcagacagccattactgaattcattatactgggtttcagtaacctaaacgagctccaattcctcctgtttacaattttttttctgacatacttttgtaccctcggtggcaatatcctcatcattttgacaactgttaccgacccgcacctgcatacgcccatgtactactttctggggaacctggcttttatagatatttgctacactacctccaacgtccctcaaatgatggtgcacctgctttctaaaaagaagagcatttcctatgttgggtgtgtcgtgcagttgttcgcctttgttttttttgtcggaagtgagtgcctgctgttggccgccatggcctacgatcgctacattgcgatctgcaacccgctgcgctacagcgtgatcttgtcaaaggttttatgtaaccaacttgccgcaagttgctgggctgctggcttcctcaatagcgtggtgcatacagtgctgaccttctgccttccattctgtggtaacaaccagattaactactttttttgtgacattcctccattgctgatccttagctgtgggaataccagcgtcaatgaactggcgctcctgagcactggggtctttattgggtggactccctttctgtgcatcgtgctgtcttatatatgtatcattagcaccattctccggatccaaagttcagaaggccggcggaaggccttctcgacatgcgcttcccacttagctatcgtgttcttattctatggaagtgctatatttacatatgtaaggccgatctctacttacagcctgaagaaagaccggctcgtgagtgtcctctactcagtggtcaccccaatgctgaatcccattatctacaccctccgcaataaggacattaaggaggctgtgaaaaccattggaagcaagtggcagccgcccatatcgagcctggattctaagctgacatattag

SEQ ID NO: 220460 - DNA, 966 bp, Artificial Sequence
  derived and/or modified sequence
atggagcggaagaaccagacagccatcaccgaatttattatcttaggtttctctaatctgaacgaactgcagtttctgcttttcaccattttcttcctgacctatttttgcacacttggcggtaacatattgatcattctgacaacagtgaccgatccacatctccatacgcccatgtactatttcttaggtaatcttgcttttattgacatttgctatacgacatccaacgtgccacaaatgatggtgcatctcctcagtaaaaagaaaagcatttcttacgttgggtgcgtggtccaactcttcgccttcgtgttttttgtaggaagcgagtgtctgctgctggccgccatggcgtacgatcgctatattgcgatttgtaacccactgagatacagtgtgatacttagcaaagtgctgtgcaaccagttggctgcttcctgttgggctgcaggctttttaaatagcgtggtgcacacggtgctgacattttgcttacctttttgtggaaacaatcagatcaactactttttctgcgacatccctccactgctaattttaagttgtggaaacacctcagtgaatgagttagctctgctgagcactggtgtctttattggatggacccctttcctgtgtattgtgctctcctacatttgtatcatcagcaccatcctgcgaatccagtctagtgaggggcggcggaaggccttttctacctgtgcttcgcatttggctatagtgtttctgttttacgggagcgcaattttcacttatgtacgccctatatcaacctatagtttgaagaaagaccgcttggtttctgtgctctattcagtagtaacccccatgctgaatcctattatatacactttgaggaacaaagatataaaggaagctgtaaagactattggtagtaagtggcagccccctatttcttccctcgactccaagctcacctattag

SEQ ID NO: 220461 - DNA, 966 bp, Artificial Sequence
  derived and/or modified sequence
atggagcggaagaaccagaccgccatcaccgaatttattatcctcggttttagcaatcttaatgaacttcagtttttgctgtttaccatcttctttctgacatatttttgcacactggggggaaacatcttgattattctaacaacagtgaccgatccgcatctgcacactccaatgtattactttctgggcaatctcgcattcattgacatctgttacaccactagcaatgtcccacagatgatggtacatctgctctcgaagaaaaaatcaatctcgtatgtgggttgcgttgtgcagctcttcgcctttgtgttttttgtcggctctgagtgtcttctcctcgcagccatggcttacgataggtatatcgcaatttgtaatcccttacggtatagcgtaattctgtcaaaagtcctgtgtaaccagctagccgcaagctgctgggctgctggtttccttaactctgttgttcacactgttctcactttctgcctacctttctgcggcaacaaccagattaactactttttttgcgatatacccccacttctgatcctctcatgtggcaataccagtgtgaatgagctcgccctgctgagtactggcgtgttcatcgggtggaccccctttctttgcattgtcttgtcctacatctgtataatttccacaatcctgcggatccagtcgtccgaaggaagaagaaaggcctttagcacgtgtgcctctcacctggccatagtcttccttttttacggcagtgctatattcacctacgtcagaccaataagcacatactcattgaagaaagatcggctggtctccgtgctttactctgtcgtgaccccaatgttaaatcctattatttacacactgagaaacaaggatataaaggaagcggtaaagaccatcggatccaaatggcagccacctataagttcgctggactcaaagcttacgtattag

SEQ ID NO: 220462 - DNA, 966 bp, Artificial Sequence
  derived and/or modified sequence
atggagcgtaagaatcagaccgctatcactgagtttatcattctagggttcagcaaccttaacgagctacagttcctgctgtttacgatctttttccttacctacttttgcactctcggcggaaacattctcattatcttgaccacagtaactgatcctcatctccatactcctatgtactactttcttggaaatctggctttcatcgatatctgctatacaacttccaacgtgccccagatgatggttcaccttctatccaaaaagaaatccatcagctacgtgggatgcgttgtgcagctttttgcttttgtgttcttcgtcggcagcgagtgtctcttactggctgccatggcctacgatagatacatagcaatttgcaaccccctccggtatagcgtgatcctgagcaaagtcctctgtaaccagctggccgccagctgctgggctgctggattcctcaacagcgtggttcacactgtcctgaccttctgtcttcctttttgcggcaacaatcaaattaactattttttttgcgatatccctccactcttaatcctgtcttgtgggaacacttctgtcaacgagctggcccttctgagcactggcgtgttcatcggctggacacccttcctgtgcatcgttttgtcttacatctgcattatcagtactatcctgagaatccaaagttccgaagggaggagaaaagcattctctacatgcgcctctcatctggctatcgtgtttctgttctacggttccgccatctttacatacgtccgaccaatttccacatattctcttaaaaaagaccggcttgtctcggttctgtactcggtggtaactccaatgctgaatcctatcatctatacgcttcgcaataaagatataaaagaggctgtgaagaccatcggatccaagtggcaaccgcccatcagctcattagatagcaagcttacctattag

SEQ ID NO: 220463 - DNA, 966 bp, Artificial Sequence
  derived and/or modified sequence
atggagaggaagaatcagacagctattaccgagttcatcattttaggattctccaacctcaacgagctgcagtttctgctttttacgatttttttcctgacctacttttgtaccttaggagggaatatcctaattattttgacaaccgtcactgaccctcaccttcacacacctatgtactacttcttgggaaatctggcttttattgacatatgctatacaacttccaacgtgccccagatgatggtgcatctgctctccaaaaagaagagcatctcctatgttggctgcgtggtccagctgttcgcctttgtgttcttcgtagggagtgagtgtctgctccttgccgccatggcatatgaccgctacatcgcaatttgtaatccgctaaggtactccgttatactttcaaaagttctgtgtaatcaactggccgcttcttgctgggcggcaggatttctgaactcagtagtgcatactgttctcacgttctgcctacctttttgcggtaacaaccagatcaactatttcttctgtgacattcctcccctgctgattctgtcttgtggcaacacctccgtcaatgagctggccctgctcagtacaggcgtgttcatcggatggactccattcctgtgtatcgttctaagctatatttgcattatcagtacaattctgagaatacagtcaagcgaaggtagacggaaggccttcagcacttgtgccagccacttggccatcgtgttcctgttctacggttcagcaatctttacatacgtcagaccaattagcacatactccctcaagaaggacagactggtttccgtcctgtatagcgtggtaacccccatgctcaaccctattatctacacacttcgaaacaaagatatcaaagaagcagttaaaaccatcgggtccaagtggcagcctcccatctccagtctggacagtaagctgacttattag

SEQ ID NO: 220464 - DNA, 966 bp, Artificial Sequence
  derived and/or modified sequence
atggagaggaagaaccagacagccatcacagagttcatcatcctgggcttcagcaacctgaatgagctgcagttcctgctcttcaccatcttcttcctgacctacttctgcaccctgggcggcaacatcctgatcatcctgaccaccgtgacagacccccacctgcacacccccatgtactacttcctgggcaacctggccttcatcgacatctgctacaccaccagcaatgtgccccagatgatggtgcacctgctgagcaagaagaagagcatctcctatgtgggctgtgtggtgcagctgtttgcctttgtgttctttgtgggctctgaatgtctgctgctggccgccatggcctatgaccgctacatcgccatctgcaaccccctgcgctacagcgtcatcctgagcaaggtgctgtgcaaccagctggccgccagctgctgggccgccggcttcctgaacagcgtggtgcacacagtgctgaccttctgcctgcccttctgtggcaacaaccagatcaactacttcttctgtgacatcccccccctgctgatcctgagctgtggcaacacctctgtgaatgagctggccctgctgagcactggagtcttcatcggctggacccccttcctgtgcatcgtgctgagctacatctgcatcatcagcaccatcctgcgcatccagagcagcgagggccgcaggaaggccttcagcacctgtgccagccacctggccatcgtgttcctgttctacggcagcgccatcttcacctacgtgcggcccatcagcacctacagcctgaagaaggaccggctggtgtctgtgctgtacagcgtggtgacccccatgctgaaccccatcatctacaccctgaggaacaaggacatcaaggaggccgtgaagaccatcggcagcaagtggcagccccccatcagcagcctggacagcaagctgacctactag

SEQ ID NO: 220465 - DNA, 966 bp, Artificial Sequence
  derived and/or modified sequence
atggagcggaagaaccagaccgccatcaccgagttcatcatcctgggattctccaatctgaacgagctgcagttcctgctgttcacaatctttttcttgacctacttctgcacactcggcggaaatatactaatcattctgaccacagtgaccgacccacatctgcacactccgatgtactactttctcggcaacctcgcattcatcgacatctgctataccaccagcaatgtcccccaaatgatggtgcatctgctgtccaaaaagaaaagcatcagttatgttgggtgcgtggtccagttgtttgccttcgtgtttttcgtgggatctgagtgcctcctactggccgctatggcctatgataggtatatcgccatctgcaaccctctacggtactctgtgattctatcgaaagttttgtgcaaccaactggccgcctcttgctgggccgcaggcttcctcaacagtgttgtgcacacagtgctgactttttgtctccctttctgcggtaataatcagatcaattatttcttctgtgatataccaccgctgttgatcctgtcttgcggtaatacctccgtgaacgaacttgcactcctgtccactggtgtgtttatcggatggacccctttcctttgcatcgtgttgtcttacatatgtattatttccacaatcctcagaatccagagcagtgaggggcgaagaaaagcattcagtacctgcgcctcccatctggccatcgtttttttgttctacggttctgctatttttacatacgtaagacccatttctacatactcactgaaaaaagatcggctggtatctgtgctttacagcgttgttacccctatgctaaaccctattatttacactctgcgcaataaggacataaaagaggcggtaaagacaatcggaagcaagtggcagccccccatatcttcactagatagcaagctgacctactag

SEQ ID NO: 220466 - DNA, 966 bp, Artificial Sequence
  derived and/or modified sequence
atggagcggaagaaccagaccgccatcaccgagttcatcatcctgggattctcaaacttgaacgagctgcagtttttgttgttcaccattttttttcttacttacttctgtaccctcgggggaaacatcttaatcattctgacaaccgtgacggaccctcaccttcacactcccatgtactattttctcgggaatctggcgtttatagatatttgctacaccacttctaacgttcctcagatgatggtgcatctcctcagtaagaagaagagtatatcatacgtcggctgcgttgtgcagctctttgcatttgtgttctttgtggggagcgaatgcctgctgttagcagccatggcctatgatcggtatatcgccatttgcaatccactccgctattcagttatcctgtctaaagttctatgtaaccaactggcggcctcctgctgggccgccggctttttaaattcagtcgtgcatacagtgctcacattttgtctgcccttttgtggcaataaccaaattaattacttcttttgtgacattcctcccctcctcattctgtcctgcggaaacacgagtgttaacgagctcgccctcctcagcacgggcgtgttcattgggtggaccccattcctttgcatcgtcctgtcctatatttgtattatcagcaccatcttgcgcatccagagcagcgagggaaggagaaaggcgttcagtacgtgcgcctctcatctagccatcgtgttcttgttttacggaagtgcaatcttcacatacgtgaggcccatttctacatactccctcaagaaggaccggctggtatccgtgctgtatagcgtggtgacacccatgctgaatcccatcatctacactctccggaataaggacattaaagaggcggttaaaacgataggcagcaagtggcagcctcccatatccagcctagactcaaagctaacttattag

SEQ ID NO: 220467 - DNA, 966 bp, Artificial Sequence
  derived and/or modified sequence
atggagcggaagaaccagaccgccatcaccgagttcatcatcctgggcttcagtaaccttaacgaactccagtttctgctttttaccattttttttctgacatacttttgtacattgggaggaaatatcttaattatcctcactacagtgacagacccccacctacataccccaatgtactatttcctggggaacttggcattcatcgatatctgttatacaacttctaatgtgccccagatgatggtgcacctgctgtccaagaaaaaaagtatttcgtatgtgggatgcgtggtgcagctttttgcattcgttttctttgttggctccgaatgcctgctactggccgctatggcatacgacaggtacatcgccatttgtaaccccctacgctattccgtcattctgagtaaggtgttgtgcaaccaactcgccgccagttgttgggctgccggattcctgaattccgtcgttcacaccgtactgacattttgccttcctttttgtgggaacaatcagattaattactttttctgcgacatcccgcccttgctgatcctcagctgtggcaatacatctgtcaacgaactcgcccttctatcaacgggcgtgttcattgggtggactccgttcctttgcatcgtactgagttatatttgtatcatttctactatactgaggattcagagcagcgaaggaaggcgtaaagcattttcaacatgcgctagtcatctcgctatcgtgttcttgttttatggtagcgccatattcacatacgtgcggccgatctctacctacagcctcaagaaagatcgcctggtgagtgttctgtactcagttgtgactccgatgctcaacccaattatctatacgcttaggaacaaagacatcaaggaagcagtgaagactataggctccaaatggcagccaccaatcagttccctcgactccaaactcacttattag

SEQ ID NO: 220468 - DNA, 966 bp, Artificial Sequence
  derived and/or modified sequence
atggagcggaagaaccagaccgccatcaccgagttcatcatcctgggattttccaacctcaacgagctgcagtttctgttgtttactatttttttcctgacttacttctgtaccttaggcggcaatatcttgatcattctgacgaccgtgaccgacccacacctgcacactcctatgtactacttcctgggcaatctagcttttatagatatttgttatactactagtaacgtccctcagatgatggtgcatctgctgtccaagaaaaaaagtatctcctatgtggggtgtgtcgtgcagttattcgcctttgtattttttgtgggatccgagtgcctccttctcgcagccatggcatatgacaggtatatcgcaatctgcaaccctctcaggtatagtgtaatcttgtcgaaagtgttgtgcaatcagttggctgcgagctgttgggccgcaggctttctcaacagcgtcgtccacaccgttcttactttctgtctcccattttgcggcaacaaccagataaattacttcttctgtgatatacctcctttgctgatcctgtcctgcggaaacacatctgtaaatgaacttgctttactgtcaactggagtgtttattgggtggactcctttcctatgcattgtcctgtcctacatatgcatcatcagcaccatactcagaatccagagtagtgagggtcgccggaaggccttctctacatgcgcctctcaccttgcgattgtcttcctgttttatgggtccgcgattttcacgtacgttcggcctatcagcacatacagtttgaaaaaggacaggttagtttcagtcctttattcagtggttacccccatgctgaaccccataatctacaccttacggaacaaagacataaaagaagcggtcaaaacaattgggagcaaatggcagccgcctattagcagcctggactccaagctcacctattag

SEQ ID NO: 220469 - DNA, 966 bp, Artificial Sequence
  derived and/or modified sequence
atggagcggaagaaccagaccgccatcaccgagttcatcatcctggggttttcaaatctgaatgaactgcaatttctgttgtttaccatctttttcttaacatacttttgtaccctggggggcaatattcttataattcttactacagtcactgacccacacttgcatacaccgatgtattacttcctaggtaacctggctttcattgatatttgctacaccacctccaatgtacctcagatgatggtgcatctcctatccaagaaaaagtccatctcctatgttgggtgcgtggtgcagttgttcgcttttgtgtttttcgtgggttccgaatgcttgctgctggccgccatggcctatgacagatacattgcaatctgcaatccactgcgttactccgtgattttaagtaaggtcctgtgcaaccagctcgccgcatcttgttgggcagcaggatttctcaatagcgtcgtgcatacagtcttgaccttttgtctccctttctgtgggaacaatcaaattaattattttttctgtgacattcctcccctcctcattttaagttgtgggaatactagcgtgaacgaactggcactgctgagtaccggcgtgtttattggctggacccccttcttatgcattgtgcttagctacatatgcattatatccaccatcctgaggatacaatctagtgagggacgccgaaaagcatttagcacatgcgcaagccatctcgccattgtatttctgttctatggtagcgccatattcacctacgtgcgaccaatttccacttactccctgaaaaaagaccgcctagtctctgtattgtactcggtggtcacccctatgttgaatccaatcatttacactctgcggaacaaggacattaaagaggcagtgaagaccatcgggagcaagtggcagcctccgatttcttcactcgacagtaagctgacgtactag

SEQ ID NO: 220470 - DNA, 966 bp, Artificial Sequence
  derived and/or modified sequence
atggagcggaagaaccagaccgccatcaccgagttcatcatcctggggttctcgaacctgaacgaactccaattcctgctgtttaccatcttttttcttacctatttctgcaccctgggcgggaatattctgattatactgacaactgtgaccgatccgcatctgcacacacccatgtactattttctggggaacctagcctttattgatatctgttacaccacctccaatgtacctcagatgatggtgcacctgttgagcaaaaagaaaagcatctcttacgtggggtgtgtagtacagctcttcgcctttgtcttctttgtgggctccgaatgtttgcttctcgctgccatggcctatgataggtacatcgcgatctgtaaccccctgagatatagcgtgatcctgtcgaaggtcctgtgtaatcagctggccgcaagctgttgggccgctgggtttcttaacagtgtggtgcacacagtgcttaccttttgtttgcctttttgcggtaataaccagattaattattttttttgcgatattccccccctactgattctgagttgtggcaatacatccgtcaatgaattggctctgctttctacgggcgtcttcatcggatggacaccttttctttgcatcgtgttatcatacatctgcatcatatctactatcctgcgaattcagtccagcgagggcaggcggaaagcattcagcacttgcgctagtcatcttgccatcgtatttttgttttacggtagtgctatttttacatatgtccgaccaatcagcacatactccctgaaaaaggaccgccttgtgagcgtactttattcagtggttacgcccatgttaaaccctattatctacacattgaggaataaagacatcaaagaggccgtgaagactattggctccaagtggcagccccccatctcaagcctagattcaaagcttacttactag

SEQ ID NO: 220471 - DNA, 966 bp, Artificial Sequence
  derived and/or modified sequence
atggagcggaagaaccagaccgccatcaccgagttcatcatcctggggttttccaatctgaatgagctccagttccttctgttcacaattttcttcctgacctatttttgcaccttgggcggcaacatcttaatcattctgacaaccgttacagatcctcatctgcatacgcccatgtactacttcttaggaaacctcgcttttattgatatttgctacaccaccagtaacgtgccacagatgatggtccacctcttatccaagaagaaatctatatcctatgtggggtgtgtcgttcagcttttcgccttcgtctttttcgttggttccgagtgcttgttgttggctgctatggcatacgatagatatattgcgatctgcaatcctctgcggtatagcgtgatcctgagtaaggtgttatgcaatcagcttgcggcaagttgttgggctgccgggtttcttaacagcgtagtgcataccgttcttacattttgtctgcctttttgcggaaacaaccagattaattacttcttctgtgatatcccgccattgttaatactgtcatgcggcaatactagcgtaaacgaactcgccttactgtctaccggggtgtttattggatggaccccattcctgtgcattgtgctgtcttacatctgtatcatttctactattctccggatacagtctagtgaaggaaggagaaaggccttctctacatgtgcttcacacctggcaatcgtgttcctcttctacggatcagccatctttacctacgtccgcccaattagcacctatagcttaaaaaaggacagactggtgtccgtgctgtattcagttgtgactccaatgctgaaccccattatctacaccctgcgcaataaagatatcaaggaagcagttaagacaatcgggagcaaatggcagccccccatcagttcactggattccaaattgacatattag

SEQ ID NO: 220472 - DNA, 966 bp, Artificial Sequence
  derived and/or modified sequence
atggagcggaagaaccagaccgccatcaccgagttcatcatcctgggcttcagtaacctaaacgagctccagtttctgctgttcacaatctttttcctcacatacttttgcaccctgggaggtaacatcctaataattttaactaccgtaaccgatccccacttacatacacccatgtactactttctggggaacctggcattcatagacatatgctacaccacttcaaatgtgccccagatgatggtgcacctgctgtcaaaaaagaagtccatctcttatgtcggctgcgtcgtacagttattcgcgtttgtctttttcgtaggctccgagtgcttgctgctggccgcaatggcttacgatcggtatattgcaatctgcaatccactccgatactctgtgattctgtcaaaagtactgtgcaatcagctggcggcatcctgttgggctgcaggattcctcaattcggtagtccatacagtactgactttttgtctgccgttttgtggtaataaccaaatcaactacttcttctgtgacatcccccctctgctgatcttgtcctgtggaaacacatctgtgaatgagcttgcactgcttagcacaggtgttttcattggttggaccccttttctctgcatcgtattgtcttacatctgtatcatcagtacgatcctgcgcatccagtctagcgaaggacgcaggaaagcattctccacctgtgcgagccatctggcgattgtgtttctcttctacggcagcgccatcttcacctatgtaaggcccatcagtacctatagccttaagaaagaccgactggtttcggtgctgtactcggtcgtcacgcctatgctgaatccgattatatacacattgcgtaacaaagatatcaaggaagccgtcaagaccattggtagcaaatggcagcctcccatttccagtcttgatagtaaactgacctactag

SEQ ID NO: 220473 - DNA, 966 bp, Artificial Sequence
  derived and/or modified sequence
atggagcggaagaaccagaccgccatcaccgagttcatcatcctgggcttttcgaaccttaacgagcttcagtttcttttgttcacaattttctttctcacatacttctgcacacttgggggaaatatcctcattatcctgactacggtcaccgaccctcatttgcatacacccatgtattacttcctggggaacctggcttttatcgatatatgctacactacgtccaatgtcccccagatgatggtccatttactctctaagaagaagagcatctcctatgtgggctgcgtggttcagctgttcgctttcgttttttttgtgggctccgaatgcttgctactcgcagccatggcctacgatcggtacatcgctatctgcaatcccttacgctatagcgtgattctctctaaggtactgtgtaaccagttggcggcctcatgctgggccgcgggattccttaatagtgttgtccacacggttctgactttctgcttgccattctgcggcaacaaccagatcaactattttttttgcgacatccctcccctcctgatcctatcttgcgggaacacgtctgtgaatgagttagccctgctttcaacaggtgtgttcattggatggactccctttctttgtattgtgctgtcgtacatctgcataatctcaactatcctcaggattcagagctctgaaggtaggcggaaagcctttagtacctgcgcaagccatctcgcaatagtgtttttgttctacggaagcgcaatatttacttacgtacgccccatttctacctatagccttaagaaggaccgcctggtgtcagtcctctatagtgttgttacgccgatgctgaatcctattatttacaccttgcggaataaggatatcaaagaagcagtcaaaacgatcggatctaaatggcagccccccatttctagtctggatagcaaactgacatattag

SEQ ID NO: 220474 - DNA, 1117 bp, Artificial Sequence
  derived and/or modified sequence
gaaatacgttgtgaacttcccagcacatctgttagaaaggaggtccagaaaaagagcacaaagagaatggtcatgctattgcagcatatgattcatttttataatctggtcttctctttgcccaattcctgaaaggaaaccaggcgacatcatggaaagaaagaatcaaacagctataactgaattcatcatcttgggattctccaacctaaatgaattgcagtttttactattcaccatcttctttctgacttatttctgtactttgggaggaaatatattaattatcttgacgactgtgactgatccacacctgcatacacctatgtattattttctagggaacttggcctttattgacatctgctacaccaccagcaatgtcccccagatgatggtgcacctcctctcaaagaaaaaaagcatttcttatgtggggtgtgtggttcaactttttgcatttgttttctttgtaggatcagagtgtctcctactggcagcaatggcatatgatcgttacattgcaatctgcaatcctttaaggtattcagttattctgagcaaggttctatgcaatcaattagcagcctcatgctgggctgctggtttccttaactcagtggtgcatacagtgttgacattctgcctgcccttctgtggcaacaatcagattaattacttcttctgtgacatcccccctttgctgatcttgtcttgtggaaacacttctgtcaatgagttggcactgctatccactggggtcttcattggttggactcctttcctttgtatcgtactttcctacatttgcataatctccaccatcttgaggatccagtcctcagagggaagacgaaaagccttctctacatgtgcctcccacctggccattgtctttctcttttatggcagcgccatctttacatatgtacggcccatctcaacttactcattaaagaaagataggttggtttcagtgttgtacagtgttgttacccccatgctaaaccctataatttacacattgaggaataaggacatcaaagaagctgtcaaaactatagggagcaagtggcagccaccaatttcctctttggatagtaaactcacttattga

SEQ ID NO: 220475 - DNA, 1266 bp, Artificial Sequence
  derived and/or modified sequence
gagctgaaggtaggaaattccaacattctgaagtcttcagcaaatcttagcagatcatctcctcctcacagtcctgtctttagagaacagggtcgatatttcggcttctgcgaactcagatgtcatcttttcttccctaaagtttttaaagttcctattgatatattcccctgcctagagggtttggtggtcgttttcttcctcttaactttattaaggtcatgctattgcagcatatgattcatttttataatctggtcttctctttgcccaattcctgaaaggaaaccaggcgacatcatggaaagaaagaatcaaacagctataactgaattcatcatcttgggattctccaacctaaatgaattgcagtttttactattcaccatcttctttctgacttatttctgtactttgggaggaaatatattaattatcttgacgactgtgactgatccacacctgcatacacctatgtattattttctagggaacttggcctttattgacatctgctacaccaccagcaatgtcccccagatgatggtgcacctcctctcaaagaaaaaaagcatttcttatgtggggtgtgtggttcaactttttgcatttgttttctttgtaggatcagagtgtctcctactggcagcaatggcatatgatcgttacattgcaatctgcaatcctttaaggtattcagttattctgagcaaggttctatgcaatcaattagcagcctcatgctgggctgctggtttccttaactcagtggtgcatacagtgttgacattctgcctgcccttctgtggcaacaatcagattaattacttcttctgtgacatcccccctttgctgatcttgtcttgtggaaacacttctgtcaatgagttggcactgctatccactggggtcttcattggttggactcctttcctttgtatcgtactttcctacatttgcataatctccaccatcttgaggatccagtcctcagagggaagacgaaaagccttctctacatgtgcctcccacctggccattgtctttctcttttatggcagcgccatctttacatatgtacggcccatctcaacttactcattaaagaaagataggttggtttcagtgttgtacagtgttgttacccccatgctaaaccctataatttacacattgaggaataaggacatcaaagaagctgtcaaaactatagggagcaagtggcagccaccaatttcctctttggatagtaaactcacttattga

SEQ ID NO: 220476 - DNA, 1117 bp, Artificial Sequence
  derived and/or modified sequence
gaaatacgttgtgaacttcccagcacatctgttagaaaggaggtccagaaaaagagcacaaagagaatggtcatgctattgcagcatatgattcatttttataatctggtcttctctttgcccaattcctgaaaggaaaccaggcgacatcatggaaagaaagaatcaaacagctataactgaattcatcatcttgggattctccaacctaaatgaattgcagtttttactattcaccatcttctttctgacttatttctgtactttgggaggaaatatattaattatcttgacgactgtgactgatccacacctgcatacacctatgtattattttctagggaacttggcctttattgacatctgctacaccaccagcaatgtcccccagatgatggtgcacctcctctcaaagaaaaaaagcatttcttatgtggggtgtgtggttcaactttttgcatttgttttctttgtaggatcagagtgtctcctactggcagcaatggcatatgatcgttacattgcaatctgcaatcctttaaggtattcagttattctgagcaaggttctatgcaatcaattagcagcctcatgctgggctgctggtttccttaactcagtggtgcatacagtgttgacattctgcctgcccttctgtggcaacaatcagattaattacttcttctgtgacatcccccctttgctgatcttgtcttgtggaaacacttctgtcaatgagttggcactgctatccactggggtcttcattggttggactcctttcctttgtatcgtactttcctacatttgcataatctccaccatcttgaggatccagtcctcagagggaagacgaaaagccttttctacatgtgcctcccacctggccattgtctttctcttttatggcagcgccatctttacatatgtacggcccatctcaacttactcattaaagaaagataggttggtttcagtgttgtacagtgttgttacccccatgctaaaccctataatttacacattgaggaataaggacatcaaagaagctgtcaaaactatagggagcaagtggcagccaccaatttcctctttggatagtaaactcacttattga

SEQ ID NO: 220477 - DNA, 1266 bp, Artificial Sequence
  derived and/or modified sequence
gagctgaaggtaggaaattccaacattctgaagtcttcagcaaatcttagcagatcatctcctcctcacagtcctgtctttagagaacagggtcgatatttcggcttctgcgaactcagatgtcatcttttcttccctaaagtttttaaagttcctattgacatattcccctgcctagagggtttggtggtcgttttcttcctcttaactttattaaggtcatgctattgcagcatatgattcatttttataatctggtcttctctttgcccaattcctgaaaggaaaccaggcgacatcatggaaagaaagaatcaaacagctataactgaattcatcatcttgggattctccaacctaaatgaattgcagtttttactattcaccatcttctttctgacttatttctgtactttgggaggaaatatattaattatcttgacgactgtgactgatccacacctgcatacacctatgtattattttctagggaacttggcctttattgacatctgctacaccaccagcaatgtcccccagatgatggtgcacctcctctcaaagaaaaaaagcatttcttatgtggggtgtgtggttcaactttttgcgtttgttttctttgtaggatcagagtgtctcctactggcagcaatggcatatgatcgttacattgcaatctgcaatcctttaaggtattcagttattctgagcaaggttctatgcaatcaattagcagcctcatgctgggctgctggtttccttaactcagtggtgcatacagtgttgacattctgcctgcccttctgtggcaacaatcagattaattacttcttctgtgacatcccccctttgctgatcttgtcttgtggaaacacttctgtcaatgagttggcactgctatccactggggtcttcattggttggactcctttcctttgtatcgtactttcctacatttgcataatctccaccatcttgaggatccagtcctcagagggaagacgaaaagccttttctacatgtgcctcccacctggccattgtctttctcttttatggcagcgccatctttacatatgtacggcccatctcaacttactcattaaagaaagataggttggtttcagtgttgtacagtgttgttacccccatgctaaaccctataatttacacattgaggaataaggacatcaaagaagctgtcaaaactatagggagcaagtggcagccaccaatttcctctttggatagtaaactcacttattga

SEQ ID NO: 220478 - DNA, 1266 bp, Artificial Sequence
  derived and/or modified sequence
gagctgaaggtaggaaattccaacattctgaagtcttcagcaaatcttagcagatcatctcctcctcacagtcctgtctttagagaacagggtcgatatttcggcttctgcgaactcagatgtcatcttttcttccctaaagtttttaaagttcctattgatatattcccctgcctagagggtttggtggtcgttttcttcctcttaactttattaaggtcatgctattgcagcatatgattcatttttataatctggtcttctctttgcccaattcctgaaaggaaaccaggcgacatcatggaaagaaagaatcaaacagctataactgaattcatcatcttgggattctccaacctaaatgaattgcagtttttactattcaccatcttctttctgacttatttctgtactttgggaggaaatatattaattatcttgacgactgtgactgatccacacctgcatacacctatgtattattttctagggaacttggcctttattgacatctgctacaccaccagcaatgtcccccagatgatggtgcacctcctctcaaagaaaaaaagcatttcttatgtggggtgtgtggttcaactttttgcatttgttttctttgtaggatcagagtgtctcctactggcagcaatggcatatgatcgttacattgcaatctgcaatcctttaaggtattcagttattctgagcaaggttctatgcaatcaattagcagcctcatgctgggctgctggtttccttaactcagtggtgcatacagtgttgacattctgcctgcccttctgtggcaacaatcagattaattacttcttctgtgacatcccccctttgctgatcttgtcttgtggaaacacttctgtcaatgagttggcactgctatccactggggtcttcattggttggactcctttcctttgtatcgtactttcctacatttgcataatctccaccatcttgaggatccagtcctcagagggaagacgaaaagccttttctacatgtgcctcccacctggccattgtctttctcttttatggcagcgccatctttacatatgtacggcccatctcaacttactcattaaagaaagataggttggtttcagtgttgtacagtgttgttacccccatgctaaaccctataatttacacattgaggaataaggacatcaaagaagctgtcaaaactatagggagcaagtggcagccaccaatttcctctttggatagtaaactcacttattga

SEQ ID NO: 220479 - DNA, 1117 bp, Artificial Sequence
  derived and/or modified sequence
gaaatacgttgtgaacttcccagcacatctgttagaaaggaggtccagaaaaagagcacaaagagaatggtcatgctattgcagcatatgattcatttttataatctggtcttctctttgcccaattcctgaaaggaaaccaggcgacatcatggaaagaaagaatcaaacagctataactgaattcatcatcttgggattctccaacctaaatgaattgcagtttttactattcaccatcttctttctgacttatttctgtactttgggaggaaatatattaattatcttgacgactgtgactgatccacacctgcatacacctatgtattattttctagggaacttggcctttattgacatctgctacaccaccagcaatgtcccccagatgatggtgcacctcctctcaaagaaaaaaagcatttcttatgtggggtgtgtggttcaactttttgcgtttgttttctttgtaggatcagagtgtctcctactggcagcaatggcatatgatcgttacattgcaatctgcaatcctttaaggtattcagttattctgagcaaggttctatgcaatcaattagcagcctcatgctgggctgctggtttccttaactcagtggtgcatacagtgttgacattctgcctgcccttctgtggcaacaatcagattaattacttcttctgtgacatcccccctttgctgatcttgtcttgtggaaacacttctgtcaatgagttggcactgctatccactggggtcttcattggttggactcctttcctttgtatcgtactttcctacatttgcataatctccaccatcttgaggatccagtcctcagagggaagacgaaaagccttttctacatgtgcctcccacctggccattgtctttctcttttatggcagcgccatctttacatatgtacggcccatctcaacttactcattaaagaaagataggttggtttcagtgttgtacagtgttgttacccccatgctaaaccctataatttacacattgaggaataaggacatcaaagaagctgtcaaaactatagggagcaagtggcagccaccaatttcctctttggatagtaaactcacttattga

SEQ ID NO: 220480 - DNA, 1048 bp, Artificial Sequence
  derived and/or modified sequence
gtcatgctattgcagcatatgattcatttttataatctggtcttctctttgcccaattcctgaaaggaaaccaggcgacatcatggaaagaaagaatcaaacagctataactgaattcatcatcttgggattctccaacctaaatgaattgcagtttttactattcaccatcttctttctgacttatttctgtactttgggaggaaatatattaattatcttgacgactgtgactgatccacacctgcatacacctatgtattattttctagggaacttggcctttattgacatctgctacaccaccagcaatgtcccccagatgatggtgcacctcctctcaaagaaaaaaagcatttcttatgtggggtgtgtggttcaactttttgcatttgttttctttgtaggatcagagtgtctcctactggcagcaatggcatatgatcgttacattgcaatctgcaatcctttaaggtattcagttattctgagcaaggttctatgcaatcaattagcagcctcatgctgggctgctggtttccttaactcagtggtgcatacagtgttgacattctgcctgcccttctgtggcaacaatcagattaattacttcttctgtgacatcccccctttgctgatcttgtcttgtggaaacacttctgtcaatgagttggcactgctatccactggggtcttcattggttggactcctttcctttgtatcgtactttcctacatttgcataatctccaccatcttgaggatccagtcctcagagggaagacgaaaagccttctctacatgtgcctcccacctggccattgtctttctcttttatggcagcgccatctttacatatgtacggcccatctcaacttactcattaaagaaagataggttggtttcagtgttgtacagtgttgttacccccatgctaaaccctataatttacacattgaggaataaggacatcaaagaagctgtcaaaactatagggagcaagtggcagccaccaatttcctctttggatagtaaactcacttattga

SEQ ID NO: 220481 - DNA, 1048 bp, Artificial Sequence
  derived and/or modified sequence
gtcatgctattgcagcatatgattcatttttataatctggtcttctctttgcccaattcctgaaaggaaaccaggcgacatcatggaaagaaagaatcaaacagctataactgaattcatcatcttgggattctccaacctaaatgaattgcagtttttactattcaccatcttctttctgacttatttctgtactttgggaggaaatatattaattatcttgacgactgtgactgatccacacctgcatacacctatgtattattttctagggaacttggcctttattgacatctgctacaccaccagcaatgtcccccagatgatggtgcacctcctctcaaagaaaaaaagcatttcttatgtggggtgtgtggttcaactttttgcatttgttttctttgtaggatcagagtgtctcctactggcagcaatggcatatgatcgttacattgcaatctgcaatcctttaaggtattcagttattctgagcaaggttctatgcaatcaattagcagcctcatgctgggctgctggtttccttaactcagtggtgcatacagtgttgacattctgcctgcccttctgtggcaacaatcagattaattacttcttctgtgacatcccccctttgctgatcttgtcttgtggaaacacttctgtcaatgagttggcactgctatccactggggtcttcattggttggactcctttcctttgtatcgtactttcctacatttgcataatctccaccatcttgaggatccagtcctcagagggaagacgaaaagccttttctacatgtgcctcccacctggccattgtctttctcttttatggcagcgccatctttacatatgtacggcccatctcaacttactcattaaagaaagataggttggtttcagtgttgtacagtgttgttacccccatgctaaaccctataatttacacattgaggaataaggacatcaaagaagctgtcaaaactatagggagcaagtggcagccaccaatttcctctttggatagtaaactcacttattga

SEQ ID NO: 220482 - DNA, 1048 bp, Artificial Sequence
  derived and/or modified sequence
gtcatgctattgcagcatatgattcatttttataatctggtcttctctttgcccaattcctgaaaggaaaccaggcgacatcatggaaagaaagaatcaaacagctataactgaattcatcatcttgggattctccaacctaaatgaattgcagtttttactattcaccatcttctttctgacttatttctgtactttgggaggaaatatattaattatcttgacgactgtgactgatccacacctgcatacacctatgtattattttctagggaacttggcctttattgacatctgctacaccaccagcaatgtcccccagatgatggtgcacctcctctcaaagaaaaaaagcatttcttatgtggggtgtgtggttcaactttttgcgtttgttttctttgtaggatcagagtgtctcctactggcagcaatggcatatgatcgttacattgcaatctgcaatcctttaaggtattcagttattctgagcaaggttctatgcaatcaattagcagcctcatgctgggctgctggtttccttaactcagtggtgcatacagtgttgacattctgcctgcccttctgtggcaacaatcagattaattacttcttctgtgacatcccccctttgctgatcttgtcttgtggaaacacttctgtcaatgagttggcactgctatccactggggtcttcattggttggactcctttcctttgtatcgtactttcctacatttgcataatctccaccatcttgaggatccagtcctcagagggaagacgaaaagccttttctacatgtgcctcccacctggccattgtctttctcttttatggcagcgccatctttacatatgtacggcccatctcaacttactcattaaagaaagataggttggtttcagtgttgtacagtgttgttacccccatgctaaaccctataatttacacattgaggaataaggacatcaaagaagctgtcaaaactatagggagcaagtggcagccaccaatttcctctttggatagtaaactcacttattga

SEQ ID NO: 220483 - DNA, 966 bp, Artificial Sequence
  derived and/or modified sequence
atggaaaggaaaaaccaaactgccatcaccgagtttataatcttgggattctccaatctgaacgaattgcagttcctgctctttacaatcttctttttaacctatttctgcacattaggcggtaacattctcatcatcttaaccactgttactgatccgcaccttcataccccaatgtactactttctcggcaacctagctttcatcgacatttgttataccacaagcaacgtgcctcagatgatggttcaccttctgagcaaaaagaagtccatttcatatgttggctgcgtggttcagcttttcgcattcgtattctttgtagggagcgagtgcttgctcctggctgccatggcctatgataggtatatcgccatatgtaacccacttaggtacagcgtcatcctgagcaaagtgctgtgcaatcagctggccgcatcgtgttgggcagctggtttcctgaactcggtagtgcacactgtgctgaccttttgtctgcctttctgcggtaacaaccaaatcaattattttttctgtgacataccccctctgcttatccttagctgtggaaataccagtgtgaacgagctggcactgctgtctacaggggtttttatcggctggacaccatttctgtgtatagttttgagttatatttgtatcatcagtactatcctgcgcatccaaagttccgaaggaaggcgcaaggccttctctacatgtgctagtcacctagccatcgtgtttctgttttatgggtcagcaatttttacctacgtgcggcctatctctacatacagcctgaaaaaggaccgtctggtgagcgtattatattctgtcgtcacaccaatgctgaaccccattatctataccctgcgaaataaagacatcaaagaggcggtcaagacaatcggctctaagtggcaaccaccgatctcctctttggattcaaaacttacgtactag

SEQ ID NO: 220484 - DNA, 966 bp, Artificial Sequence
  derived and/or modified sequence
atggaaaggaaaaaccagaccgctatcactgaatttattatcttaggcttctccaacctcaacgaactccagttccttctgtttaccatcttttttttgacgtacttttgcactcttggagggaatattctgattattcttacgaccgtgactgacccacatctgcacaccccaatgtattactttcttggcaatttggctttcattgatatatgttacactacctcaaatgtgccacaaatgatggtacacctgctgtcaaagaaaaagtctatcagttacgttggctgcgtcgtccagctatttgcctttgtgttctttgtcggaagtgagtgcttgttattagctgctatggcgtacgatcgatacattgccatttgcaacccgcttcggtacagtgtgatactgagcaaagtactgtgtaatcagttggctgctagttgttgggcagctggctttctaaactcagttgtccacaccgtgctcacattttgcttgccgttctgtggcaacaaccaaatcaattacttcttctgcgacatcccgcctttgctaatactcagctgtggtaacacatcagtaaatgaactcgccttgctctcaacaggcgtcttcatcgggtggacgccattcctgtgcatcgtcttgtcctatatatgtatcatctcgactatcctgcgcatccagagctcagagggacgacggaaagcattttcgacttgtgccagtcacctcgccatcgtcttcctgttttacggctctgctatttttacatatgtacgcccaatttctacatacagcctcaagaaagataggctggtgtctgtcctgtattcagtggtgacccctatgcttaacccaatcatctatacacttaggaataaggacatcaaagaagccgtgaaaactattggaagcaagtggcaaccaccaatcagttcactggatagcaagctgacttactag

SEQ ID NO: 220485 - DNA, 966 bp, Artificial Sequence
  derived and/or modified sequence
atggagcgaaagaaccagacagctatcacagagttcattatcctggggtttagcaatcttaacgaactccagtttttgctgttcaccatcttctttcttacatatttctgtacactgggcggaaacatcctgattatcctaacaaccgtgacggacccacatctccacacccccatgtattacttcctcggaaaccttgcattcattgacatatgctatacaacatcaaacgtgccccagatgatggtgcatctattatcaaagaaaaagtctattagctatgtggggtgcgtggttcagcttttcgcattcgtcttttttgtcggctctgagtgcctattgctggcggcaatggcatatgaccgctatattgctatctgcaaccccctcaggtactccgtgatcttgagtaaggtgttgtgcaatcaactggcggcttcatgctgggccgcaggattccttaacagcgttgtgcatacagtgctgacgttttgcctgccattctgcggcaacaaccagattaattacttcttctgcgacatcccaccactgctgatcctcagctgcggcaacaccagcgtgaatgagcttgccctgctctctactggagtgtttataggctggacacctttcctctgtatcgttctatcatatatttgcatcatctccaccatccttagaatacagagtagcgagggcaggcggaaggctttcagcacctgtgcatctcatcttgcaattgtgttcctcttttatggaagtgctatttttacatacgtgcgccctataagtacatattccttgaagaaggaccgattggttagcgtgctgtactcagtggtcaccccgatgctgaatccaataatttacacactccggaataaagacatcaaggaggccgtgaagaccataggctcgaaatggcagcctcccatctcttccctggattccaaactgacatactag

SEQ ID NO: 220486 - DNA, 966 bp, Artificial Sequence
  derived and/or modified sequence
atggaaaggaaaaaccagactgccatcaccgaatttatcattctcgggttttccaaccttaatgagcttcagtttttgttgttcacgattttcttcctcacatacttttgcaccctcggcggtaacattttgattatcctcacaaccgttaccgacccccacctgcacactcccatgtattattttctgggcaacttagccttcatcgacatttgttacactactagcaacgtgccccagatgatggtccacctgttatccaaaaagaagtcaatttcgtacgtcggctgcgtggtgcagctatttgcctttgtattttttgtgggcagtgagtgtctgctgcttgcagccatggcatatgaccgttatatcgcaatttgcaatccgctaagatatagcgtaattctgagcaaagttctgtgtaaccagctggctgcgtcatgttgggctgccggatttttgaactccgtcgtccacacagtattgactttctgtctgcctttttgcggaaacaaccagatcaactacttcttctgtgacatcccacccctattgattctttcctgcggtaacaccagcgttaatgagttggcactgctgtccacaggcgtgttcattgggtggacccccttcttatgtattgttttatcctatatatgtatcatcagcaccatactgcgcatccagagctcagaggggaggcgcaaggctttctccacttgtgcaagtcatctagctatcgtttttctgttttacgggagtgccatctttacctacgtgcgaccaatcagcacttatagtttgaaaaaagataggctcgtgagcgtgttatactcagtcgttactcctatgctcaacccgatcatctacaccttgcgtaacaaagacattaaggaggctgtgaaaaccatcggatccaagtggcagcccccaatcagcagccttgattccaagctcacctactag

SEQ ID NO: 220487 - DNA, 966 bp, Artificial Sequence
  derived and/or modified sequence
atggagagaaaaaaccagacagcaataacagagtttattattctgggcttctccaacctgaacgaacttcaattcctgctatttactattttcttcttgacctatttttgcaccctgggcggaaacattttgatcatactgacaaccgtgactgatcctcacctgcacactcctatgtattactttctcggaaatctggcattcattgacatttgttacaccacgtctaacgtgcctcagatgatggtacacctcttgagcaaaaagaaatcaattagttacgtgggttgtgtggtccagctgttcgctttcgtatttttcgtgggctctgagtgtttactcctggcagccatggcttatgacagatacatagcaatctgtaatccgctgcgatattctgttattctgtccaaagtgctctgcaaccaactggccgctagctgctgggccgcagggttcctgaacagcgtcgtccataccgtgttgactttctgtctccctttctgtggcaataaccaaatcaattacttcttctgcgacatccctcccctgttgatactcagctgcgggaatacatcagtgaacgagctggcattgctctccactggggtgtttatcggctggactccattcctgtgcatcgtcctgagttacatctgtatcatctcaacgattttgcgaatccagtcttccgaaggaagacgtaaggctttcagcacctgtgcctctcacctcgcaatagtgttcttgttttatggtagcgccatcttcacatatgttcggccaattagcacctacagtctgaagaaggacagactcgtttccgtgctgtattctgtggtgacccctatgctgaaccctatcatctacaccctcagaaacaaagatataaaagaggctgtcaaaactattggcagcaaatggcagcctccaatttcctctctggactctaaactcacatactag

SEQ ID NO: 220488 - DNA, 966 bp, Artificial Sequence
  derived and/or modified sequence
atggagcggaaaaaccagaccgctatcactgagtttatcattttgggatttagcaatctaaacgagctgcagtttcttttattcaccatattcttccttacctatttctgtaccctcggcggaaatattctgatcatactgacaaccgtgacagatccacacctgcatacacccatgtattactttcttggaaacttggctttcattgatatttgttacaccacatccaacgtgcctcagatgatggtgcacttattgagcaagaagaaaagcatatcatacgtgggatgtgtggtgcagctctttgcttttgtgttcttcgttggctctgagtgcctgctgctagcagcgatggcctatgaccgctacattgcaatttgcaacccactgcgctattcagtgattctctcaaaagtcctgtgcaaccaactggcggctagctgctgggccgctggctttctcaactccgtggtacatactgtactgacattctgcctgcctttctgcggtaacaatcagattaactatttcttctgcgacatccctcccttgcttatattgagttgcggcaatacctcagttaatgagttggctctcctctcaaccggcgtgttcattggctggactccttttctgtgtattgtgttaagctacatttgcatcataagcaccatccttcgcatccagagctctgagggacgtcgtaaagcattcagtacatgcgcttcgcaccttgctatagtttttctgttttatgggtctgcgatcttcacttatgtcaggcccatttcaacatactctctgaaaaaggacaggctggtcagcgtgctgtattccgtcgtgacacccatgctgaatcctatcatctacacactgcgcaataaagacatcaaagaagcggtgaagactattgggagcaaatggcagccgccaatatctagcctcgactctaagctgacctactag

SEQ ID NO: 220489 - DNA, 966 bp, Artificial Sequence
  derived and/or modified sequence
atggagcgtaagaatcagacagctatcaccgagttcatcatcctcggcttcagcaatcttaacgagctgcaattcctactcttcacaatctttttcctaacctacttctgtacactgggcggaaatatcttgattatcctaacgaccgtgacagaccctcatctacacactcccatgtactacttcttgggtaaccttgccttcatcgatatctgttataccacaagtaatgtgcctcaaatgatggtgcacttgttgagcaagaagaagtccatatcttatgtcgggtgcgttgtacaactgtttgccttcgtgtttttcgtcggttccgagtgtctgctcctggcagctatggcttatgataggtatatagccatttgcaaccctctgcggtattctgtcattctgtcaaaagtgctttgcaaccagctggccgctagttgctgggccgcaggattcctgaactccgtcgttcacacagttttgaccttctgcttgcctttctgcggcaataatcagattaattactttttctgtgacatcccacccctgctgattctctcatgcggcaatacctccgttaatgaactagccttgctgtctactggtgttttcataggctggaccccattcttatgcattgtcctatcttacatatgtattatttcaactattctccgcatccagagcagcgaagggcgtagaaaggcgttctcaacctgcgcaagccatctagctatcgtctttttattctacggatccgccatctttacttacgttaggccaatttccacttacagtctcaagaaagacaggctagtatcagttctttacagcgtggtgacgcctatgctgaaccctattatttatacactgaggaacaaggacatcaaggaggcggttaagacaattgggagtaagtggcagcccccaatttctagtctcgactctaagctcacctactag

SEQ ID NO: 220490 - DNA, 966 bp, Artificial Sequence
  derived and/or modified sequence
atggagagaaagaaccaaacggcaatcacggagttcatcatactgggcttctcaaacttaaatgagctgcaattcctgctctttaccatcttcttcttgacctatttctgcacactggggggaaacatcctcattatcctgacaacagtgaccgatccacacttacacacccccatgtactattttctgggcaatctggccttcattgatatctgttacacgacctccaacgtcccccagatgatggtccacctgcttagcaagaagaaaagcatctcctatgtcggctgtgtggtacagctgtttgcctttgtcttcttcgttggcagcgagtgcctgcttcttgcagctatggcttatgaccgatacattgctatctgcaatcctctcagatactccgtcatactgtccaaggtgctctgcaatcaactagccgcatcttgttgggccgcaggattccttaacagcgtggtccacaccgtgcttacgttctgcctgccgttttgtggcaacaaccagataaattattttttctgtgacatcccaccactcttgattctgtcttgcggcaatacatcagtgaacgaattagcactcctgagcacaggcgtgttcatcgggtggaccccttttctctgcatagtgcttagttacatctgtataatcagcacgattctccgaattcagtcttccgagggcagacgcaaagccttctctacatgcgccagccatcttgctattgtgttcctgttctatggcagtgccattttcacctacgtcaggcctatctcaacttattcccttaagaaggacaggcttgtctccgtcttgtactccgtggtgacaccaatgctgaacccaatcatttacaccctgcggaataaggatatcaaggaggcggttaagacaatcggatccaaatggcagcccccaatcagtagcctggattccaaattgacatattag

SEQ ID NO: 220491 - DNA, 966 bp, Artificial Sequence
  derived and/or modified sequence
atggaaaggaagaaccagactgccatcactgaatttatcattctgggtttctctaatctgaacgagctccagttcctcctgtttacaatcttttttctgacctacttttgtaccctcggcggtaatatactgattattcttacaacagttaccgacccccatttgcacacaccaatgtactacttcctggggaacctggctttcattgatatttgttacacaacatctaacgttccccagatgatggtgcatttgcttagcaagaaaaagtcgatctcatatgtgggatgtgtggtgcagttgttcgcgttcgtcttcttcgtgggcagtgaatgtctcctattggccgcaatggcctacgaccgatacatcgcgatctgtaaccccctccgatactcggtgatcctgagtaaagtgctctgcaaccagctcgccgcatcctgctgggccgctggcttcctcaacagtgtcgttcatactgttctgaccttttgtctcccattctgtgggaacaaccagatcaactatttcttctgtgacatcccgccattactgatcctttcatgcgggaacactagtgtgaacgaattagcgctgcttagtacaggcgtcttcatcggctggacaccctttctctgcatcgtgttatcttacatttgtataattagcaccatcttgcgcatccagagctctgaaggcaggcgcaaagcctttagcacatgtgcttcacacctggccatcgtgttcctattctacggaagcgctatctttacttatgtacggcctatctcaacatactcactgaaaaaggatcgcctagtgagcgttctgtacagcgtggtcacgcccatgctcaacccaattatttacaccctcaggaacaaggatatcaaggaggccgtcaaaacgattgggtctaagtggcaacctccgatcagcagcctggactcaaagttgacctactag

SEQ ID NO: 220492 - protein, 563 aa, Artificial Sequence
  derived and/or modified sequence
MDVGELLSYQPNRGTKRPRDDEEEEQKMRRKQTGTRERGRYREEEMTVVEEADDDKKRLLQIIDRDGEEEEEEEEPLDESSVKKMILTFEKRSYKNQELRIKFPDNPEKFMESELDLNDIIQEMHVVATMPDLYHLLVELNAVQSLLGLLGHDNTDVSIAVVDLLQELTDIDTLHESEEGAEVLIDALVDGQVVALLVQNLERLDESVKEEADGVHNTLAIVENMAEFRPEMCTEGAQQGLLQWLLKRLKAKMPFDANKLYCSEVLAILLQDNDENRELLGELDGIDVLLQQLSVFKRHNPSTAEEQEMMENLFDSLCSCLMLSSNRERFLKGEGLQLMNLMLREKKISRSSALKVLDHAMIGPEGTDNCHKFVDILGLRTIFPLFMKSPRKIKKVGTTEKEHEEHVCSILASLLRNLRGQQRTRLLNKFTENDSEKVDRLMELHFKYLGAMQVADKKIEGEKHDMVRRGEIIDNDTEEEFYLRRLDAGLFVLQHICYIMAEICNANVPQIRQRVHQILNMRGSSIKIVRHIIKEYAENIGDGRSPEFRENEQKRILGLLENF

SEQ ID NO: 220493 - protein, 536 aa, Artificial Sequence
  derived and/or modified sequence
MRRKQTGTRERGRYREEEMTVVEEADDDKKRLLQIIDRDGEEEEEEEEPLDESSVKKMILTFEKRSYKNQELRIKFPDNPEKFMESELDLNDIIQEMHVVATMPDLYHLLVELNAVQSLLGLLGHDNTDVSIAVVDLLQELTDIDTLHESEEGAEVLIDALVDGQVVALLVQNLERLDESVKEEADGVHNTLAIVENMAEFRPEMCTEGAQQGLLQWLLKRLKAKMPFDANKLYCSEVLAILLQDNDENRELLGELDGIDVLLQQLSVFKRHNPSTAEEQEMMENLFDSLCSCLMLSSNRERFLKGEGLQLMNLMLREKKISRSSALKVLDHAMIGPEGTDNCHKFVDILGLRTIFPLFMKSPRKIKKVGTTEKEHEEHVCSILASLLRNLRGQQRTRLLNKFTENDSEKVDRLMELHFKYLGAMQVADKKIEGEKHDMVRRGEIIDNDTEEEFYLRRLDAGLFVLQHICYIMAEICNANVPQIRQRVHQILNMRGSSIKIVRHIIKEYAENIGDGRSPEFRENEQKRILGLLENF

SEQ ID NO: 220494 - DNA, 1692 bp, Artificial Sequence
  derived and/or modified sequence
atggatgttggagaactgctctcttatcagcctaaccgcggaaccaagagacctcgggatgacgaggaagaggaacagaagatgcgtcggaaacagacaggcaccagagaaagaggtaggtatcgtgaggaagaaatgaccgtcgtggaggaagccgatgacgataaaaaaaggctgctgcagattatagatcgtgacggcgaggaggaggaggaggaagaggagccgctggacgagtctagtgttaaaaagatgatcctgacgtttgagaagaggagctataaaaatcaggagctgaggatcaagttcccggacaatccagagaagtttatggagtcagagctggacctcaatgacattatccaggagatgcacgtggtggccactatgcctgacttgtatcacctcctggtagaactcaatgcagtgcaatctcttctgggactgctagggcatgacaatacggatgtgtcgatcgcagtagtcgacctgctacaagaactcaccgatattgatacgctgcacgagagtgaggagggtgcagaggtgctgatcgatgcactggtggatgggcaggtcgtggcactccttgtgcagaacctggaaaggttagatgagagtgtcaaagaagaggccgacggagtgcacaataccttagccattgtcgagaatatggcagagttccggcccgaaatgtgtacagaaggggctcagcagggattgctccagtggctattgaaacgtctgaaagccaagatgccattcgatgcaaacaagctgtattgcagcgaagtcctggccatcctgctgcaggataatgacgaaaatcgggaactgctcggagaattagacggtattgatgtgcttttgcagcagctgtcagtttttaaacgccataacccctctaccgccgaggagcaggaaatgatggaaaacctcttcgactctttatgctcttgtctgatgctgtcatccaatagagaaagattcctgaaaggcgagggcttgcaactgatgaatctcatgttacgggaaaaaaagattagccggagcagtgccctgaaggtgctagatcacgcaatgataggacccgaggggacagataactgtcacaagtttgtggatattttgggcctgaggaccatctttcctctgtttatgaagagcccccgaaagattaagaaggtcggcacaacagagaaagagcacgaggaacatgtgtgttctatcttggcaagcctcctgcggaatctccgcggacagcagaggaccaggttactgaacaaatttacagaaaatgactctgagaaggtggatcgacttatggaactgcactttaagtatttgggagccatgcaggtcgccgataagaagatcgagggcgagaaacacgacatggtcagacgtggggaaattatcgacaacgacacagaagaggagttttatctccggcggctggatgcggggctctttgtccttcaacatatctgctatattatggccgagatctgcaacgccaatgtgccccagattcgtcagcgcgttcaccagattcttaatatgcgcgggtcatctatcaagatcgtccgccacattattaaagaatacgccgaaaacatcggagacgggaggtcccccgagttccgcgagaatgagcagaagagaattctgggactgctggagaatttctag

SEQ ID NO: 220495 - DNA, 1692 bp, Artificial Sequence
  derived and/or modified sequence
atggatgtgggggagctgctgagctaccagcccaacagaggcaccaagaggcccagagatgatgaggaggaggagcagaagatgaggaggaagcagacaggcacccgggagcggggccgctaccgggaggaggagatgacagtggtggaggaggctgatgatgacaagaagaggctgctgcagatcatcgacagagatggagaggaggaggaggaggaggaggagcccctggatgagagctctgtgaagaagatgatcctgacctttgagaagaggagctacaagaaccaggagctgcgcatcaagttcccagacaaccctgagaagttcatggagagcgagctggacctgaatgacatcatccaggagatgcacgtggtggccaccatgccagacctgtaccacctgctggtggagctgaatgctgtgcagagcctgctgggcctgctgggccatgacaacacagatgtgtccattgctgtggtggacctgctgcaggagctgacagacatcgacaccctgcatgaaagtgaggagggcgctgaggtgctgattgatgccctggtggatggccaggtggtggccctgctggtgcagaacctggagcggctggatgaatctgtgaaggaggaggctgatggagtgcacaacaccctggccatcgtggagaacatggccgagttccggcctgagatgtgcacagagggcgcccagcagggcctgctgcagtggctgctgaagaggctgaaggccaagatgccctttgatgccaacaagctgtactgcagcgaggtgctggccatcctgctgcaggacaatgatgaaaatcgggagctgctgggggagctggatggcattgatgtgctgctgcagcagctgagcgtcttcaagaggcacaaccccagcacagctgaggagcaggagatgatggagaacctgtttgacagcctgtgcagctgcctgatgctgagcagcaaccgggagcgcttcctgaagggggagggcctgcagctgatgaacctgatgctgcgggagaagaagatcagccgcagcagcgccctgaaggtgctggaccacgccatgattggccctgagggcacagacaactgccacaagtttgtggacatcctgggcctgcggaccatcttccccctcttcatgaagagccccaggaagatcaagaaggtgggcaccacagagaaggagcacgaggagcacgtgtgcagcatcctggccagcctgctgaggaacctgcggggccagcagaggacccggctgctgaacaagttcacagaaaatgattctgagaaggtggaccggctgatggagctgcacttcaagtacctgggcgccatgcaggtggccgacaagaagattgaaggagagaagcatgacatggtgcggcggggggagatcatcgacaatgacacagaggaggagttctacctgcggcggctggatgctggcctgtttgtgctgcagcacatctgctacatcatggccgagatctgcaatgccaacgtgccccagatccggcagagggtgcaccagatcctgaacatgaggggcagcagcatcaagatcgtgcgccacatcatcaaggagtatgcagagaacattggagatggccgcagccctgagttccgggagaatgagcagaagaggatcctgggcctgctggagaacttctag

SEQ ID NO: 220496 - DNA, 1692 bp, Artificial Sequence
  derived and/or modified sequence
atggacgtgggcgagctgctgagctaccagcccaaccggggcaccaaacgacctcgcgacgacgaggaggaggagcagaagatgcggagaaaacaaacaggcacgcgggaacgggggcgatacagagaggaagagatgacagttgtagaggaagcagacgatgacaaaaagaggctccttcagataattgatcgggatggtgaggaggaagaggaggaggaggaacccctcgatgagtctagcgtgaagaagatgatcttgaccttcgagaagaggtcctacaagaaccaggaactgcggattaagtttcctgacaatccagagaagtttatggagagtgagctggacttgaacgacattatccaggaaatgcacgtggtggccacaatgcctgacctatatcacctgctggtggagctgaatgccgttcaaagcctcctggggctactaggacatgataacaccgatgtgtccattgccgtagtggacttgttgcaagagctgacagacatcgatacactccatgagtccgaagaaggtgccgaggtgctcatcgacgcactggtagatggccaggtggttgctctcctggtgcagaacttagaacgactcgacgagtctgtcaaagaagaagcagatggagtgcataataccttggcaattgttgagaatatggccgaatttcggcctgagatgtgtacagagggcgcacaacaaggactactgcaatggcttcttaagagactcaaggccaaaatgccctttgacgccaacaagttgtactgttccgaagtgctcgcaatcttactacaggataatgatgagaatcgagaactcctgggggaattagacggcatagacgtgctcctccagcagctcagcgtcttcaagcggcataacccaagtaccgccgaggagcaggaaatgatggagaacctatttgactctctatgcagttgcctcatgctgagctctaacagagaacggttcctgaagggagaggggttacagctcatgaacctaatgttgagagagaaaaaaatcagtagatcctcagctttgaaggtactcgaccacgcgatgatcggccccgagggaaccgataactgccataaattcgtcgacattcttggcttgcgaaccattttcccactctttatgaaatcaccaaggaaaatcaaaaaggtcggcaccacagaaaaggagcatgaagagcacgtttgcagcatcttggcatctctccttaggaatctgcggggacaacagcgaaccaggctgttgaacaagttcaccgaaaacgactctgagaaggtcgataggttgatggaactgcacttcaaatatctaggagctatgcaagtggctgacaagaaaatcgaaggcgagaagcacgatatggtcagacgtggcgagattatcgacaatgatactgaggaagagttctatctgcggcgcctcgacgccgggctgttcgttttacagcacatctgctacatcatggccgagatttgcaacgcgaatgttccgcagattaggcagcgagttcaccagatcctgaacatgcggggttcttccattaagatcgtccggcacatcattaaagaatacgcagagaacattggagacgggagatcacccgagtttagagagaacgagcagaagaggattttgggcctactggaaaatttttag

SEQ ID NO: 220497 - DNA, 1692 bp, Artificial Sequence
  derived and/or modified sequence
atggacgttggcgagctgctgagctaccagccgaaccgcggtaccaaaaggcctagagatgacgaggaggaagagcagaagatgaggaggaaacagacagggacaagggagagagggaggtatcgggaagaagaaatgaccgtggtggaagaggctgatgacgacaagaagaggcttctgcagataattgacagagatggggaagaagaggaggaagaggaagagcccctcgatgaatccagcgtgaagaagatgatcctgacattcgagaagaggtcgtataaaaaccaggagctgagaattaagtttcctgacaatccagagaagttcatggaaagcgaactggaccttaacgacatcatccaggagatgcacgtggtggccaccatgccggatctgtaccatctactcgttgagttaaacgcagtccagtcacttctgggcttgctgggccacgacaatactgatgtctcgattgccgtggtggatctgcttcaagaattgacagacattgatacactgcacgaatcggaagagggagcagaagtcctgatcgacgccttggttgacgggcaagtggttgctcttttggtgcaaaatttggaacgcctcgatgaatctgttaaagaagaggcagacggcgtgcataacaccttagctattgtcgagaatatggccgagtttagaccagagatgtgcactgagggggctcagcaaggcctcctgcaatggctgctgaagcgcctgaaggctaagatgcccttcgatgccaacaagctatactgcagtgaggttctggcaatcctgctgcaggacaatgatgaaaatagagagctcctgggtgagctggatggcatcgatgtattactacaacagctgagtgtttttaagcggcataaccctagcaccgcagaagagcaagaaatgatggagaacctctttgacagcctgtgcagctgcctcatgctgtcgtccaaccgggagcggtttctgaagggtgaaggtctgcagctcatgaacctgatgcttcgcgagaagaagatcagccggagctctgcgctgaaagtactggaccacgctatgattggtcctgaaggcacagacaattgtcacaagttcgttgacattttgggcctaagaaccatttttcctctgtttatgaaatccccacgtaaaatcaagaaggtaggcactactgagaaggaacatgaggagcatgtgtgttctatcctcgcctccctactcaggaacctgagagggcagcagcggaccaggctgctgaacaaatttacagagaacgatagtgaaaaggtcgatcgacttatggaacttcactttaaatatctcggagccatgcaggtggcagataagaagatcgagggtgagaaacacgacatggtgcggagaggagagatcatagataacgacacggaggaggagttctatctgagacgacttgacgccggactattcgtactgcagcatatctgctatatcatggctgaaatctgcaacgcaaacgtacctcagattcggcagcgggtgcatcaaattttaaacatgcggggaagctcaatcaagatcgtccggcacattatcaaagagtacgccgagaatattggggacggtaggagccccgagttcagggagaacgagcaaaagcggatcctcggacttttggaaaacttctag

SEQ ID NO: 220498 - DNA, 1925 bp, Artificial Sequence
  derived and/or modified sequence
attggctctgcggctccgctcgccgcactttacggcagtgtggctggagccgcggctgacgggcccgcggtctgggcgtgagtgcagggaagtggagtatttgctgggccgggtaccatggacgtgggcgaacttctgagctaccagcccaataggggcacaaaacgtccccgggatgatgaagaggaggagcagaagatgcgtcggaaacaaactggtactcgagaacgcggccgctatcgggaagaagaaatgactgtggtggaggaagcggatgatgacaaaaaaaggctgctgcagattattgacagagatggggaagaggaagaggaagaggaggagccattggatgaaagctcagtgaagaaaatgatcctcacatttgaaaagagatcatataaaaaccaagaattgcggattaagtttccagacaatccagagaagttcatggaatccgagctggacctaaatgacatcattcaggagatgcacgtggtggccaccatgccagacctgtaccaccttctggtggagctgaatgctgtacagtcgcttctcggcttgctcggacacgataatacagatgtgtccatagctgtggtcgatttgcttcaggaattaacagatatagacaccctccatgagagtgaagagggagcagaagtgctcatcgatgctctggtggatgggcaggtggtagcactgctggtacagaatctggagcgcctggatgagtctgtgaaagaggaggcagatggcgtccacaacactctggctattgtggaaaacatggctgagttccggcctgagatgtgtacagagggtgcccagcagggtcttctacagtggctgttgaagaggctgaaggcaaagatgccttttgatgccaacaaactgtattgcagtgaagtgctggccatattgctccaggacaatgatgaaaacagggaattgcttggggagctggatggaatcgatgtgcttcttcagcagttatccgtgtttaaaagacacaatcccagcacggctgaggagcaggagatgatggagaatctgtttgattccctctgctcctgtctaatgcttagttccaatcgtgagcgcttcctgaagggcgagggtcttcagctgatgaatctcatgctcagggaaaagaagatctcccggagcagtgccctgaaagtgctggaccatgccatgattggccccgaaggcacagacaactgccataagtttgttgacattcttggcttacgaaccatctttcccctctttatgaaatctcccaggaagatcaagaaagtgggaaccactgagaaggaacatgaagagcatgtctgttcgatcctggcttccctcctgcggaacctgagagggcagcagcggacccggcttctgaataaattcactgaaaatgacagtgagaaggttgacagactaatggagttgcattttaaatatctgggtgcaatgcaggtggcggacaagaagattgaaggggaaaaacacgacatggtccggcgaggagagatcatcgacaatgacaccgaggaggagttctacctccggcgcctggatgcggggctctttgttctccagcacatctgctacatcatggccgagatctgcaatgccaatgtcccccagattcgccagagggttcaccagatcctaaacatgcgaggaagctccatcaaaattgtcaggcatatcatcaaggagtatgcagagaacatcggggacggccggagcccggagttccgggagaacgagcaaaagcgcatcctgggcttgctggagaacttctagaggcaccttggccctgcgcatcatggactctctcagcttccctcccaggatcagtttctacacaactctgtgtggcttttggacaaattaaagctagttttggtatccccgggcca

SEQ ID NO: 220499 - DNA, 1958 bp, Artificial Sequence
  derived and/or modified sequence
tgacgggcccgcggtctgggcgtgagtgcagggaagtggagtatttgctgggccgggtaccatggacgtgggcgaacttctgagctaccaggggcatggatggagacacgcacacacacaggcaataggcctcaagattattggcgagtaaaggcatctatctattatcgtgaagcctactctgagctttgacccaataggggcacaaaacgtccccgggatgatgaagaggaggagcagaagatgcgtcggaaacaaactggtactcgagaacgcggccgctatcgggaagaagaaatgactgtggtggaggaagcggatgatgacaaaaaaaggctgctgcagattattgacagagatggggaagaggaagaggaagaggaggagccattggatgaaagctcagtgaagaaaatgatcctcacatttgaaaagagatcatataaaaaccaagaattgcggattaagtttccagacaatccagagaagttcatggaatccgagctggacctaaatgacatcattcaggagatgcacgtggtggccaccatgccagacctgtaccaccttctggtggagctgaatgctgtacagtcgcttctcggcttgctcggacacgataatacagatgtgtccatagctgtggtcgatttgcttcaggaattaacagatatagacaccctccatgagagtgaagagggagcagaagtgctcatcgatgctctggtggatgggcaggtggtagcactgctggtacagaatctggagcgcctggatgagtctgtgaaagaggaggcagatggcgtccacaacactctggctattgtggaaaacatggctgagttccggcctgagatgtgtacagagggtgcccagcagggtcttctacagtggctgttgaagaggctgaaggcaaagatgccttttgatgccaacaaactgtattgcagtgaagtgctggccatattgctccaggacaatgatgaaaacagggaattgcttggggagctggatggaatcgatgtgcttcttcagcagttatccgtgtttaaaagacacaatcccagcacggctgaggagcaggagatgatggagaatctgtttgattccctctgctcctgtctaatgcttagttccaatcgtgagcgcttcctgaagggcgagggtcttcagctgatgaatctcatgctcagggaaaagaagatctcccggagcagtgccctgaaagtgctggaccatgccatgattggccccgaaggcacagacaactgccataagtttgttgacattcttggcttacgaaccatctttcccctctttatgaaatctcccaggaagatcaagaaagtgggaaccactgagaaggaacatgaagagcatgtctgttcgatcctggcttccctcctgcggaacctgagagggcagcagcggacccggcttctgaataaattcactgaaaatgacagtgagaaggttgacagactaatggagttgcattttaaatatctgggtgcaatgcaggtggcggacaagaagattgaaggggaaaaacacgacatggtccggcgaggagagatcatcgacaatgacaccgaggaggagttctacctccggcgcctggatgcggggctctttgttctccagcacatctgctacatcatggccgagatctgcaatgccaatgtcccccagattcgccagagggttcaccagatcctaaacatgcgaggaagctccatcaaaattgtcaggcatatcatcaaggagtatgcagagaacatcggggacggccggagcccggagttccgggagaacgagcaaaagcgcatcctgggcttgctggagaacttctagaggcaccttggccctgcgcatcatggactctctcagcttccctcccaggatcagtttctacacaactctgtgtggcttttggacaaattaaagctagttttggt

SEQ ID NO: 220500 - DNA, 778 bp, Artificial Sequence
  derived and/or modified sequence
actttacggcagtgtggctggagccgcggctgacgggcccgcggtctgggcgtgagtgcagggaagtggagtatttgctgggccgggtaccatggacgtgggcgaacttctgagctaccaggagggtcattgcgaggagcagtagagctgcactgccgaatgtcgtagccactagccacataggctgttgattgcttgaaatgtgactagtctgaattgagaaatactcccaataggggcacaaaacgtccccgggatgatgaagaggaggagcagaagatgcgtcggaaacaaactggtactcgagaacgcggccgctatcgggaagaagaaatgactgtggtggaggaagcggatgatgacaaaaaaaggctgctgcagattattgacagagatggggaagaggaagaggaagaggaggagccattggatgaaagctcagtgaagaaaatgatcctcacatttgaaaagagatcatataaaaaccaagaattgcggattaagtttccagacaatccagagaagttcatggaatccgagctggacctaaatgacatcattcaggagatgcacgtggtggccaccatgccagacctgtaccaccttctggtggagctgaatgctgtacagtcgcttctcggcttgctcggacacgataatacagatgtgtccatagctgtggtcgatttgcttcaggaattaacagatatagacaccctccatgagagtgaagagggagcagaagtgctcatcgatgctctggtggatgggcaggtgg

SEQ ID NO: 220501 - DNA, 1692 bp, Artificial Sequence
  derived and/or modified sequence
atggacgtgggcgagctgctgagctaccagcccaacagaggcaccaagagacccagagacgacgaggaggaggagcagaagatgagaagaaagcagaccggcaccagagagagaggcagatacagagaggaggagatgaccgtggtggaggaggccgacgacgacaagaagagactgctgcagatcatcgacagagacggcgaggaggaggaggaggaggaggagcccctggacgagagcagcgtgaagaagatgatcctgaccttcgagaagagaagctacaagaaccaggagctgagaatcaagttccccgacaaccccgagaagttcatggagagcgagctggacctgaacgacatcatccaggagatgcacgtggtggccaccatgcccgacctgtaccacctgctggtggagctgaacgccgtgcagagcctgctgggcctgctgggccacgacaacaccgacgtgagcatcgccgtggtggacctgctgcaggagctgaccgacatcgacaccctgcacgagagcgaggagggcgccgaggtgctgatcgacgccctggtggacggccaggtggtggccctgctggtgcagaacctggagagactggacgagagcgtgaaggaggaggccgacggcgtgcacaacaccctggccatcgtggagaacatggccgagttcagacccgagatgtgcaccgagggcgcccagcagggcctgctgcagtggctgctgaagagactgaaggccaagatgcccttcgacgccaacaagctgtactgcagcgaggtgctggccatcctgctgcaggacaacgacgagaacagagagctgctgggcgagctggacggcatcgacgtgctgctgcagcagctgagcgtgttcaagagacacaaccccagcaccgccgaggagcaggagatgatggagaacctgttcgacagcctgtgcagctgcctgatgctgagcagcaacagagagagattcctgaagggcgagggcctgcagctgatgaacctgatgctgagagagaagaagatcagcagaagcagcgccctgaaggtgctggaccacgccatgatcggccccgagggcaccgacaactgccacaagttcgtggacatcctgggcctgagaaccatcttccccctgttcatgaagagccccagaaagatcaagaaggtgggcaccaccgagaaggagcacgaggagcacgtgtgcagcatcctggccagcctgctgagaaacctgagaggccagcagagaaccagactgctgaacaagttcaccgagaacgacagcgagaaggtggacagactgatggagctgcacttcaagtacctgggcgccatgcaggtggccgacaagaagatcgagggcgagaagcacgacatggtgagaagaggcgagatcatcgacaacgacaccgaggaggagttctacctgagaagactggacgccggcctgttcgtgctgcagcacatctgctacatcatggccgagatctgcaacgccaacgtgccccagatcagacagagagtgcaccagatcctgaacatgagaggcagcagcatcaagatcgtgagacacatcatcaaggagtacgccgagaacatcggcgacggcagaagccccgagttcagagagaacgagcagaagagaatcctgggcctgctggagaacttctag

SEQ ID NO: 220502 - DNA, 300 bp, Artificial Sequence
  derived and/or modified sequence
atggcggaccttagcttagcagacgccctgaccgaacccagccctgacattgaaggtgagattaagagggactttattgccactctggaggccgaagcctttgacgacgtggtgggcgagactgtgggcaagacggattatataccattgttggatgtcgatgagaaaaccggcaactcggagtccaaaaagaagccatgttcagagacgagccagatagaagacactccctcaagcaagcccaccctcctggccaatgggggccacggagtggaaggatccgatactactgaggcatag

SEQ ID NO: 220503 - DNA, 300 bp, Artificial Sequence
  derived and/or modified sequence
atggctgacctgagcctggctgatgccctgacagagcccagcccagacattgaaggagagatcaagagggacttcatcgccaccctggaggccgaggcctttgatgatgtggtgggggagaccgtgggcaagacagactacatccccctgctggatgtggatgagaagacaggcaacagcgagagcaagaagaagccctgcagcgagaccagccagatcgaggacacccccagcagcaagcccaccctgctggccaacggcggccatggagtggagggcagtgacaccacagaggcctag

SEQ ID NO: 220504 - DNA, 2743 bp, Artificial Sequence
  derived and/or modified sequence
cccggcgctctcctggctcccttctgccccagctccgtctcggcggcggcgggcagttgcagtggtgcagaatggctgacctcagtcttgcagatgcattaacagaaccatctccagacattgagggagagataaagcgggacttcattgccacactagaggcagaggcctttgatgatgttgtgggagaaactgttggaaaaacagactatattcctctcctggatgttgatgagaaaaccgggaactcagagtcaaagaagaaaccgtgctcagaaactagccagattgaagatactccatcttctaaaccaacactcctagccaatggtggtcatggagtagaagggagcgatactacagaagcctagcgtgtctctcaacactggggctgctgcaacaccagaccagtgatctttcctaagcatcgttatacttctaaaaccttcagcattttgcagagctttgcttttcattcctggacatgatgtagaagaaactgagggtagttcttcggggcctatttctgctgatgcctgagcaaacaacctgcttcctcttgtgctctgcagggtttgatggagcctcatttccctttgtgaacacaaagtgcaaaatgaattctttttaattttagtaatttttacaaaggttatctaatgtcttttatttcttgttttctttatgattttatcatttgattcattctcacatttttttcctttaaatatttttagttgacctttttcctttggttttcaaatgttcaacatgaatcagaatagtgtaacaccaaatgagaacatgtgttttcataaaggggttgaggccaccagtactgcagcgaatttccttttcttctccctcctccttccttctctgagcttgcttttagggaaggttaatcttacaggctacctatgtttctctccaccttactaaaatctaaataatgatagatattttaagtttttaaattgagtagttctgagtaatcctagaatatttttccaaattaaataatcctttattatttgcaagttgggccaaatttttttttttttggagacggactcttaacaatctaagattgtttcaacaggactttcttattcccattcctaattttttcaaactaattgcttaaatctagaaccagttgagattagtactgtacaatggtatgctttgattgtatttatagaaatataacataaaacatggaccatgttttgaaatcttagaggaattctggtttaaaatctgaaatactttaaagttttctatccttttactgattatgcagcttcttataacccccaaggtacagattatttcagcttaaaagaaataattggcaccatgttctgagaaagattttgagatatacattgttttttgtttttgagacagggtctcactcttgcctaggctggagtgcggtggcgcgatcttggcttactgcaccctctgcctcccaggttcaagtggttctcctgcctcagcctcccaagtagctgggattataggtgtgcgccaccacaccagctaatttttgtatttttagtagagacggggttttactttgttggccaggctggtctcgaactcctgatctcaagtgatccacccgccttggccacccaaagtgctgggattacaggtgtgagacactgtgcctggccagatatacattgttttagatcccctgatacagaactacttttgagatggtaagattagaatatcatgaaagtttaaactgaatccttgcagcgacttccggaatttaggaagcattccctcttctacaggggtctggtcacaagggctggattctctgacaaaaatttcttctatggattctggacagaagacacttgagggtgatatgttttaaaggaaagaggttatgcttatcttcttagcagttgataaaatattaaaactctcttgccatagagaatacaccatcaaagaaaacacaaccctttccctttggtgtacagttatttattaagttgattttggggtttctttcgccagggatcttttcaaaactggtagtagttatttttaaaaatcatgtttgacatctttctattgctcgtaaccagtccctgtagctgtctaagttatgggtggagaagcctgggtatgactttccgttgtgtacactcacacttcatgattgacatttatttattcttttatttccatttggttatgcttatttttgtttgaaatttgtttttttcaaatatgtttcctttttgaacttacagaattgttgaaattttctactaacagccagctaaaatttggtatatgttagctctatctgtttcacttggacgtttcattttgaaagaaagaaattttatgtttcacatatagttttatacaaagtagccagtcccataatgaaatgctgtattgccatagtggtcacacccaagtggtccagtatctcaatggtgaggcagccagactggtcagggctgctttgttgaaatgtgatgattttcatatgccttctttctctttctctctctctttttttttccttttttggcccaatgttgaagatgtagaactttgtttttaaataatgtttttataatttcattcgtatacctaagtttgtattttttgtgactttggacttcaacagtttgtatattgggacttctaatgtgattactgtactaaataaattccactaataaacatcttacattaa

SEQ ID NO: 220505 - DNA, 300 bp, Artificial Sequence
  derived and/or modified sequence
atggccgacctgagcctggccgacgccctgaccgagcccagccccgacattgaaggagagataaagcgggactttattgctactctcgaggccgaggctttcgacgacgtagtcggagagaccgtcgggaagaccgattacattcctcttctggacgttgatgaaaaaacgggcaattccgagtcgaagaagaaaccctgctctgaaaccagccaaattgaggacacacctagttctaagccaactctgctggctaatggcgggcacggagtcgaagggagcgacaccactgaggcctag

SEQ ID NO: 220506 - DNA, 300 bp, Artificial Sequence
  derived and/or modified sequence
atggctgacttgtccctggccgacgcgcttacagagccgtcacccgacattgaaggcgagatcaagagagacttcatcgccactttggaagcagaagctttcgatgatgtagttggcgagacggtgggaaaaaccgattacattcctctgctggacgtggatgagaagacggggaatagtgaatcgaaaaaaaagccctgctctgaaacgtcgcagattgaagacacaccttctagcaagcctaccctgctcgcgaacggcggtcatggtgtcgaggggtctgacaccacagaagcttag

SEQ ID NO: 220507 - DNA, 300 bp, Artificial Sequence
  derived and/or modified sequence
atggccgacctgagcctggccgacgccctgaccgagcccagccccgacatcgagggcgagatcaagagagacttcatcgccaccctggaggccgaggccttcgacgacgtggtgggcgagaccgtgggcaagaccgactacatccccctgctggacgtggacgagaagaccggcaacagcgagagcaagaagaagccctgcagcgagaccagccagatcgaggacacccccagcagcaagcccaccctgctggccaacggcggccacggcgtggagggcagcgacaccaccgaggcctag

SEQ ID NO: 220508 - protein, 388 aa, Artificial Sequence
  derived and/or modified sequence
MLLLFLLFEGLCCPGENTAAPQALQSYHLAAEEQLSFRMLQTSSFANHSWAHSEGSGWLGDLQTHGWDTVLGTIRFLKPWSHGNFSKQELKNLQSLFQLYFHSFIQIVQASAGQFQLEYPFEIQILAGCRMNAPQIFLNMAYQGSDFLSFQGISWEPSPGAGIRAQNICKVLNRYLDIKEILQSLLGHTCPRFLAGLMEAGESELKRKVKPEAWLSCGPSPGPGRLQLVCHVSGFYPKPVWVMWMRGEQEQRGTQRGDVLPNADETWYLRATLDVAAGEAAGLSCRVKHSSLGGHDLIIHWGGYSIFLILICLTVIVTLVILVVVDSRLKKQSSNKNILSPHTPSPVFLMGANTQDTKNSRHQFCLAQVSWIKNRVLKKWKTRLNQLW

SEQ ID NO: 220509 - protein, 340 aa, Artificial Sequence
  derived and/or modified sequence
MIKSRVKRYRRRRGSQRAPQALQSYHLAAEEQLSFRMLQTSSFANHSWAHSEGSGWLGDLQTHGWDTVLGTIRFLKPWSHGNFSKQELKNLQSLFQLYFHSFIQIVQASAGQFQLEYPFEIQILAGCRMNAPQIFLNMAYQGSDFLSFQGISWEPSPGAGIRAQNICKVLNRYLDIKEILQSLLGHTCPRFLAGLMEAGESELKRKVKPEAWLSCGPSPGPGRLQLVCHVSGFYPKPVWVMWMRGEQEQRGTQRGDVLPNADETWYLRATLDVAAGEAAGLSCRVKHSSLGGHDLIIHWGEKQLRLCWEIMKIALGLLSVGLRKWVGMLGTRRVKLGQSK

SEQ ID NO: 220510 - DNA, 1167 bp, Artificial Sequence
  derived and/or modified sequence
atgctactcctgttccttctgtttgaagggctctgttgcccaggtgaaaacacagcagctccccaggccctacagtcttaccatctggctgctgaagagcaattaagttttagaatgctccagacaagttcatttgcaaatcacagctgggctcactccgaggggtctggttggctaggcgacctccagacccacgggtgggacaccgttttaggcaccatccgctttctcaaaccatggagccatggaaacttcagtaaacaggagctgaaaaacttgcagagtctgttccagttatacttccactcctttatacagatcgtacaggccagtgccggtcaatttcagctcgagtaccctttcgagatccagatcttggcaggatgtcggatgaacgcgcctcaaatctttctgaacatggcatatcagggctccgattttctctctttccagggcataagctgggagccttcccccggcgccgggatcagggcacagaacatctgcaaagtgctcaaccgctacctggacatcaaagagattctccagtctcttctgggtcacacctgtcctaggttcttggccggtctgatggaggctggagaaagtgaactgaagagaaaagtgaagcccgaagcatggttgtcgtgtggaccgtccccaggcccgggcaggctgcagctcgtttgtcacgtcagcggtttttatcctaaaccagtttgggtgatgtggatgagaggtgaacaggagcagcggggaacacagagaggagacgtcttgcccaatgctgatgagacttggtatctcagagccacactagacgttgccgccggtgaagcagcagggttgtcatgcagagtgaagcattctagccttggaggccacgacctcatcatccactggggaggctacagcatttttctgattctgatctgcctgactgtcatcgtaaccctagttatccttgtcgtggtggactcaaggctcaaaaagcagtcatctaacaagaacattctttccccacacaccccatcaccggtgtttctcatgggcgccaacacgcaggatacaaaaaactctcggcaccagttttgcctggcccaggtaagctggattaaaaacagagtgctgaagaagtggaagaccaggctgaaccaactatggtag

SEQ ID NO: 220511 - DNA, 1167 bp, Artificial Sequence
  derived and/or modified sequence
atgctgctgctcttcctgctgtttgagggcctgtgctgccctggagagaacacagctgccccccaggccctgcagagctaccacctggccgctgaggagcagctgtccttcaggatgctgcagaccagcagctttgccaaccacagctgggcccacagcgagggcagcggctggctgggggacctgcagacccacggctgggacacagtgctgggcaccatccgcttcctgaagccctggagccacggcaacttcagcaagcaggagctgaagaacctgcagagcctcttccagctgtacttccacagcttcatccagatcgtgcaggccagcgctggccagttccagctggagtacccctttgagatccagatcctggccggctgcaggatgaatgccccccagatcttcctgaacatggcctaccagggcagtgacttcctgtccttccagggcatctcctgggagcccagccctggagctggcatccgggcccagaacatctgcaaggtgctgaaccgctacctggacatcaaggagatcctgcagagcctgctgggccacacctgcccccgcttcctggccggcctgatggaggccggggagagcgagctgaagaggaaggtgaagccagaggcctggctgagctgtggccccagccctggccctggccgcctgcagctggtgtgccacgtgtctggcttctaccccaagcctgtgtgggtgatgtggatgagaggagagcaggagcagaggggcacccagagaggagatgtgctgcccaatgctgatgagacctggtacctgcgggccaccctggatgtggccgccggggaggccgccggcctgagctgccgggtgaagcacagcagcctgggcggccatgacctgatcatccactggggcggctacagcatcttcctgatcctgatctgcctgaccgtcatcgtgaccctggtgatcctggtggtggtggacagccggctgaagaagcagagcagcaacaagaacatcctgagcccccacacccccagccctgtgttcctgatgggcgccaacacccaggacaccaagaacagccgccaccagttctgcctggcccaggtgtcctggatcaagaacagagtgctgaagaagtggaagacccggctgaaccagctgtggtag

SEQ ID NO: 220512 - DNA, 1167 bp, Artificial Sequence
  derived and/or modified sequence
atgctgctgctgttcctgctgttcgagggcctgtgctgccccggcgaaaacaccgctgctccccaggccttgcaaagttaccacttagcagcagaggagcagttgagcttccgcatgctgcagacaagcagctttgccaaccactcgtgggctcattcggaaggaagcggatggctgggcgacctgcaaacacacggctgggataccgtcctgggcaccatccgcttcctgaaaccgtggtcgcacggtaatttttctaaacaggaactcaaaaatttacaaagtttgtttcagctgtatttccactcctttattcagatcgtccaggcatctgctggccagtttcagctcgagtacccttttgaaatacaaatccttgccgggtgccgaatgaatgccccccagatctttctgaacatggcgtaccagggatctgacttcctgtctttccaggggatatcatgggaaccctctccaggggcaggcataagggctcaaaacatctgcaaggtcctgaatagatacctggatatcaaggaaatcctgcagtccttgctgggccacacctgtcctcggttccttgccggattgatggaggcgggagaaagcgagctcaaacgcaaagtgaaacctgaggcgtggctaagctgtggcccttcaccaggtcccggccggttgcaacttgtttgtcacgtgagcggattttaccccaaaccagtttgggtcatgtggatgaggggggagcaggaacaacgcggtacccagaggggtgacgtgcttcctaatgctgacgaaacatggtacctgagagctaccctcgacgtggctgctggggaagctgcaggactgtcgtgcagggtcaagcattcttctctgggaggccacgatctgattatacactggggcgggtactctatctttctaattttgatctgtctgaccgtgatagtcacgctggtgatcctggtcgtggttgattctcgactcaagaagcagagcagtaacaagaacattctttctccgcacaccccctccccagttttcttgatgggcgccaacacacaggacacgaaaaattcccgacatcagttttgtctcgctcaagtatcttggattaaaaaccgtgtcctcaagaagtggaagactcgcttaaatcaactatggtag

SEQ ID NO: 220513 - DNA, 1167 bp, Artificial Sequence
  derived and/or modified sequence
atgctgctcctttttctcctgtttgagggactatgttgtcccggtgaaaatacagccgctccccaggccctccagagctatcacctcgccgcagaggagcagttgagttttcggatgttacagacctcgtctttcgcaaatcattcttgggcacactccgaaggcagcggctggctgggggatttgcaaacccatggatgggacaccgttttggggacgataagatttctgaaaccttggagtcacggcaactttagcaagcaggaactgaagaatctgcagtctctgtttcagttgtactttcatagcttcattcaaatcgttcaggcttcagctggtcagttccagctggagtatcctttcgagatccagattctggccggatgtcggatgaatgcccctcagatcttccttaatatggcttatcaggggtcagacttcttgtccttccaggggataagctgggagccctcgcccggagctggcatcagggcccagaatatatgcaaggtgcttaatcgatacctggacattaaggagatcctccagtccctcttgggccatacctgccctagattcctagctggattaatggaggccggagagtctgagctgaaaagaaaggtgaaacctgaagcttggctttcctgcgggccatccccgggacccggacggttgcagttagtgtgccatgtcagcggtttttacccaaaacctgtatgggtaatgtggatgcggggagaacaggagcagcgcggaacccagcgcggtgatgtgctgcctaacgccgacgaaacatggtatctgcgagctaccctggatgtcgccgctggggaagccgctggcctctcctgccgggtcaaacattccagccttggaggccatgacctcattatccactggggcggttacagtatctttctgattctgatctgccttacggtcatcgtgaccctagtgattctcgttgttgtggattcccgcttgaaaaaacagagtagcaataaaaacatccttagtccccatacacctagccccgtgttcctgatgggcgctaatacccaggacaccaagaacagcaggcaccaattctgtctggcccaggtctcttggattaaaaacagggttcttaagaaatggaagacccggctcaatcaactatggtag

SEQ ID NO: 220514 - DNA, 1458 bp, Artificial Sequence
  derived and/or modified sequence
gaaaatctggagccagacagtgagagaggcagaggggaaatgaaaaaccccgtgggaggctgcagcaaagcgaggcagtgtggcttctctgacagggaagtcagcagagggagaggtttgtctgtctgtacagcaagggaagtcagacgagagtgcaagagggtgtggagaggggtactgatatctgaattattagggcaggtgtcctgccaaggaatccctcctttaacagagcttcaatgctgctcctgttcctcctcttcgagggtctctgctgtcctggggaaaatacagcagctccccaggctctacaatcctatcatctagcagcagaggagcagctgtccttccgcatgctccaaacttcctcctttgccaaccacagctgggcacacagtgagggctcaggatggctgggtgacctgcagactcatggctgggacactgtcttgggcaccatccgctttctgaagccctggtcccatggaaacttcagcaagcaggagctgaaaaacttacagtcactgttccagttatacttccatagttttatccagatagtgcaagcttctgctggtcaatttcagcttgaataccccttcgagatccagatattagctggctgtagaatgaatgccccacaaatcttcttaaatatggcatatcaagggtcagatttcctgagtttccaaggaatttcctgggagccatctccaggagcagggatccgggcccagaacatctgtaaagtgctcaatcgctacctagatattaaggaaatactgcaaagccttcttggtcacacctgccctcgatttctagcggggctcatggaagcaggggagtcagaactgaaacggaaagtgaagccagaggcctggctgtcctgtggccccagtcctggccctggccgtctgcagcttgtgtgccatgtctcaggattctacccaaagcccgtgtgggtgatgtggatgcggggtgagcaggagcagcggggcactcagcgaggggacgtcctgcctaatgctgacgagacatggtatctccgagcaaccctggatgtggcggctggggaggcagctggcctgtcctgtcgggtgaaacacagcagtctagggggccatgatctaatcatccattggggtggatattccatctttctcatcctgatctgtttgactgtgatagttaccctggtcatattggttgtagttgactcacggttaaaaaaacagagttcaaataagaacattctttctccccacacacccagccctgtctttctcatgggagccaacactcaggacaccaagaattcaagacatcagttctgcttggcacaagtatcgtggatcaaaaacagagtattgaagaagtggaagacacgcctaaaccaactctggtgacatttgctttaccttatacataaaatccttgtctgcatcttcttaaacaccg

SEQ ID NO: 220515 - DNA, 1167 bp, Artificial Sequence
  derived and/or modified sequence
atgctgctgctgttcctgctgttcgagggcctgtgctgccccggcgagaacaccgccgccccccaggccctgcagagctaccacctggccgccgaggagcagctgagcttcagaatgctgcagaccagcagcttcgccaaccacagctgggcccacagcgagggcagcggctggctgggcgacctgcagacccacggctgggacaccgtgctgggcaccatcagattcctgaagccctggagccacggcaacttcagcaagcaggagctgaagaacctgcagagcctgttccagctgtacttccacagcttcatccagatcgtgcaggccagcgccggccagttccagctggagtaccccttcgagatccagatcctggccggctgcagaatgaacgccccccagatcttcctgaacatggcctaccagggcagcgacttcctgagcttccagggcatcagctgggagcccagccccggcgccggcatcagagcccagaacatctgcaaggtgctgaacagatacctggacatcaaggagatcctgcagagcctgctgggccacacctgccccagattcctggccggcctgatggaggccggcgagagcgagctgaagagaaaggtgaagcccgaggcctggctgagctgcggccccagccccggccccggcagactgcagctggtgtgccacgtgagcggcttctaccccaagcccgtgtgggtgatgtggatgagaggcgagcaggagcagagaggcacccagagaggcgacgtgctgcccaacgccgacgagacctggtacctgagagccaccctggacgtggccgccggcgaggccgccggcctgagctgcagagtgaagcacagcagcctgggcggccacgacctgatcatccactggggcggctacagcatcttcctgatcctgatctgcctgaccgtgatcgtgaccctggtgatcctggtggtggtggacagcagactgaagaagcagagcagcaacaagaacatcctgagcccccacacccccagccccgtgttcctgatgggcgccaacacccaggacaccaagaacagcagacaccagttctgcctggcccaggtgagctggatcaagaacagagtgctgaagaagtggaagaccagactgaaccagctgtggtag

SEQ ID NO: 220516 - protein, 320 aa, Artificial Sequence
  derived and/or modified sequence
MDQSNYSSLHGFILLGFSNHPKMEMILSGVVAIFYLITLVGNTAIILASLLDSQLHTPMYFFLRNLSFLDLCFTTSIIPQMLVNLWGPDKTISYVGCIIQLYVYMWLGSVECLLLAVMSYDRFTAICKPLHYFVVMNPHLCLKMIIMIWSISLANSVVLCTLTLNLPTCGNNILDHFLCELPALVKIACVDTTTVEMSVFALGIIIVLTPLILILISYGYIAKAVLRTKSKASQRKAMNTCGSHLTVVSMFYGTIIYMYLQPGNRASKDQGKFLTLFYTVITPSLNPLIYTLRNKDMKDALKKLMRFHHKSTKIKRNCKS

SEQ ID NO: 220517 - DNA, 963 bp, Artificial Sequence
  derived and/or modified sequence
atggaccagagcaactacagcagcctgcacggcttcatcctgctgggcttcagcaaccaccccaagatggagatgatcctgagcggcgtggtggccatcttctacctgatcaccctggtgggcaacaccgccatcatcctggccagcctgctggacagccagctgcacacccccatgtacttcttcctgagaaacctgagcttcctggacctgtgcttcaccaccagcatcatcccccagatgctggtgaacctgtggggccccgacaagaccatcagctacgtgggctgcatcatccagctgtacgtgtacatgtggctgggcagcgtggagtgcctgctgctggccgtgatgagctacgacagattcaccgccatctgcaagcccctgcactacttcgtggtgatgaacccccacctgtgcctgaagatgatcatcatgatctggagcatcagcctggccaacagcgtggtgctgtgcaccctgaccctgaacctgcccacctgcggcaacaacatcctggaccacttcctgtgcgagctgcccgccctggtgaagatcgcctgcgtggacaccaccaccgtggagatgagcgtgttcgccctgggcatcatcatcgtgctgacccccctgatcctgatcctgatcagctacggctacatcgccaaggccgtgctgagaaccaagagcaaggccagccagagaaaggccatgaacacctgcggcagccacctgaccgtggtgagcatgttctacggcaccatcatctacatgtacctgcagcccggcaacagagccagcaaggaccagggcaagttcctgaccctgttctacaccgtgatcacccccagcctgaaccccctgatctacaccctgagaaacaaggacatgaaggacgccctgaagaagctgatgagattccaccacaagagcaccaagatcaagagaaactgcaagagctag

SEQ ID NO: 220518 - DNA, 963 bp, Artificial Sequence
  derived and/or modified sequence
atggaccagtccaactactcctcgctacatgggttcattcttcttggcttttcgaaccatcccaaaatggagatgatactctcaggcgtcgtggctatattttatctgataacgctagttggcaacaccgccatcattttagccagtctgcttgattcccagctccatacacccatgtatttttttctcaggaatctgtctttcctggatttgtgctttacaacatccataattcctcagatgcttgtcaatctttggggtcctgacaaaaccatctcctatgttggctgcattatacagctttacgtctacatgtggttagggtccgttgaatgcctgctcttggccgtgatgtcctatgacaggttcacagctatctgcaagcctctccactactttgtggtcatgaacccacacctctgcctgaagatgatcatcatgatatggagcataagcctggctaacagcgtagtgctgtgtacactgacactgaaccttcctacatgcggaaataacattctggatcatttcttgtgcgagttgccagccctggtgaagattgcatgtgtggatacaaccactgtcgagatgtccgtattcgcactggggatcattatagttctgacccctttaattctgatcttaatcagctacgggtatatcgctaaggccgttttgcgcaccaaatcgaaggcctctcagaggaaagccatgaatacatgtggcagccacttgactgttgtctccatgttctacggcacgataatatacatgtatctgcagcccgggaatcgggcttcgaaagatcaaggaaaattcctgaccctcttttatacagtcatcacaccgagccttaaccctctcatatatacactgcggaataaggacatgaaagacgccctgaaaaaactgatgagattccaccataagagtaccaaaatcaagagaaattgtaagtcttag

SEQ ID NO: 220519 - DNA, 963 bp, Artificial Sequence
  derived and/or modified sequence
atggatcaaagtaactatagttctcttcacggcttcatactactgggattcagtaaccatccaaagatggagatgatcctgtccggcgttgtcgctatcttctacctcattaccttggtggggaacacggctatcatcctcgcaagtttactggacagccagctccatacgcctatgtacttttttctaaggaacttgtcttttctggatctttgcttcactacctccatcattccccagatgcttgtcaatctgtggggcccagataaaaccatctcctacgtgggctgtataatccagctgtatgtttacatgtggttggggtccgtggaatgcctccttctcgctgtgatgagctacgaccggtttacagcaatatgcaaacccctgcattattttgttgttatgaatccccacctgtgtttgaagatgattatcatgatttggagcatcagcttagcgaactcggtcgtcttgtgtacacttacacttaacctgcctacttgtggcaataacatattggatcacttcctttgtgagcttccagctctcgtgaaaattgcatgtgttgataccaccacagtggaaatgtctgtgttcgcccttggtatcattatcgtgctgaccccattgatacttattctcattagctacggttatatagccaaggcagtcctgcgcacaaaaagtaaagcgagtcaacgaaaggctatgaatacatgtgggagccacctaactgtggtctctatgttttacggaaccattatttacatgtacctccagcctggaaatcgggcgagcaaagatcagggcaagttcctgaccctgttttacaccgtaatcactccgtctttaaaccctctgatttataccttgcggaacaaagatatgaaagatgcattgaagaaattgatgagattccaccataagtcaactaagataaagagaaactgtaagtcctag

SEQ ID NO: 220520 - DNA, 963 bp, Artificial Sequence
  derived and/or modified sequence
atggaccagtccaattatagctccctgcacggttttattctgctgggtttctccaaccaccctaagatggagatgatcttgtccggcgtggtggccattttctacctgataaccctcgtggggaatacagcaatcatcctggcctcactgctggattctcagctgcatacccccatgtacttctttctgaggaatttaagctttctcgacttatgttttactacctctatcatacctcagatgcttgtgaacctatgggggcctgacaaaaccatcagctatgttggttgtatcattcagctgtacgtttacatgtggctcggctcagtggagtgtttgctcctggcggtcatgagttatgatagattcaccgcaatttgcaaaccacttcactactttgtggtgatgaacccccacctgtgtctgaagatgattatcatgatatggtcaattagtctggccaattcagtggtcctatgcactctgacactgaacttgccaacttgcggcaataatatcttggaccatttcctgtgtgaactgccagctctggtcaaaattgcctgcgttgacacaaccaccgtggagatgagcgtgttcgctttgggaatcatcattgtattgacaccgctcatcctgatactgatttcttatggctatatcgccaaggccgtcttgagaaccaaaagcaaagcctcccagcgcaaagccatgaatacctgcggcagtcacctgaccgtggtgtctatgttttatgggaccattatttatatgtatctgcagccgggtaacagggcatcgaaggaccagggaaagttcttgaccttgttttataccgttattacaccgagcctgaacccactcatatatactctcaggaacaaggatatgaaggacgcactgaaaaaacttatgagattccaccacaagtcaaccaagatcaagagaaattgcaagagctag

SEQ ID NO: 220521 - DNA, 963 bp, Artificial Sequence
  derived and/or modified sequence
atggatcagagtaactattccagcctccacggctttatcctgcttgggttcagcaatcacccaaaaatggaaatgatcttgtccggcgtcgttgcaatattttacctgattaccttagtggggaatacagcgatcatcctggccagcttgcttgactcgcagttgcacacgcccatgtacttcttcctccggaatctgagctttctggacctgtgtttcacaactagcattattccccagatgctggtgaatctgtggggcccggacaaaactataagttacgtagggtgtatcatccagctctatgtttacatgtggctgggaagcgtggaatgcctgctgctggcagtcatgtcatacgaccgctttacggccatctgcaagcccctgcactactttgtggtaatgaacccccatctctgcctgaagatgattatcatgatttggagcattagccttgccaactctgtcgttctgtgcactctgactctgaacttacctacttgcgggaacaacatactagaccactttctttgcgaactgcccgcactcgtcaagatcgcatgtgtcgacacaaccacggtcgaaatgagcgtgttcgcactcggaattattatcgtactcaccccattaatactgattctcatttcttacggctacatcgcgaaggccgtcctccgaactaagtcgaaagcctctcagagaaaagccatgaatacatgtggcagtcatctgacagttgtatcgatgttctatggtactatcatctacatgtatctccagccaggtaatagggcatccaaggaccaaggcaagttcctaaccttattttacaccgtcatcactccctcgttgaatcctctgatctacaccctccggaacaaagatatgaaggacgccttgaagaagctgatgcgcttccaccataagagtaccaaaataaaacgtaactgtaaaagctag

SEQ ID NO: 220522 - DNA, 963 bp, Artificial Sequence
  derived and/or modified sequence
atggaccagtcaaactactcgtccctacatggattcatccttctgggattttctaatcatccgaaaatggagatgattctctccggggtggtggcgatcttttacctgattactctggtgggcaataccgcaatcatcctggcctccctgttggacagccagctgcacactccaatgtacttctttctgcgcaatctcagcttcctcgacctgtgttttacaacgagtatcattccacaaatgctagtgaacctatgggggccggacaagaccatttcttacgtggggtgcatcatacaactgtatgtgtacatgtggctcggcagcgtggagtgcctgctactggctgtcatgtcttacgaccgttttactgcaatctgcaaaccgctgcattattttgtggtgatgaatccccacctttgtttgaagatgatcatcatgatctggtcaatctccttagccaacagcgtagtcctgtgtaccctcacactcaatctgccgacgtgtggcaacaacattctcgaccactttctttgcgagctgccggctctggtcaaaattgcttgtgtggatacaacaaccgtcgagatgagtgtcttcgctctgggaattatcattgtgcttacccccctgattctgatcctgattagttacggctacatcgccaaggcagtattgcggacaaaatcaaaagcatcccagcgcaaggccatgaacacatgtgggtctcacctgacagtggtgagcatgttttatggtactatcatttacatgtaccttcagcctggcaatcgagcatctaaagatcaggggaagttcctgaccttgttttataccgtcattaccccctctttgaaccccctgatttatacgctgcgcaataaggatatgaaggacgcgctcaaaaagctcatgagattccatcacaaatctacaaagatcaagaggaattgtaagtcctag

SEQ ID NO: 220523 - DNA, 963 bp, Artificial Sequence
  derived and/or modified sequence
atggatcagtccaattactcatctctccatgggtttatcttattggggttctccaaccatccgaaaatggagatgatactgagtggagtggtggccattttctaccttataactctggtggggaacacagctattatccttgcttcccttctggacagtcagttgcacactccaatgtacttctttctccgcaatctttctttccttgacctgtgctttaccaccagcattattccgcaaatgctggtcaatttgtggggacccgacaagaccatctcatatgtgggctgtattatccagctgtatgtgtatatgtggctgggctccgtcgagtgccttctgctggctgttatgagctacgataggtttacagcgatatgcaaacctctacattactttgtggttatgaatccccacctctgtcttaaaatgataattatgatatggagcatctctctggccaactccgttgtgctctgcaccctgaccttgaacctgcccacatgcggcaacaacatcctcgatcactttctgtgtgagctgccagccctggtaaaaatcgcctgtgtggatacgacgaccgtggagatgtcagtgtttgccctcgggattatcatcgttttgactcctctgatcctcatactgatcagctatggctacatagccaaggcagtgttacgcacaaagtcaaaggctagccagcgaaaggcaatgaacacgtgcgggtcacacctcacagtggtcagtatgttctacggcacgatcatttacatgtatctccagccaggaaaccgagcctccaaggatcaagggaaatttctcacactgttttatactgttataactccctcactgaaccctctcatatacaccctgagaaacaaggacatgaaggatgccctgaagaaactaatgagatttcaccataagagtactaagataaaaagaaattgtaagagctag

SEQ ID NO: 220524 - DNA, 963 bp, Artificial Sequence
  derived and/or modified sequence
atggaccagtccaactattcctcattgcatggcttcatcctcttgggcttctcaaatcatcccaagatggaaatgatcctctcaggcgtagtggctattttttatttgatcaccctggtgggcaacaccgccattatacttgcttcactccttgacagccagctccacacccccatgtatttttttctgcgcaatttgagttttttggacctctgctttacaacatccattatcccacaaatgctagtcaatttgtgggggcccgataaaacaatttcttacgtcggatgtattatccagttatacgtttacatgtggttgggctcagtggaatgtctgctactagctgtcatgagttatgatcggtttaccgcaatatgtaaacctctccactattttgtcgtgatgaacccccatctatgcctcaagatgatcattatgatatggtccatctctctggcgaattcggtggtcctgtgtactcttacgctgaatttgccaacctgcggcaataacatcttggaccacttcctgtgcgaattgcccgccctggtgaagattgcatgcgtggacaccacaaccgtggagatgagcgtctttgcactcgggatcattattgtactgacccccttaattctgatcctgatcagttacggttatatagctaaagctgttcttagaactaagagcaaagcctcccaacgcaaggccatgaacacatgcggtagtcacctgaccgtagttagtatgttctacggcactattatctatatgtatttacaacctggcaatcgtgcctccaaagatcagggtaaatttctgaccctcttctacacggtgatcaccccttccctgaatcctctcatctacactctcagaaacaaagacatgaaagacgcccttaaaaaactgatgcggttccaccataagagcacaaagatcaaaagaaattgtaagtcttag

SEQ ID NO: 220525 - DNA, 963 bp, Artificial Sequence
  derived and/or modified sequence
atggatcagagtaactattctagcctgcatggattcatcctgctgggtttctccaatcatcccaagatggaaatgatcctatctggtgttgtggccatcttctatctgattaccctggtcggcaataccgcgatcatcctggcttcactgctggattctcaactgcatacgcctatgtatttcttcttacgcaacctttcttttcttgacctctgcttcactacttccattattccccagatgctggtgaacttatggggtcctgacaagactatctcttatgtcggctgtatcatccaactgtacgtctatatgtggctgggctctgtcgagtgtctcttgctagcggtgatgtcctatgataggttcactgccatttgtaaaccactgcactactttgttgttatgaacccccacctgtgcctcaagatgatcatcatgatttggtcgatatctctggcgaacagcgtggtcctgtgcacccttaccttgaatcttccgacgtgtggcaataatattttggaccacttcctgtgcgaactgccagcgctcgtcaaaatcgcctgcgtggataccacaacagtggaaatgtctgttttcgcgctgggtatcatcatcgtgctcacccccctgattctcatcctcattagctacggctatatcgccaaagctgtactgcgtacaaagagcaaggcctcacagcggaaggctatgaacacttgtggttctcacttgacggtggtgagcatgttctacggtaccatcatctatatgtacctgcagcctggtaacagagcctctaaggatcagggtaagttcctgactctgttctacaccgtgattacacccagtctgaatccactgatttacacccttcgcaataaggacatgaaggacgccctgaaaaaattaatgcgcttccaccacaagtcaaccaaaattaaacgtaattgtaagtcctag

SEQ ID NO: 220526 - DNA, 963 bp, Artificial Sequence
  derived and/or modified sequence
atggaccagagcaactacagcagcctgcacggcttcatcctgctgggcttcagcaaccaccccaagatggagatgatcctgagcggcgtggtggccatcttctacctgatcaccctggtgggcaacacagccatcatcctggccagcctgctggacagccagctgcacacccccatgtacttcttcctgaggaacctgtccttcctggacctgtgcttcaccaccagcatcatcccccagatgctggtgaacctgtggggccctgacaagaccatctcctatgtgggctgcatcatccagctgtatgtgtacatgtggctgggctctgtggagtgcctgctgctggccgtgatgtcctatgaccgcttcaccgccatctgcaagcccctgcactactttgtggtgatgaacccccacctgtgcctgaagatgatcatcatgatctggagcatcagcctggccaacagcgtggtgctgtgcaccctgaccctgaacctgcccacctgtggcaacaacatcctggaccacttcctgtgtgagctgcctgccctggtgaagatcgcctgtgtggacaccaccaccgtggagatgtctgtgtttgccctgggcatcatcatcgtgctgacccccctcatcctgatcctgatctcctatggctacatcgccaaggctgtgctgcggaccaagagcaaggccagccagaggaaggccatgaacacctgtggcagccacctgactgtggtgtccatgttctacggcaccatcatctacatgtacctgcagcccggcaacagagccagcaaggaccagggcaagttcctgaccctcttctacaccgtcatcacccccagcctgaaccccctcatctacaccctgaggaacaaggacatgaaggatgccctgaagaagctgatgaggttccaccacaagagcaccaagatcaagaggaactgcaagagctag

SEQ ID NO: 220527 - DNA, 963 bp, Artificial Sequence
  derived and/or modified sequence
atggaccagagcaactacagcagcctgcacggcttcatcctgctgggctttagcaatcaccctaagatggaaatgatcctgtccggcgtggttgcaatcttctacttgatcactctcgtgggcaacacagcaatcatcttggcctccctgttagactcccaactgcatactcctatgtacttttttttgagaaatctctcctttctcgatttgtgttttacaactagtatcattccgcaaatgttagtgaatctgtggggaccagacaagacaattagctacgtgggctgcattatccaactgtacgtctacatgtggttggggtctgttgagtgcctgttgctggccgtgatgtcttatgacagatttacagccatttgcaagcccctacactatttcgtcgtaatgaatcctcatctctgcctgaaaatgataatcatgatatggagtatatccctagcaaactctgtcgtcctttgcactcttactcttaatctgcctacttgtggcaacaatatcctcgaccatttcctgtgtgagctgcctgccctagtgaagatcgcctgcgtggacacaacgaccgtcgagatgagcgtatttgctctcggtattatcatcgtcctgacacctcttatactcattctcataagttatgggtacatcgccaaagcggtcttgcgtaccaaatccaaggcttcccaacgcaaggccatgaacacatgcgggtcgcatctaactgttgtatccatgttttatggtaccatcatttatatgtacttgcagcctggcaatcgggcctctaaagatcagggaaaatttctcaccttgttttacactgtcattaccccgtctttaaacccgctcatttacactctcaggaataaggatatgaaggatgccttgaagaaattgatgcggtttcaccacaaaagcaccaagataaaaaggaattgtaagtcctag

SEQ ID NO: 220528 - DNA, 963 bp, Artificial Sequence
  derived and/or modified sequence
atggaccagagcaactacagcagcctgcacggcttcatcctgctgggcttttctaaccacccaaaaatggagatgatactttctggtgtggtcgccatcttctatctcatcacccttgtggggaacacggccatcattcttgcaagtctgcttgatagtcagctccacactcccatgtatttctttctgagaaatctgagctttctggacctgtgcttcacaaccagcattatcccccagatgctcgttaacttgtggggtccagataaaacaatctcctacgttggatgtatcatccaactgtacgtgtatatgtggttgggctctgtggagtgccttctccttgccgtgatgtcgtatgaccgattcaccgccatctgcaagcctttacattatttcgtcgtcatgaacccgcacctctgcttgaaaatgataataatgatatggtccatcagcttggcaaattctgtggtcctgtgcaccttaactcttaatctccccacgtgtggcaataacatattggatcacttcctatgtgaactccctgcgctggtgaaaattgcctgcgtggacactacaaccgtggagatgtctgtatttgctttaggtataatcatcgtgctgacaccccttatccttatcctcatctcttacggttacatcgccaaggcagtgctcaggacaaagagtaaggcttctcagagaaaggccatgaacacatgtggatcccacctgaccgtcgtgtcaatgttttatggtaccattatctacatgtacttacagcccgggaatcgggcatccaaagaccagggcaaattcctaaccttgttttacaccgtgataacccccagcctgaatccattaatctacaccctaagaaataaggacatgaaggacgccctgaagaaactgatgaggttccaccataagtccactaaaatcaaacgaaattgcaaatcttag

SEQ ID NO: 220529 - DNA, 963 bp, Artificial Sequence
  derived and/or modified sequence
atggaccagagcaactacagcagcctgcacggcttcatcctgctggggttctccaaccaccccaagatggagatgattctgagtggagtggtcgccatcttttacctgattaccctggtgggcaatacagctatcatcttggcctccctcctggattcccagctgcatacacccatgtatttttttctgcgcaatctgtccttcttggatctgtgtttcaccacttcaattattccccagatgctggtgaacctatggggtccagataaaactatcagttacgtcggttgtatcatccagctgtatgtgtacatgtggctggggtctgtcgaatgtctcctgctcgccgtaatgagttatgatcggttcaccgcgatttgtaagcctttgcactatttcgttgtgatgaatccgcatttgtgtctcaagatgataatcatgatctggtcaatttccctggcaaatagcgtggtgttgtgtactcttacgctgaatctgcctacgtgcggcaataatattctcgaccactttttgtgcgagctgcccgcactggtcaagatcgcttgcgtggacactaccacggtggaaatgtccgtgttcgccctgggtatcatcatcgtgctcactccattgatactgattctcatcagctatggctatatagccaaggcagtacttagaactaagtcaaaggcttctcaacgcaaagctatgaatacctgcggctcccatctgactgtggtttccatgttctacggaacaatcatatacatgtacctgcaaccaggtaacagagctagtaaggatcaaggaaagtttcttactcttttctataccgttattactccaagccttaaccctctaatatacacactgagaaacaaggacatgaaagacgcactgaaaaaactgatgagattccatcacaaaagcacaaagatcaagcgtaactgtaaatcttag

SEQ ID NO: 220530 - DNA, 963 bp, Artificial Sequence
  derived and/or modified sequence
atggaccagagcaactacagcagcctgcacggcttcatcctgctggggttcagcaaccaccctaagatggagatgattctgagtggtgtggttgctattttctacttgataacactggttggtaacacagccatcattttggctagcctgcttgattcacagttacacactcccatgtatttcttcctgagaaatctctcttttttagatctgtgttttactacttccatcataccccagatgctggtgaacttgtgggggccagacaaaacaattagctacgtaggatgcattatccagttatatgtgtatatgtggctgggaagcgtggaatgtcttctgctggcagtgatgagctacgaccggtttactgccatatgtaagccactgcattactttgttgtcatgaatcctcacctgtgcctgaaaatgattattatgatatggtctatatcacttgcaaactccgttgtcctgtgcaccttgacacttaacttgcctacttgcgggaataacatcctggaccactttctctgcgaactgccggccttggttaagattgcctgtgtggacacgactacggtagagatgtcagtcttcgcactgggtatcattattgttcttacaccccttatactcattcttatatcgtatgggtatatcgccaaggccgtcctgaggactaaaagcaaggccagccaaaggaaagctatgaacacttgcgggtcacatctcacagtggtttccatgttttatggtacaatcatctacatgtatcttcaaccagggaatcgcgcatccaaggaccagggcaaattcctcaccttattctataccgtcatcacgccctctctgaatcctttgatctataccttgaggaataaggatatgaaagatgccctgaagaaactcatgaggttccaccacaaatctaccaagatcaagcgcaattgcaagtcttag

SEQ ID NO: 220531 - DNA, 963 bp, Artificial Sequence
  derived and/or modified sequence
atggaccagagcaactacagcagcctgcacggcttcatcctgctggggttcagcaatcatcccaagatggaaatgattctgagtggcgtggtagccattttctatctgatcacgctggtcggaaacactgccatcattctagcctccctgctggactctcagctgcatacaccaatgtatttctttctgcggaaccttagtttccttgacctttgttttacgacgagtattatcccccagatgttggtaaatctgtggggacctgacaaaactataagctacgtggggtgcattattcagctatacgtctacatgtggttaggtagtgtggagtgcctgctgctcgccgtcatgagttacgatagattcaccgccatttgcaagcccttacattatttcgtagtcatgaacccacacctctgtctgaaaatgatcatcatgatttggagcattagcctggctaacagtgttgtactttgtactctgacgttgaacttgccaacttgtggtaataacatcctggaccacttcctttgcgaactgcctgccctggtcaaaattgcatgcgttgacacaaccacggtggaaatgtctgttttcgctttgggcatcattattgtcttgacccccctgatactgatcctcatttcgtatgggtacatagccaaagccgtgctgcgcactaagtccaaagccagtcagcgcaaggctatgaacacgtgcggctcgcacttgactgtggtgtctatgttttatggcactattatatacatgtatctacaaccggggaaccgggcatccaaggatcaaggtaaattcctgacgctgttctacaccgtgatcacaccaagtctgaatccattgatctacactttacgcaataaggatatgaaggacgccctgaaaaagttaatgcgtttccatcacaagagcaccaagatcaaacgcaactgtaaaagctag

SEQ ID NO: 220532 - DNA, 963 bp, Artificial Sequence
  derived and/or modified sequence
atggaccagagcaactacagcagcctgcacggcttcatcctgctgggcttcagcaaccatcccaagatggaaatgatcctgagcggggttgtcgccattttctaccttatcactctagtcggcaatacagccatcatcttggctagcttattggactctcagctccatacccccatgtatttttttctcaggaacttgtccttcctggatctatgttttacaacctctataattccccagatgctggtcaatctttggggcccagacaaaactatttcatatgtcggctgtatcatccaactgtacgtgtacatgtggctgggtagtgtggagtgcttgctgctggcagtcatgagctacgatcgatttactgccatatgcaagcccctgcattactttgtagtgatgaacccccacctctgtctgaagatgattatcatgatctggagcatatccctggctaattccgtagtcctatgcactctcactctgaacctcccaacatgtggtaacaatatcctggaccactttctgtgtgaactgcctgccttagttaaaattgcttgcgttgacacaacaaccgtggagatgagtgtgtttgcactggggatcattatagtgttgacgcccctgattctgattttgatttcttacggatacatcgccaaagccgtgcttagaacgaagtctaaagcatcacagagaaaggcaatgaacacttgtggtagccatctcacggtagtttcaatgttttatgggacaataatctatatgtatttgcagcctggaaatcgagctagcaaagaccagggtaaattcctgactcttttttatacagtcataaccccctcccttaaccccctcatttatacacttcgcaataaagatatgaaggacgcattgaaaaagttgatgcgctttcaccataaatctacaaagattaagagaaattgcaagtcgtag

SEQ ID NO: 220533 - DNA, 963 bp, Artificial Sequence
  derived and/or modified sequence
atggaccagagcaactacagcagcctgcacggcttcatcctgctgggattcagcaaccatcctaaaatggaaatgattctctctggtgtggtggcgatcttttatcttatcacactggtgggcaatactgccatcattttggcaagtctcctggattctcagctgcacaccccgatgtatttcttcctgagaaacctctcattcctcgacctctgtttcaccaccagcattataccccaaatgctggtgaacctctgggggcctgacaagaccatttcgtacgttggctgcatcatccagctgtacgtttatatgtggctcgggtcagtggaatgcctgttgctggccgttatgtcatatgatcggtttaccgcgatatgcaagcccctgcattactttgttgtgatgaacccacatttatgtctgaaaatgatcatcatgatctggtcaattagcctcgctaactcagtagtgctgtgcactctcacgctaaacctgccaacttgcgggaataacatcctggaccacttcttgtgcgaactgccagcccttgtcaaaattgcctgcgttgatactacaaccgtagagatgtctgtgttcgccctgggtataataatagtcctgacacccctgattctgatcctgatttcgtacggatacatcgcaaaagccgtgttgcgcactaaaagtaaggcttctcagagaaaggcaatgaatacctgcgggagtcacttaacagttgtcagcatgttttatggaacaatcatttatatgtatctgcagccgggtaatcgtgccagcaaggatcaggggaagtttttgaccctgttctatacagtgattactcctagcctgaatccactcatttataccctgcggaataaggatatgaaggacgccttaaaaaaactcatgcgatttcaccacaagagcactaaaattaaacggaactgtaagtcatag

SEQ ID NO: 220534 - DNA, 963 bp, Artificial Sequence
  derived and/or modified sequence
atggaccagagcaactacagcagcctgcacggcttcatcctgctgggattctccaaccaccctaagatggagatgatcctgtccggagtggtggctatcttttacctgattaccctcgttggaaacactgcaatcatcctcgccagcttactggactctcagctccacacccccatgtatttcttcttacggaacctgagttttctcgatctttgtttcactacgtctatcattcctcagatgttggtaaacctgtggggtccagataaaaccatctcatatgtggggtgcatcatccagttatatgtgtacatgtggttgggctctgtagaatgtctgctgctcgcagtcatgagctacgaccggttcacagcgatttgtaagcccttgcactactttgtggtcatgaatccccatctgtgcctgaaaatgattataatgatctggagtatctcattggctaacagcgtggtgctttgcaccctgaccctgaatctgcctacttgcggaaacaacattctggatcacttcctgtgtgagttaccggcgctggtgaagattgcatgtgtagacactactaccgtggaaatgtccgttttcgccctcggcattatcattgtgctgacacctctgattcttatccttatatcttatgggtacatcgccaaggcagttctgcgtactaagtcaaaggcaagccagcgtaaagctatgaatacctgcggcagccatctcaccgtggtgagcatgttctacggcaccatcatctatatgtatctgcagccgggaaaccgcgcttccaaagaccagggcaaatttcttactctcttttatacagtaatcacgccgagccttaaccccctgatctatactctgcggaataaggatatgaaggacgccctcaagaagttaatgcgttttcatcacaaatccacaaaaatcaagcgaaattgtaagagctag

SEQ ID NO: 220535 - DNA, 1028 bp, Artificial Sequence
  derived and/or modified sequence
ccttgtatcatcatctacctcctcctcctccttttctcactctaggatttagacattgaaggactatggaccaaagcaattatagttctttacatggttttattctgcttggcttctctaaccatccaaaaatggagatgatcctgtcaggagttgtcgccatcttctacttaattacattggtgggtaacacagccatcattcttgcatctctcctggattcccagcttcatacaccaatgtactttttcctcagaaatttatctttcctagatctatgtttcacaaccagcatcatccctcagatgctggtcaacttgtggggacctgataagaccatcagctatgtgggttgtatcatccaactctatgtttacatgtggttgggctcagttgagtgccttctcctggctgttatgtcctatgatcgttttacagctatatgtaagcccttgcattattttgtagtcatgaacccacatctatgtctaaagatgattatcatgatctggagtattagtttggccaattctgtagtattatgtacactcactctgaatttgcccacatgtggaaacaacattctggatcatttcttgtgtgagttgccagctctggtcaagatagcttgtgtagacaccacaacagttgaaatgtctgttttcgctttaggcattataattgtcctcacacctctcatccttattcttatatcctatggctacattgccaaagctgtgctgagaacgaagtcaaaagcaagccagcgaaaagcaatgaatacctgtggatctcatcttactgtagtgtctatgttctatggaactattatctacatgtacctgcaaccaggtaacagggcttccaaagaccagggcaagttcctcaccctcttttacaccgtcatcactccaagtctcaacccgctcatttacaccttaagaaataaggacatgaaggatgccctgaagaaactgatgagatttcaccacaaatctacaaaaataaagaggaattgcaagtcatag

SEQ ID NO: 220536 - DNA, 963 bp, Artificial Sequence
  derived and/or modified sequence
atggatcagtccaactattcttcactgcacgggttcatactcctgggctttagcaatcatcccaagatggagatgatcctgtcaggcgttgtggcaattttctatctgattacactagtgggcaatacggcaataattttggcttctctcctggatagtcagctgcacacccctatgtatttctttctgaggaatctaagctttctggacctatgcttcacaacctccatcataccacaaatgctggttaacctgtgggggccagacaagaccatctcttacgtgggatgtataatccaactgtacgtgtacatgtggcttggatcagttgagtgtctattgctcgcggttatgtcttacgaccgctttacagccatctgcaagccactccattactttgttgtgatgaacccacatctgtgtttgaagatgataattatgatttggtcgatctcacttgcaaattccgtcgtgctctgtactctcacccttaatctgccgacgtgtggaaacaacattctggaccattttctctgtgagctgccagcacttgtcaaaatagcatgcgtcgatactacaacagtagagatgtcagttttcgccctcggaattatcatcgtgcttacccccctcatcctgattcttataagttatggttacattgccaaggccgtccttcgaactaaaagcaaggccagccagagaaaggccatgaacacttgtgggtcccacctcaccgtggtgagcatgttctacgggaccattatttatatgtatctgcaacccggtaatagggcttccaaagaccaggggaagttcctgactctgttttacacagtgatcacaccctccctcaatccactgatctacactctgcgcaacaaggacatgaaggatgccctcaaaaagctgatgcggtttcatcacaagagcactaaaatcaagcggaattgtaaatcatag

SEQ ID NO: 220537 - DNA, 963 bp, Artificial Sequence
  derived and/or modified sequence
atggatcagtcgaattattcatcactgcatggttttatacttcttgggtttagcaatcaccccaagatggaaatgatcctgagtggagtggtggccatcttctacctgatcacgcttgtcgggaacacagcaatcatcctcgctagcctcttagattcccaactgcacaccccaatgtacttctttttgcgcaacctttcattcttggatttgtgcttcaccaccagtatcataccccaaatgctagtgaacttgtggggaccagacaaaaccatctcgtacgtgggatgtatcatccagctatatgtttatatgtggctggggagtgtcgaatgccttcttttagccgtcatgtcatatgataggttcaccgccatctgcaaacccctccactactttgttgtcatgaacccacatctttgcttgaaaatgattatcatgatatggtccattagtctagccaactcagtggtattatgcacactcactctgaacctgcccacatgtggaaacaacatattggatcactttctgtgcgaattaccagcgctggtgaaaatcgcttgcgttgatacgacgacagttgagatgtccgtgttcgcactgggcatcataatagtgttgactcccctgattctgatcctgatttcgtatggctatatagccaaagccgttttgagaactaaatccaaggcatcccagcgcaaggccatgaacacatgcgggagtcacctgaccgtcgtgtccatgttctacggcaccattatatatatgtatctccaacctggcaatagagcgtccaaggaccagggtaaatttctcaccctattttacactgtaattaccccctctctgaatcccctaatatacacacttcggaacaaagatatgaaggatgctctaaaaaagctcatgaggtttcatcacaagtcgacaaagatcaagagaaactgcaagagttag

SEQ ID NO: 220538 - DNA, 963 bp, Artificial Sequence
  derived and/or modified sequence
atggaccaatccaattactcatctctccatggctttattctgttaggcttcagcaatcacccaaagatggagatgatcttatccggcgtcgtggcaatcttttatctcattacattagtcgggaataccgctatcattttagctagcctgttggactcgcagctccacacaccaatgtacttctttctaagaaatctgtcattcctggacctctgtttcactacaagcattatccctcagatgctcgttaacctttgggggccagacaagactatttcctacgtaggctgcatcatacagctgtatgtatatatgtggttgggatcggttgaatgccttctgttagctgtcatgagttatgatcggtttaccgccatctgtaagccactgcattattttgtagtaatgaatccacatctatgtctgaagatgatcatcatgatctggtcgatctcactggccaacagtgttgtcctgtgtacactgactttaaacctcccaacgtgcggcaataacattctggaccactttctgtgcgaacttccagcccttgtgaagatagcgtgtgtggacactactactgtcgagatgagcgtgtttgctcttggtatcataattgtactcacccctttgatcctgattttgatctcctatggctacatcgctaaagcggtactgcggaccaagtcaaaggcttctcagaggaaggccatgaatacgtgcggaagccatctaacagtggtgtctatgttttatgggaccatcatctacatgtacttgcagccaggtaatcgggcatccaaggaccagggcaagttcttgactttgttctacaccgtgatcacgcctagtctgaaccccctgatttatactctgagaaacaaagacatgaaagatgcattaaagaaactgatgaggttccaccacaagagtacaaagattaaaaggaactgcaagtcttag

SEQ ID NO: 220539 - DNA, 963 bp, Artificial Sequence
  derived and/or modified sequence
atggaccagagtaattattcttccctccacggttttattctccttggattcagcaaccatcccaagatggagatgattctgtctggggtcgtggccatcttctatctgattaccctggtcgggaataccgcgattatcctagccagcctcctggattctcagcttcacacacccatgtacttcttcctacgaaatttgagcttcttggatttatgctttacgacgtccattattccgcagatgttggttaacttatggggcccagacaaaacgatttcttatgtcggctgcattatacagctttacgtatacatgtggctgggttcagtcgagtgtttgctcctcgccgtcatgtcgtacgaccgctttaccgcaatctgcaagcctttacactacttcgtcgttatgaacccccacctctgcctaaagatgatcattatgatatggagtataagccttgccaatagtgtggtcctttgcacccttaccctcaatctccccacttgcggcaacaacatcctcgaccacttcctgtgtgagctgcccgctctggtcaagatcgcctgtgtggacaccactacggttgaaatgtcagtgttcgctctgggcatcatcatagtccttacgccacttattctgattctgatcagctatggctacattgccaaggcggttctgaggaccaagtccaaggcaagtcaacggaaggccatgaatacatgcgggagccatctcaccgtggtctcgatgttttatggtacaattatctacatgtacctccagccgggaaaccgcgctagtaaggaccaaggtaaatttctaactctgttttacacagtcatcaccccaagcttgaatccgctgatctacactctgagaaacaaagatatgaaggatgctctaaagaagctgatgaggttccatcataaatccaccaaaattaaaaggaactgcaagtcctag

SEQ ID NO: 220540 - DNA, 963 bp, Artificial Sequence
  derived and/or modified sequence
atggaccagagcaattactcttcactgcacgggttcatattgcttggcttctcaaatcatcctaaaatggaaatgatcctctccggggtggtggccattttttacctcattaccttggtagggaacaccgctatcatcttagcctccctgcttgattctcaactccacacacctatgtacttttttctcaggaacctatccttccttgacctttgttttactacgagcattattcctcagatgcttgtaaatttgtgggggcctgacaaaaccattagctacgtggggtgcatcatacagctgtatgtgtatatgtggctcgggtctgtggagtgtctactgctggctgtgatgtcttatgaccgtttcactgctatctgcaagccactgcattatttcgtggttatgaatccacacctgtgtctcaaaatgataattatgatctggagtatctctttggctaactccgtagttctgtgtaccctcactctgaacctccccacctgcggcaataacatcctggaccacttcctctgcgagctgccagccctggttaaaatagcctgtgttgacaccacaacagtggagatgtccgtgttcgcacttggcataatcatcgtcctgactcccctgatcttgattctgattagttacggatacatcgccaaagccgtccttcgaaccaagtctaaggcttctcagcgtaaggcgatgaacacttgcggttcccatcttacagtcgtctccatgttttacggcaccatcatttacatgtacctgcagccaggaaacagggcgagtaaggatcaggggaagtttctgactcttttttacactgttatcacaccttccttaaatcctctcatctacacattacggaacaaggacatgaaagacgcccttaagaagttgatgcgctttcaccacaagagcaccaaaataaaaaggaactgcaagagttag

SEQ ID NO: 220541 - DNA, 963 bp, Artificial Sequence
  derived and/or modified sequence
atggatcagagtaactatagctcacttcacggcttcatcttgttggggttctcaaaccatcctaaaatggaaatgatactgtcaggggtggttgctatcttttacctaattaccttggtggggaataccgctataattttagctagcctactggacagccagcttcatacccccatgtacttcttccttagaaatttgagtttcctagatctttgctttacaacttcaataattccccaaatgttggtgaacctgtggggccctgacaagactatatcctacgtcggctgcatcattcagttatatgtatacatgtggctcggtagcgtggagtgcctgctgctggctgtgatgtcatacgatagattcacagcaatttgcaaaccccttcattattttgttgtgatgaatccccatctctgtctgaagatgattataatgatttggtccatttcactggctaactcagttgttctttgcactctgacgctcaacctgcccacctgcggcaacaacatccttgatcacttcttatgcgagctccccgcattagtcaaaattgcttgcgttgacaccaccacagtagaaatgagcgtatttgccctcggaatcatcattgtgctgacacccttgatcttgatactcatctcctatgggtatattgccaaagcggtcctcagaacgaaaagcaaagcttcccagcggaaggccatgaatacgtgcggtagccatctgaccgtggtttcaatgttctatgggaccattatctatatgtacctgcagccgggaaaccgggcatctaaggatcaaggaaaatttctgacccttttctacaccgtgattactcctagtctgaatcctctgatctataccctgagaaacaaggatatgaaggatgccttaaaaaagctgatgcgttttcatcacaagagtacgaagattaagagaaattgcaagtcctag

SEQ ID NO: 220542 - DNA, 963 bp, Artificial Sequence
  derived and/or modified sequence
atggatcagtccaactactctagtctgcatggatttattctgctagggtttagtaatcatcccaagatggagatgatcctctcaggcgtggtcgctatcttctacctgattacattagtaggcaataccgctatcatcttggcctctctgctggatagccagctccatactcctatgtacttttttctgcggaacctcagcttcctggacctgtgctttactaccagtataattccacagatgctggtaaacctatgggggccagacaagactattagctacgtgggttgcattattcagctgtatgtatatatgtggttagggagcgtggaatgcttgttgttggccgtcatgtcctatgaccggttcacagccatttgcaaaccactgcactatttcgtggtcatgaacccgcacttgtgtttaaagatgatcattatgatctggtcaatcagtttggccaacagcgttgtcctctgtaccttgaccttgaacttacctacatgcgggaacaacattctggaccacttcctatgcgagcttccagccctcgttaagattgcttgtgtagacacaacaactgtagaaatgagtgtatttgcgctggggattatcatcgtcctgacccccttgatcctaatcctgatcagttacgggtatatcgcaaaagccgtgctcagaaccaaatcaaaagcttctcaaagaaaagccatgaacacctgcgggagccacctgacagttgtttctatgttttatggcaccatcatctatatgtacctccagccgggtaacagggcctccaaggatcagggcaaattcttgacccttttctataccgttataacgccctcattgaaccccctgatatacacactccgaaacaaagacatgaaagatgcactgaagaagttgatgcggttccatcataaaagtacaaagatcaagcgaaactgcaaatcctag

SEQ ID NO: 220543 - DNA, 963 bp, Artificial Sequence
  derived and/or modified sequence
atggaccagtctaactactcctcacttcatggcttcatcctgttgggattttcaaaccaccctaagatggagatgatcctgagcggggtagttgccattttctatttaatcaccctggttggcaacaccgcaatcatcctggctagcttgctggattcccagctacacacacccatgtatttctttctgcgcaacctgtcatttctggacttgtgctttacaacatctatcattcctcagatgctcgtgaacctgtggggaccggataagactatctcttatgtgggctgtatcatccaactatacgtgtacatgtggctggggagtgtggagtgtttgctgctggcggtgatgtcatatgatcgctttaccgcaatctgtaagccactacattacttcgtcgtgatgaacccacacctgtgcctgaaaatgatcatcatgatttggagtatctcactggctaacagtgtggtcctgtgtaccctgacactcaacctccctacttgcggcaataacatcttggaccactttctatgcgaactcccagccctggtgaagattgcctgcgttgacaccaccacagtggagatgagcgtcttcgcccttgggatcatcatagtgctgactcctctcattttgatcttgatcagctatggctatatcgccaaggctgtccttcgcactaagtcgaaggctagtcaaagaaaggctatgaacacctgtgggagccatctgaccgttgtatctatgttctacggcacgattatttatatgtacctccagcccggtaaccgggctagcaaggaccaaggaaagtttctcactctgttttataccgtgataactccttcccttaacccactcatctacactttgcgaaataaagatatgaaagacgcactgaaaaaactcatgaggtttcatcacaagagcactaagataaaaaggaattgcaaatcttag

SEQ ID NO: 220544 - protein, 369 aa, Artificial Sequence
  derived and/or modified sequence
MWQEYYFLNVFFPLLKVCCLTINSHVVILLPWECYHLIWKILPYIGTTVGSMEEYNTSSTDFTFMGLFNRKETSGLIFAIISIIFFTALMANGVMIFLIQTDLRLHTPMYFLLSHLSLIDMMYISTIVPKMLVNYLLDQRTISFVGCTAQHFLYLTLVGAEFFLLGLMAYDRYVAICNPLRYPVLMSRRVCWMIIAGSWFGGSLDGFLLTPITMSFPFCNSREINHFFCEAPAVLKLACADTALYETVMYVCCVLMLLIPFSVVLASYARILTTVQCMSSVEGRKKAFATCSSHMTVVSLFYGAAMYTYMLPHSYHKPAQDKVLSVFYTILTPMLNPLIYSLRNKDVTGALKRALGRFKGPQRVSGGVF

SEQ ID NO: 220545 - DNA, 1110 bp, Artificial Sequence
  derived and/or modified sequence
atgtggcaggagtactacttcctgaacgtgttcttccccctgctgaaggtgtgctgcctgaccatcaacagccacgtggtgatcctgctgccctgggagtgctaccacctgatctggaagatcctgccctacatcggcaccaccgtgggcagcatggaggagtacaacaccagcagcaccgacttcaccttcatgggcctgttcaacagaaaggagaccagcggcctgatcttcgccatcatcagcatcatcttcttcaccgccctgatggccaacggcgtgatgatcttcctgatccagaccgacctgagactgcacacccccatgtacttcctgctgagccacctgagcctgatcgacatgatgtacatcagcaccatcgtgcccaagatgctggtgaactacctgctggaccagagaaccatcagcttcgtgggctgcaccgcccagcacttcctgtacctgaccctggtgggcgccgagttcttcctgctgggcctgatggcctacgacagatacgtggccatctgcaaccccctgagataccccgtgctgatgagcagaagagtgtgctggatgatcatcgccggcagctggttcggcggcagcctggacggcttcctgctgacccccatcaccatgagcttccccttctgcaacagcagagagatcaaccacttcttctgcgaggcccccgccgtgctgaagctggcctgcgccgacaccgccctgtacgagaccgtgatgtacgtgtgctgcgtgctgatgctgctgatccccttcagcgtggtgctggccagctacgccagaatcctgaccaccgtgcagtgcatgagcagcgtggagggcagaaagaaggccttcgccacctgcagcagccacatgaccgtggtgagcctgttctacggcgccgccatgtacacctacatgctgccccacagctaccacaagcccgcccaggacaaggtgctgagcgtgttctacaccatcctgacccccatgctgaaccccctgatctacagcctgagaaacaaggacgtgaccggcgccctgaagagagccctgggcagattcaagggcccccagagagtgagcggcggcgtgttctag

SEQ ID NO: 220546 - DNA, 1110 bp, Artificial Sequence
  derived and/or modified sequence
atgtggcaggagtattatttcttgaacgttttctttcctttgcttaaggtatgctgcctgaccataaactcccacgtcgtaatattgctaccctgggaatgctaccatttgatttggaagatcctcccctacattggaaccaccgttgggtcaatggaggagtacaatacctctagcaccgacttcacattcatgggcctgtttaacaggaaggaaacgtcaggcctgatcttcgctattatatccatcatcttcttcactgctctgatggctaacggagttatgatatttctgatccagacagacctgcggctccatacccccatgtattttctcttatcacacctgtcccttattgatatgatgtacatttcgacaatagttcccaagatgctggtgaattacctgcttgaccagaggacaattagctttgtcggctgcactgcgcagcactttctgtatttgaccttggtgggagcagagttttttttgctggggttgatggcctatgataggtatgtggctatttgtaatccccttcggtaccccgtgctcatgtcgagacgggtctgctggatgattattgccgggtcctggttcggcggcagtttggacggttttctgttgaccccgataactatgagcttcccattttgtaactcccgagaaataaaccattttttctgtgaagccccagccgtcctaaagctcgcgtgtgccgatacagccctgtacgaaacagtcatgtacgtgtgttgcgtgttgatgctgttgattcctttcagtgtcgttctggctagctatgcaaggatcctgaccaccgttcaatgtatgtcatccgtggagggccggaaaaaggcgttcgccacttgcagttcgcacatgaccgtggtgagcctgttctatggcgccgcaatgtatacatatatgttgccgcactcctaccacaagccagcccaggacaaagtgcttagtgttttctacacgattttgactccaatgctgaacccgctgatttactctttgagaaataaagatgtcacaggagctttgaaacgggctctcggaaggttcaagggcccccagagagtgagcggcggggtgttctag

SEQ ID NO: 220547 - DNA, 1110 bp, Artificial Sequence
  derived and/or modified sequence
atgtggcaggagtactacttcctgaatgtgttcttccccctgctgaaggtgtgctgcctgaccatcaacagccacgtggtgatcctgctgccctgggagtgctaccacctgatctggaagatcctgccctacatcggcaccaccgtgggctccatggaggagtacaacaccagcagcacagacttcaccttcatgggcctcttcaacaggaaggagaccagcggcctcatctttgccatcatcagcatcatcttcttcaccgccctgatggccaacggggtgatgatcttcctgatccagacagacctgcggctgcacacccccatgtacttcctgctgagccacctgagcctgattgacatgatgtacatcagcaccatcgtgcccaagatgctggtgaactacctgctggaccagaggaccatcagctttgtgggctgcacagcccagcacttcctgtacctgaccctggtgggcgctgagttcttcctgctgggcctgatggcctatgacagatatgtggccatctgcaaccccctgcgctaccctgtgctgatgagccggcgggtgtgctggatgatcatcgccggctcctggtttggaggcagcctggatggcttcctgctgacccccatcaccatgtccttccccttctgcaacagccgggagatcaaccacttcttctgtgaggccccagctgtgctgaagctggcctgtgccgacacagccctgtatgaaacagtgatgtatgtgtgctgcgtgctgatgctgctgatccccttctctgtggtgctggccagctatgcccgcatcctgaccaccgtgcagtgcatgagctctgtggagggcaggaagaaggcctttgccacctgcagcagccacatgacagtggtgtccctcttctacggggccgccatgtacacctacatgctgccccacagctaccacaagccagcccaggacaaggtgctgtctgtgttctacaccatcctgacccccatgctgaaccccctcatctacagcctgaggaacaaggatgtgactggagccctgaagagggccctgggccgcttcaagggcccccagagggtgtctggaggagtcttctag

SEQ ID NO: 220548 - DNA, 1110 bp, Artificial Sequence
  derived and/or modified sequence
atgtggcaagaatactattttttaaatgttttcttcccacttttaaaagtttgctgcctaacaattaattcacatgttgttattttactgccctgggaatgctatcatcttatttggaagatattaccttatatcggcacaactgtaggatcaatggaagagtacaacacatcctctacagacttcactttcatggggctgttcaacagaaaggaaacctcaggtcttatttttgccatcatctctatcatcttcttcaccgcactgatggccaatggggttatgatcttcctgatccaaacagatttgcgccttcatacacccatgtacttcctcctcagccacctttccttaattgacatgatgtatatttccactattgtgcctaagatgctggttaattacctgctggatcaaaggaccatttcctttgtggggtgcacagctcaacacttcctctaccttacccttgtgggagctgaattcttcctgctgggcctcatggcctatgaccgctatgtggccatttgcaaccctctgagataccctgtcctcatgagccgccgggtctgttggatgattatagcaggttcctggtttgggggctctttggatggcttcctcctaacccccatcaccatgagctttcccttctgcaattcccgggagattaaccacttcttctgtgaggcaccagcagtcctgaagttggcatgtgcagacacagccctctacgagacagtgatgtatgtgtgctgtgttttgatgctgctgattcctttctctgtagtccttgcttcctatgcccgaatcctgactacagttcagtgcatgagctcagtggagggcaggaagaaggcatttgccacttgctcatcccacatgactgtggtgtccttgttctacggggctgccatgtacacctacatgctgccacattcttaccacaagccagcccaggacaaagtcctctctgtgttttacaccattctcacacccatgctgaaccccctcatctacagccttagaaacaaggatgtgactggagctctgaagagggccttggggaggttcaagggtcctcaaagggtgtcaggaggtgtcttttga

SEQ ID NO: 220549 - DNA, 1110 bp, Artificial Sequence
  derived and/or modified sequence
atgtggcaggagtactacttcctgaacgtgttcttccccctgctgaaggtctgttgcttaaccatcaattcccatgttgttattctgttaccgtgggagtgttaccacctgatttggaaaatcctcccctatataggtactaccgtgggcagcatggaggagtataacacctcctctaccgacttcacgttcatgggactgtttaatcgcaaagagacatcagggcttattttcgcgattatttcaatcattttttttaccgcgctcatggctaatggagtgatgatttttctgatacagaccgatctgcggctccacacgcccatgtacttcctgttgtcccatttgtctctgatcgacatgatgtacatcagcactatcgtacccaagatgctggtcaattatcttctggatcagaggactattagctttgtgggctgcactgctcagcacttcctgtacctgaccctcgtgggcgctgagttcttcctgcttggcctgatggcctatgacagatacgtggccatttgcaatcccctcaggtatccggtgcttatgtctagacgtgtgtgctggatgatcatagcagggtcctggtttggcggctcactcgatggatttttgctaactccgattaccatgagctttccattctgtaacagccgcgagattaatcactttttctgtgaagctccggctgtgttaaaactggcttgtgccgacaccgcactttacgagacagtcatgtatgtatgttgcgtgttgatgcttctgataccattctctgtggtgctcgccagctatgctaggatcctgactacggttcaatgtatgtcttctgtagagggccgcaagaaagctttcgccacttgttcttcgcacatgaccgtggtatcattgttctacggggcagcaatgtacacttacatgttgccacacagctatcacaagccagcccaggataaagtgctcagcgtgttctacactatcctcacacctatgctgaatccgttgatctacagcctacggaataaagacgtgacaggcgctttaaagagagctctgggtcgtttcaaaggcccccaaagagtgtccggcggggtcttttag

SEQ ID NO: 220550 - DNA, 1110 bp, Artificial Sequence
  derived and/or modified sequence
atgtggcaggagtattactttcttaacgtattcttccccttgctaaaagtgtgctgtttgacaatcaatagccatgtagtgattctgttgccctgggaatgctatcacttgatctggaaaattctcccctacatcgggaccacggtggggtctatggaggagtataatacatcctcaacagattttactttcatggggttgttcaatcgaaaggagacttcaggcttaattttcgcgataatctcaattatatttttcaccgctctgatggccaacggcgtgatgatcttcttgattcagactgatctaagacttcacacacccatgtattttctcttgtctcacctgtcgctgattgacatgatgtatatttccaccatcgtgcctaagatgctggttaactaccttctggaccaacgaaccatctcctttgtgggatgtacagcccaacacttcctgtatctgacccttgtgggcgcagagtttttccttcttggcttaatggcatatgataggtacgtcgcgatatgtaatcccctgcggtacccggtgctcatgagtcggagggtctgttggatgatcatcgcaggttcttggttcggtgggagcctggatggattccttctgaccccaattacaatgtctttccctttctgcaactctcgggagatcaaccattttttttgtgaagcccctgcagtgttgaaattagcttgcgctgacactgccctgtacgaaacagttatgtacgtttgctgtgtgctgatgctgctgatccctttttccgtggtgctggcgagctatgctcgcattctgacaacagtgcagtgcatgtcctccgtcgaaggaagaaagaaggccttcgcaacttgctcctcccacatgactgtcgtctccctcttttacggagcggcaatgtacacatacatgttgccacactcctaccataagcctgctcaggacaaggtgctgagcgtcttctacacaatccttacacctatgcttaatccactgatctacagtcttagaaacaaagatgtgactggagccctgaagcgggctctgggacggtttaagggcccacagcgggtgtccggaggggttttctag

SEQ ID NO: 220551 - protein, 312 aa, Artificial Sequence
  derived and/or modified sequence
MLMKKNASFEDFFLLLGFSNWPHLEVVLFVVILIFYLITLIGNLFIIILSYLDSHLHTPMYFFLSNLSFLDLCYTTSSIPQLLVNLWGPEKTISYAGCTVQLYFVLALGTAECVLLVVMSYDRYAAVCRPLHYTVLMHPRFCRLLAAASWVSGFTTSALHSSFTFWIPLCRHRLVDHFFCEVPALLRLSCVDTQANELTLMVMSSIFVLIPLILILTSYGAIARAVLSMQSTTGLQKVLRTCGAHLMVVSLFFIPVMCMYLQPPSENSQDQGKFIALFYTVVTPSLNPLIYTFRNKDVRGAVKRLMGWEWGM

SEQ ID NO: 220552 - protein, 312 aa, Artificial Sequence
  derived and/or modified sequence
MMIKKNASSEDFFILLGFSNWPQLEVVLFVVILIFYLMTLTGNLFIIILSYVDSHLHTPMYFFLSNLSFLDLCHTTSSIPQLLVNLRGPEKTISYAGCMVQLYFVLALGIAECVLLVVMSYDRYVAVCRPLHYTVLMHPRFCHLLAAASWVIGFTISALHSSFTFWVPLCGHRLVDHFFCEVPALLRLSCVDTHANELTLMVMSSIFVLIPLILILTAYGAIARAVLSMQSTTGLQKVFRTCGAHLMVVSLFFIPVMCMYLQPPSENSPDQGKFIALFYTVVTPSLNPLIYTLRNKHVKGAAKRLLGWEWGK

SEQ ID NO: 220553 - protein, 312 aa, Artificial Sequence
  derived and/or modified sequence
MLMKKNASFEDFFILLGFSNWPHLEVVLFVVILIFYLITLIGNLFIIILSYLDSHLHTPMYFFLSNLSFLDLCYTTSSIPQLLVNLWGPEKTISYAGCTVQLYFVLALGTAECVLLVVMSYDRYAAVCRPLHYTVLMHPRFCRLLAAASWVSGFTTSALHSSFTFWIPLCRHRLVDHFFCEVPALLRLSCVDTQANELTLMVMSSIFVLIPLILILTSYGAIARAVLSMQSTTGLQKVLRTCGAHLMVVSLFFIPVMCMYLQPPSENSQDQGKFIALFYTVVTPSLNPLIYTFRNKDVRGAVKRLMGWEWGM

SEQ ID NO: 220554 - protein, 312 aa, Artificial Sequence
  derived and/or modified sequence
MMIKKNASSEDFFILLGFSNWPQLEVVLFVVILIFYLMTLTGNLFIIILSYVDSHLHTPMYFFLSNLSFLDLCYTTSSIPQLLVNLRGPEKTISYAGCMVQLYFVLALGIAECVLLVVMSYDRYVAVCRPLHYTVLMHPRFCHLLVAASWVIGFTISALHSSFTFWVPLCGHRLVDHFFCEVPALLRLSCVDTHANELTLMVMSSIFVLIPLILILTTYGAIARAVLSMQSTTGLQKVFRTCGAHLMVVSLFFIPVMCMYLQPPSENSPDQGKFIALFYTVVTPSLNPLIYTLRNKHVKGAAKRLLGWEWGK

SEQ ID NO: 220555 - protein, 312 aa, Artificial Sequence
  derived and/or modified sequence
MMIKKNASSEDFFILLGFSNWPQLEVVLFVVILIFYLMTLTGNLFIIILSYVDSHLHTPMYFFLSNLSFLDLCYTTSSIPQLLVNLRGPEKTISYAGCMVQLYFVLALGITECVLLVVMSYDRYVAVCRPLHYTVLMHPRFCHLLVAASWVIGFTISALHSSFTFWVPLCGHRLVDHFFCEVPALLRLSCVDTHANELTLMVMSSIFVLIPLILILTTYGAIARAVLSMQSTTGLQKVFRTCGAHLMVVSLFFIPVMCMYLQPPSENSPDQGKFIALFYTVVTPSLNPLIYTLRNKHVKGAAKRLLGWEWGK

SEQ ID NO: 220556 - DNA, 939 bp, Artificial Sequence
  derived and/or modified sequence
atgctgatgaagaagaacgccagcttcgaggacttcttcctgctgctgggcttcagcaactggccccacctggaggtggtgctgttcgtggtgatcctgatcttctacctgatcaccctgatcggcaacctgttcatcatcatcctgagctacctggacagccacctgcacacccccatgtacttcttcctgagcaacctgagcttcctggacctgtgctacaccaccagcagcatcccccagctgctggtgaacctgtggggccccgagaagaccatcagctacgccggctgcaccgtgcagctgtacttcgtgctggccctgggcaccgccgagtgcgtgctgctggtggtgatgagctacgacagatacgccgccgtgtgcagacccctgcactacaccgtgctgatgcaccccagattctgcagactgctggccgccgccagctgggtgagcggcttcaccaccagcgccctgcacagcagcttcaccttctggatccccctgtgcagacacagactggtggaccacttcttctgcgaggtgcccgccctgctgagactgagctgcgtggacacccaggccaacgagctgaccctgatggtgatgagcagcatcttcgtgctgatccccctgatcctgatcctgaccagctacggcgccatcgccagagccgtgctgagcatgcagagcaccaccggcctgcagaaggtgctgagaacctgcggcgcccacctgatggtggtgagcctgttcttcatccccgtgatgtgcatgtacctgcagccccccagcgagaacagccaggaccagggcaagttcatcgccctgttctacaccgtggtgacccccagcctgaaccccctgatctacaccttcagaaacaaggacgtgagaggcgccgtgaagagactgatgggctgggagtggggcatgtag

SEQ ID NO: 220557 - DNA, 939 bp, Artificial Sequence
  derived and/or modified sequence
atgatgatcaagaagaacgccagcagcgaggacttcttcatcctgctgggcttcagcaactggccccagctggaggtggtgctgttcgtggtgatcctgatcttctacctgatgaccctgaccggcaacctgttcatcatcatcctgagctacgtggacagccacctgcacacccccatgtacttcttcctgagcaacctgagcttcctggacctgtgccacaccaccagcagcatcccccagctgctggtgaacctgagaggccccgagaagaccatcagctacgccggctgcatggtgcagctgtacttcgtgctggccctgggcatcgccgagtgcgtgctgctggtggtgatgagctacgacagatacgtggccgtgtgcagacccctgcactacaccgtgctgatgcaccccagattctgccacctgctggccgccgccagctgggtgatcggcttcaccatcagcgccctgcacagcagcttcaccttctgggtgcccctgtgcggccacagactggtggaccacttcttctgcgaggtgcccgccctgctgagactgagctgcgtggacacccacgccaacgagctgaccctgatggtgatgagcagcatcttcgtgctgatccccctgatcctgatcctgaccgcctacggcgccatcgccagagccgtgctgagcatgcagagcaccaccggcctgcagaaggtgttcagaacctgcggcgcccacctgatggtggtgagcctgttcttcatccccgtgatgtgcatgtacctgcagccccccagcgagaacagccccgaccagggcaagttcatcgccctgttctacaccgtggtgacccccagcctgaaccccctgatctacaccctgagaaacaagcacgtgaagggcgccgccaagagactgctgggctgggagtggggcaagtag

SEQ ID NO: 220558 - DNA, 939 bp, Artificial Sequence
  derived and/or modified sequence
atgctgatgaagaaaaacgcatctttcgaggatttcttcctcctactgggcttttctaattggccgcaccttgaggtcgtgctttttgtggtgatcctgatattctatctgatcaccctgattggcaatcttttcatcattatcttatcatatctcgacagccatctgcatactcctatgtatttttttctcagcaatctgagcttcctggatctatgctatactacaagcagtattcctcagctgctggtgaacctctggggccccgaaaagactatctcgtatgctggatgcactgtgcaactgtacttcgtcctggcgttaggaacagccgagtgtgtgctccttgttgtgatgtcctacgaccgttacgccgcagtgtgcaggcccttgcactacaccgtgttaatgcaccctcgcttttgtagactgctagcagctgcgtcttgggtatctgggttcacgactagtgcccttcactcatctttcactttttggatcccactatgcaggcatcggctggtggatcacttcttttgcgaggtcccggctctcttacggctgagttgtgttgatacgcaagccaatgagctcaccctgatggttatgagttctattttcgtcctgatcccgttaattctgatactgacatcttacggcgccattgcacgcgctgtgctgtcgatgcagtcaaccacggggctgcagaaagttctcagaacctgtggggcacatttgatggtggttagcctgttttttatcccagtgatgtgcatgtatcttcagcctccttccgagaatagccaggaccagggcaagtttatcgccctgttttataccgtagttactccctctcttaatcctctgatatacacctttagaaacaaggacgtgagaggagccgtgaagcgtctgatgggttgggaatgggggatgtag

SEQ ID NO: 220559 - DNA, 939 bp, Artificial Sequence
  derived and/or modified sequence
atgatgatcaagaaaaacgcgtcctctgaagatttcttcatcctgctgggcttctctaattggccccagctcgaagttgtactgtttgtggtcatcttgattttctacttgatgacacttactggtaatctgtttatcatcatattgagctatgtcgacagtcatctgcatacccccatgtacttcttcttgtctaaccttagtttcttagatctgtgccacaccacgtccagcataccacagttgttggtgaacttgcggggacctgagaagactatatcttatgccggatgcatggtccagctctatttcgtgctggctctggggatcgcggaatgcgtgctattagtcgtgatgagttatgatagatatgtagcggtttgccggccactccattatacagttctcatgcatccaagattttgccatttgctagccgctgccagctgggtgattggcttcacgatcagcgcccttcattcaagtttcactttttgggtcccactttgcggccatcgcctggtcgaccacttcttctgcgaggtccccgccctcctaagactgtcttgtgtggatacacatgccaacgagctgactctgatggttatgagttcaatcttcgtgctcattccactgattcttattctcactgcctacggggccattgcaagagccgtcctctcaatgcagtcgactacagggctgcagaaagtcttccgaacttgcggggctcatttaatggtggtgtctctgtttttcattccagtcatgtgtatgtaccttcagccacccagtgaaaattcaccagatcagggaaaattcatcgccctgttttacactgtggtaactccatccctaaacccactcatttacaccttgcgaaataaacacgttaagggcgctgccaagagactgctgggctgggagtggggcaaatag

SEQ ID NO: 220560 - DNA, 939 bp, Artificial Sequence
  derived and/or modified sequence
atgatgatcaagaagaacgcttccagcgaggactttttcatcctcctcgggttcagcaattggccccaattagaagtcgttctgttcgtcgtgattcttatattctatttgatgacactaaccgggaacctgtttattatcatcctttcctatgttgacagccatctgcatacgcccatgtatttcttcctgtcaaacctgagctttctcgacctatgccacacaacatccagtataccacagctattggtgaatctacgaggaccagagaagacaattagttacgcaggctgtatggtacagctctatttcgtgcttgctttaggtatcgctgagtgcgtcctgctggtggtgatgtcttacgacagatatgtcgctgtgtgccgcccactgcattatacagtgctgatgcacccacgtttctgtcatctcctggcagctgcttcttgggtgatagggttcaccatatcggccctgcatagctcattcaccttttgggtcccactttgtggtcaccgcctagtggaccacttcttctgtgaagtgcctgcacttctgcgactgagttgtgtggatacccatgcaaacgagctgactctgatggttatgagcagcattttcgtactcattcctctgattttaattttgacggcgtacggagccatcgctagggccgtgctctctatgcagtctaccaccgggttgcaaaaagttttccgcacgtgtggggcccacctcatggtggtgagccttttttttattcctgtcatgtgtatgtatctccaaccaccatcagagaactccccggaccaggggaagtttattgccttgttctacaccgttgtcactccatctttaaacccattaatttatacactccgaaataagcatgtgaaaggagcagcgaaaaggctcctgggctgggaatggggcaaatag

SEQ ID NO: 220561 - DNA, 939 bp, Artificial Sequence
  derived and/or modified sequence
atgatgatcaagaaaaacgcttcctctgaagactttttcattctgctgggcttcagcaactggccgcagctggaagtcgttctgttcgttgttatacttattttttacctcatgactctaaccgggaacttgtttataattatcctctcttatgtcgactcccatctgcacacacctatgtatttttttctgtccaacctttcctttctcgacttatgccacaccaccagcagtattccacagttgctagtgaatctgaggggacccgagaaaactatttcttatgctggctgcatggtgcagttatatttcgtgctggcccttgggatcgctgaatgtgttctcctggtcgtcatgagctacgatcggtatgtagctgtgtgccgaccactgcactatacagttctcatgcacccaaggttctgccacctgttggccgcagcctcttgggtgattggatttaccatcagtgcgctacactcttcatttactttctgggttcccctgtgcggccatagactggtggatcacttcttctgtgaggtaccggcgctgctgagattgtcttgcgtggacacccatgcaaacgagctcaccctgatggtgatgagttctatctttgtactcatccccctgatcctgattcttacagcatacggggccatcgctcgagcggtgctgtcaatgcagagcacgactgggctgcaaaaagtgttccgcacatgcggggctcatctaatggtggtttcgcttttcttcatccctgtgatgtgcatgtacttacagcccccctcagagaactcacccgatcaagggaaatttatcgccttgttctacacggtcgtcaccccaagtcttaacccactgatctacaccctgcgcaacaagcacgtgaagggggcagctaaaagactgctggggtgggagtggggaaagtag

SEQ ID NO: 220562 - DNA, 939 bp, Artificial Sequence
  derived and/or modified sequence
atgatgatcaagaagaatgcatccagcgaggacttcttcattttattgggattttctaactggccgcagctcgaggtcgtcctatttgtagtgatcctcattttttaccttatgactctgaccggaaacctgtttattatcatcctgtcttatgttgactctcaccttcacacacccatgtacttctttctgagcaatctgagcttcctggatctctgccatactacgtcatctattcctcagctcttggtgaacctccggggtcctgagaaaacaattagctatgctggttgtatggtccagctctactttgtcttggccctcggtatcgcggagtgcgtgctgctggtcgtgatgtcctacgatcggtacgtcgcagtttgcagacctctgcattatacagtgctgatgcacccacggttttgccatcttctggctgccgcctcctgggtgattggtttcacaatttccgcactccattcgtcctttacattctgggtgcctctatgtggccaccgccttgtggatcactttttctgcgaggtccccgctctcctcagattgagctgtgtggacacacacgccaacgagctgacccttatggtgatgagctctatctttgtgctgatcccgctgattctgatattgacagcgtacggagctatcgctcgagcagtgctatctatgcaatccaccaccggattacagaaggtattccgcacctgcggggcccacctaatggtggtgtcccttttctttatcccagtgatgtgtatgtacctgcagccccctagtgagaactcacccgaccaaggcaaattcatcgcactcttttatactgtggttacaccaagtctgaacccactgatctatacattgcggaataaacacgtcaaaggggccgctaaaaggctattgggctgggagtgggggaagtag

SEQ ID NO: 220563 - DNA, 939 bp, Artificial Sequence
  derived and/or modified sequence
atgatgattaagaaaaatgctagtagcgaggacttcttcatcttgcttggtttctcaaactggccacagctggaagtagtgctgttcgtcgtgatcttgatcttctatttgatgactctaactggcaatctgttcatcatcatcctgtcatatgtagatagccatcttcataccccaatgtactttttcctcagcaatctgtcctttctcgatctttgtcataccaccagctccataccacagctgttagtcaacctgcgagggcctgaaaagaccatctcttatgccgggtgtatggtccaactgtacttcgtgctggctctcgggatcgctgagtgcgtccttttggtcgtgatgagctacgacaggtatgtcgcggtctgtaggccactgcactacactgtgcttatgcatccccgcttttgtcacttactggctgccgcatcctgggttatcggcttcaccattagtgcgcttcactcctccttcacgttttgggtccccctctgcggtcaccggctagttgatcatttcttttgtgaagtgccggccctcctgaggttaagctgtgtggatactcatgcaaatgagcttacgctgatggtgatgtcctccatcttcgttctcatccctctgattcttatcctcactgcctatggtgcgatcgccagggcggtgctatcaatgcagtccacgactgggctccaaaaggtcttcagaacatgcggggcccacctgatggtggttagcctgttttttatcccagttatgtgcatgtacttacagcccccaagcgaaaacagccctgaccaggggaagtttattgcgctcttctacacagtggttacccccagcctgaatcctcttatttatacccttaggaacaagcatgtcaaaggcgccgccaagcgcctgttgggctgggaatgggggaagtag

SEQ ID NO: 220564 - DNA, 939 bp, Artificial Sequence
  derived and/or modified sequence
atgctgatgaagaagaatgccagctttgaggacttcttcctgctgctgggcttcagcaactggccccacctggaggtggtgctgtttgtggtgatcctgatcttctacctgatcaccctgattggcaacctcttcatcatcatcctgagctacctggacagccacctgcacacccccatgtacttcttcctgagcaacctgtccttcctggacctgtgctacaccaccagcagcatcccccagctgctggtgaacctgtggggccctgagaagaccatctcctatgccggctgcaccgtgcagctgtactttgtgctggccctgggcacagcagaatgtgtgctgctggtggtgatgtcctatgacagatatgctgctgtgtgccggcccctgcactacacagtgctgatgcacccccgcttctgccgcctgctggccgccgcctcctgggtgtctggcttcaccaccagcgccctgcacagcagcttcaccttctggatccccctgtgccgccaccggctggtggaccacttcttctgtgaggtgcctgccctgctgcggctgagctgtgtggacacccaggccaatgagctgaccctgatggtgatgagcagcatctttgtgctgatccccctcatcctgatcctgaccagctatggagccatcgcccgggctgtgctgtccatgcagagcaccaccggcctgcagaaggtgctgcggacctgtggggcccacctgatggtggtgtccctcttcttcatccctgtgatgtgcatgtacctgcagcccccatctgagaacagccaggaccagggcaagttcatcgccctcttctacacagtggtgacccccagcctgaaccccctcatctacaccttcaggaacaaggatgtgagaggagctgtgaagaggctgatgggctgggagtggggcatgtag

SEQ ID NO: 220565 - DNA, 939 bp, Artificial Sequence
  derived and/or modified sequence
atgatgatcaagaagaatgccagcagcgaggacttcttcatcctgctgggcttcagcaactggccccagctggaggtggtgctgtttgtggtgatcctgatcttctacctgatgaccctgactggaaacctcttcatcatcatcctgtcctatgtggacagccacctgcacacccccatgtacttcttcctgagcaacctgtccttcctggacctgtgccacaccaccagcagcatcccccagctgctggtgaacctgcggggccctgagaagaccatctcctatgccggctgcatggtgcagctgtactttgtgctggccctgggcattgctgaatgtgtgctgctggtggtgatgtcctatgaccgctacgtggccgtgtgccggcccctgcactacacagtgctgatgcacccccgcttctgccacctgctggccgccgcctcctgggtgattggcttcaccatcagcgccctgcacagcagcttcaccttctgggtgcccctgtgtggccaccggctggtggaccacttcttctgtgaggtgcctgccctgctgcggctgagctgtgtggacacccacgccaatgagctgaccctgatggtgatgagcagcatctttgtgctgatccccctcatcctgatcctgacagcctatggagccatcgcccgggctgtgctgtccatgcagagcaccaccggcctgcagaaggtgttccgcacctgtggggcccacctgatggtggtgtccctcttcttcatccctgtgatgtgcatgtacctgcagcccccatctgagaacagcccagaccagggcaagttcatcgccctcttctacacagtggtgacccccagcctgaaccccctcatctacaccctgaggaacaagcacgtgaagggagctgccaagaggctgctgggctgggagtggggcaagtag

SEQ ID NO: 220566 - DNA, 1273 bp, Artificial Sequence
  derived and/or modified sequence
aatcaatttaactttttaaaataaaaaattattttcttaaatattgtctttctgattatggaatatcttagtcttcatttatccaaatgttaactcaaggatgtatataaaagaactcagtaacttgaaaagctattacttgtatccacagctggacaaatatctcaatgaagcatacaaaggaaactgtataaaaattctactgccataatggtgcacactatctggaattgggatacttttttctccaatctgtttgcaagtgagcagttggcaatgcatggacagactttgagtttatgcgattctttctttaggtacaggaaaaataagaatgttgatgaaaaaaaatgcaagttttgaagacttctttcttctacttggattttctaactggcctcatctggaagtagttctctttgtggttatcttgatcttctacttgataacactgataggaaacctgttcatcatcatcctgtcatacctggactcccatctccacactcccatgtacttcttcctttcaaatctctcatttctggatctctgctacaccaccagctctatccctcagttgctggtgaatctctggggcccggaaaagaccatctcttatgctggttgtacggttcaactttactttgttctcgcactgggaaccgcagagtgtgtcctactggtggtgatgtcctatgatcgttatgcagctgtgtgtagacctttgcattacactgtcctcatgcaccctcgtttctgccgcttgttggctgcggcttcttgggtaagtggttttacaacctcagcacttcattcctcctttactttctggatacccctatgtagacatcgcctagtggatcacttcttctgtgaagttccagcacttctgcgattatcatgtgttgatacccaggcaaatgagctgaccctcatggtcatgagctccatatttgttctcatacctctcatcctcatcctcacttcctatggtgccattgcccgggctgtactgagcatgcaatcaaccactgggcttcagaaagtgcttaggacatgtggagcccatcttatggttgtatctctctttttcattccagtcatgtgcatgtatctccagccaccatcagaaaattctcaagatcaaggcaagttcattgccctcttttacactgttgtcacacctagtcttaaccctctaatctacactttcagaaacaaggatgtaagaggggcagtgaagagactaatggggtgggaatgggggatgtga

SEQ ID NO: 220567 - DNA, 1041 bp, Artificial Sequence
  derived and/or modified sequence
gggatacttttgtcttcaatctgtttgcaagtgagcggttgacaatgcatggacagactttgagtttatgtggttctttctttaggtataagaaaaagatgaatgatgattaaaaaaaatgcaagttcggaagacttctttattctacttggattttctaattggcctcagctggaagtagttctctttgtggttatcttgatcttctacctgatgacactgacaggaaacctgttcatcatcatcctgtcatacgtggactcccatctccacacaccaatgtacttcttcctttcaaacctctcatttctggatctctgccacaccaccagctctatccctcagttgctggtgaatctccggggcccggaaaagaccatctcgtatgctggttgcatggttcaactttactttgttcttgcactgggaatcgcagagtgtgtcctactggtggtgatgtcgtatgatcgttatgtagctgtgtgtagacctttgcattacactgtcctcatgcaccctcgtttctgccacttgttggctgcggcttcttgggtaattggttttactatctcagcacttcattcctcctttactttctgggtacccctttgtggacatcgcctagtggatcacttcttctgtgaagttccagcacttctgcgtttatcatgtgttgacacccatgcaaatgagctgaccctcatggtcatgagctccatttttgttctcatacctctcattctgattctcactgcctatggtgccattgcccgggctgtactgagcatgcaatcaaccactgggcttcagaaagtgtttaggacatgtggagcccatcttatggttgtatctctctttttcattccagtcatgtgcatgtatctccagccaccatcagaaaattctcctgatcagggcaagttcattgccctcttttatactgttgtcacaccgagtcttaatcctctaatctacactctcagaaacaagcatgtaaaaggggcagcgaagagactattggggtgggagtgggggaagtga

SEQ ID NO: 220568 - DNA, 1041 bp, Artificial Sequence
  derived and/or modified sequence
gggatacttttgtcttcaatctgtttgcaagtgagcggttgacaatgcatggacagactttgagtttatgtggttctttttttaggtataagaaaaagatgaatgatgattaaaaaaaatgcaagttcggaagacttctttattctacttggattttctaattggcctcagctggaagtagttctctttgtggttatcttgatcttctacctgatgacactgacaggaaacctgttcatcatcatcctgtcatacgtggactcccatctccacacaccaatgtacttcttcctttcaaacctctcatttctggatctctgccacaccaccagctctatccctcagttgctggtgaatctccggggcccggaaaagaccatctcgtatgctggttgcatggttcaactttactttgttcttgcactgggaatcgcagagtgtgtcctactggtggtgatgtcgtatgatcgttatgtagctgtgtgtagacctttgcattacactgtcctcatgcaccctcgtttctgccacttgttggctgcggcttcttgggtaattggttttactatctcagcacttcattcctcctttactttctgggtacccctttgtggacatcgcctagtggatcacttcttctgtgaagttccagcacttctgcgtttatcatgtgttgacacccatgcaaatgagctgaccctcatggtcatgagctccatttttgttctcatacctctcattctgattctcactgcctatggtgccattgcccgggctgtactgagcatgcaatcaaccactgggcttcagaaagtgtttaggacatgtggagcccatcttatggttgtatctctctttttcattccagtcatgtgcatgtatctccagccaccatcagaaaattctcctgatcagggcaagttcattgccctcttttatactgttgtcacaccgagtcttaatcctctaatctacactctcagaaacaagcatgtaaaaggggcagcgaagagactattggggtgggagtgggggaagtga

SEQ ID NO: 220569 - DNA, 939 bp, Artificial Sequence
  derived and/or modified sequence
atgctgatgaagaagaacgccagcttcgaggacttcttcctgctgttggggtttagcaattggccacacttagaagtggtgctcttcgtggtaatcctgattttctacctgatcacattaatcggtaatctgttcataattatcctgagttacttagacagtcatctgcacacacctatgtattttttccttagcaacctgagctttttagatctgtgctacacaaccagctctattccccagttgctagtgaatctatggggccccgagaagactatatcctacgccgggtgcacggtacaactctattttgtcctagccttaggcacagccgaatgcgtactcttagttgtcatgagctacgaccgatatgctgctgtctgtaggcccctgcattacaccgtgctgatgcatccaaggttttgcagactgctcgccgccgctagctgggtatccggctttaccacttccgctttgcacagtagctttactttctggataccattatgcaggcacagactggtggaccactttttctgcgaagtcccggccctgcttcgtctgagctgcgtggacactcaggccaacgaactcactctcatggtgatgagctctatatttgtcttgattcccctaatcctgattctgacaagttatggcgccatagctcgtgccgtgctgtccatgcagtctaccaccgggctccaaaaagttttgcgaacctgcggtgcacacttgatggtggtgagccttttttttatccccgttatgtgtatgtatctgcaacctcctagcgaaaattcccaggaccagggcaaatttattgccttattctacactgttgtgacaccctccttaaacccgctgatctacaccttcaggaataaggacgtacgcggcgcagtgaaaagactcatgggatgggagtggggcatgtag

SEQ ID NO: 220570 - DNA, 939 bp, Artificial Sequence
  derived and/or modified sequence
atgatgatcaagaagaacgccagcagcgaggacttcttcatcctgttgggattcagcaactggccccagctggaggtcgtccttttcgttgtgattctcattttttacctcatgacactgacaggcaatttattcataataatcctctcgtatgtggactcgcaccttcacactccaatgtactttttcctgtcgaacctatctttcttggatctgtgtcacactacatcgtcaattccccaattattagtgaacctgcgcggacccgaaaagaccatttcctatgctggctgtatggtccagctttacttcgtgctggctctgggtattgccgagtgcgttctgctggtggtgatgtcatacgaccggtacgtggctgtttgtcgcccactgcattacacggtcctcatgcacccaagattttgtcacctgctggcggctgcttcctgggtcattggcttcactatcagcgcgttacattcttcctttaccttttgggtccctctgtgcggacacaggttggtggaccacttcttttgcgaagtgcctgcactactcagattatcatgtgtcgacacgcatgccaatgaactgacccttatggttatgtctagcatctttgtcttgatccccttaattttgattctgacagcttatggagctattgcacgcgcagttttaagtatgcagagcacaacaggtctgcagaaggtgtttaggacctgcggagcacatctcatggtggtgtctttgtttttcatcccggtgatgtgcatgtacctgcagcccccatccgaaaactcgcccgatcagggcaaattcattgccttgttttataccgtggtgacaccttccctgaatcctctgatctacaccctcagaaataagcatgtcaagggtgccgctaaacgtctgctgggttgggaatggggtaaatag

SEQ ID NO: 220571 - DNA, 939 bp, Artificial Sequence
  derived and/or modified sequence
atgatgatcaagaagaacgccagcagcgaggacttcttcatcctgttggggttctccaattggcctcagctggaggtcgtgctctttgtggttatcttaatcttttacctcatgacgctgaccggtaatctgttcattatcattctgtcttatgttgactcccacttacatacaccaatgtattttttcctcagcaatctctcatttctggatctatgtcacactacttccagcataccacaactcttggtcaacctgcggggtcctgagaagacaattagctacgccgggtgcatggtccagctgtacttcgtcttagccttgggaattgccgagtgtgttctgttggttgtgatgtcatatgacaggtacgtggctgtgtgtcgtccattacactataccgtgctgatgcatccccgattctgccacctgctggcagccgcctcatgggtcatcggcttcaccatctctgcgctgcacagctcctttacattctgggtccccctctgtggacaccgcctggtggaccacttcttctgcgaggtgcctgcactgctgaggctatcatgtgtcgatacccacgccaatgaactgacactgatggtgatgagtagtatctttgtcctgataccactgattctgatactcactgcttacggcgccattgcgcgggctgtcctgtcaatgcagtccacgactggattgcaaaaggtgtttcgcacctgcggggcgcatttgatggtggtttcccttttcttcattccggtaatgtgcatgtacctccagccaccctcagagaactcgcccgatcaagggaagtttatcgctctattttataccgttgtcacaccatcgctgaacccactgatttatacactccggaacaagcatgtgaagggcgcagccaaaagactcttaggttgggagtggggcaagtag

SEQ ID NO: 220572 - DNA, 939 bp, Artificial Sequence
  derived and/or modified sequence
atgatgatcaagaagaacgccagcagcgaggacttcttcatcctgttaggatttagtaattggccccagttagaagtggtgttgttcgttgtgatcctaatcttttacctgatgacactcacagggaacttattcataattattctgtcttatgtcgacagccacctgcacacgcccatgtatttttttctctcaaatctgagttttctggacctatgccatactacatcctcgataccacaactgctcgtgaatcttcgaggaccagagaagactattagctacgctgggtgtatggtccagctgtacttcgtccttgcgttggggatcgctgaatgtgtgcttctcgtggtcatgtcatacgaccggtacgtcgccgtctgtcggccattgcactacactgtgctcatgcatcctaggttctgtcacctgctagctgccgctagctgggtgatcggttttaccatatccgctctacacagttccttcacattctgggttcccttgtgtggtcacaggctggtggatcacttcttctgcgaagttcccgctctgcttaggctatcctgcgtcgacacgcacgccaatgagcttactctgatggtaatgtcatctattttcgtcctcattccgttgatcctgatcttgacagcatatggagcaattgcacgcgccgtgctttccatgcagagcaccaccgggcttcagaaggtgttcagaacgtgcggcgcacatcttatggtggtatcactgttcttcatacccgttatgtgcatgtacctgcagcccccaagcgaaaacagtcctgaccaaggtaaattcatcgcactcttttacaccgtggtcacccccagtttaaatccactgatatatactctgaggaacaaacacgtgaagggtgctgccaagcgcctcctaggctgggagtgggggaaatag

SEQ ID NO: 220573 - DNA, 939 bp, Artificial Sequence
  derived and/or modified sequence
atgatgatcaagaagaacgccagcagcgaggacttcttcatcctgcttgggttcagcaattggccccagctagaagttgtgctctttgtagtaattctgatcttctacttaatgactctgacaggtaacttgtttattattattctcagttatgtggacagccaccttcataccccaatgtattttttcctgtctaacttatcattccttgacctctgtcacactaccagctcaatccctcagttgttagttaacctccggggcccagagaaaactatttcctatgcagggtgcatggtccagttgtattttgtgctggccttagggatcgctgagtgtgtgctattggtggtcatgtcctatgatcgctatgtggccgtgtgtcgccccctgcactacacagtgctgatgcaccctagattctgccacttgcttgcagcggcgtcatgggtcattgggttcacaattagcgccttacacagttcctttacattttgggtgcccctctgtggacaccgcttagtggatcacttcttttgtgaagtgcccgccttattacgcctgtcctgtgtcgacacgcatgcaaatgaactcacattaatggtaatgagcagcatctttgtgttgataccgcttatactcatcctcaccgcctacggtgctatcgctcgagctgtactgagcatgcagagtacaacaggcctccagaaggtattccgtacatgcggagcacatctaatggtcgtgagtctcttctttatccctgtcatgtgcatgtatctacagccgccatccgagaatagccccgaccaggggaagttcattgctcttttctatacagtggtcacaccttcactcaacccgcttatttatactctgcgcaataagcacgtaaagggcgcggccaaacgacttttgggatgggaatggggtaaatag

SEQ ID NO: 220574 - DNA, 939 bp, Artificial Sequence
  derived and/or modified sequence
atgatgatcaagaagaacgccagcagcgaggacttcttcatcctgctggggttctctaactggccgcagttagaagtggttctttttgttgttatccttatattctacctcatgactttaactggaaatctgttcataatcattctgtcctacgtcgactcccatctccatacccccatgtacttcttcctcagtaacctctcttttctggacttgtgtcacacaacctccagtatccctcagctcctggtaaacctgagggggcctgaaaagactatctcttacgcagggtgcatggtgcaattatactttgtccttgccctgggcatcgcagagtgtgtgttacttgtggtcatgtcctatgacaggtatgtcgcagtttgtaggcctctccactacacagttctgatgcacccacggttttgccatcttctggctgccgcctcctgggtcatagggttcacaatcagtgcactgcacagtagctttaccttctgggttccactttgcggccacaggctggtggaccacttcttctgcgaggtacccgctctgttgaggctgtcctgcgtggatacacacgcgaacgaattaaccctaatggttatgagctccatctttgttttaattccactgatcctcatcctgactgcctatggagccatagcacgggccgtcctctccatgcagtctaccacgggcttgcaaaaggtttttagaacctgcggggcccacctgatggtcgtgagcttattttttatccccgtcatgtgtatgtacttgcaacccccaagcgagaactccccagatcagggtaaatttatcgcgctcttctatacagtggtgaccccctcgctcaacccgttgatctatacgttgcggaacaaacacgtgaagggcgccgctaagcgattactcggctgggaatggggcaagtag

SEQ ID NO: 220575 - DNA, 939 bp, Artificial Sequence
  derived and/or modified sequence
atgctcatgaagaagaacgctagctttgaggactttttccttctgctcggcttttcaaactggcctcacctcgaggtggtgctgttcgtggtgatcctgattttctacctgatcaccctgatcggtaatttgttcatcatcatcctgagctaccttgacagccacctccacacccctatgtactttttccttagtaatctgtccttcctggatctgtgttacaccacgtcctcaattccacagctgctggtcaacctgtggggacccgaaaagacaatctcctacgcaggatgtactgtgcaattgtattttgtgctcgctctagggaccgctgagtgcgtgctcctggtagtgatgtcatacgacagatacgccgctgtgtgcagacccctgcactacaccgtactgatgcacccaagattctgtcgacttttggccgcagcatcatgggttagcggatttacaactagcgctctgcatagctcttttacattttggattcccttatgtcgccacaggcttgttgaccattttttttgcgaggtgccagccctactgcgcctaagttgcgtcgacacgcaagccaacgagctgactctgatggtgatgagttccattttcgtgctgatccctctgatattaatcttgaccagttacggggcaatagcacgtgcagtcctgagcatgcaatctactacaggcctacagaaagtgttacggacatgcggggctcacctcatggtggttagccttttcttcattcccgtcatgtgcatgtatctgcaacccccaagtgaaaactcccaggaccagggcaaattcatcgccctgttctacacagtcgtgactccttcgcttaacccactgatatacaccttcagaaacaaggacgtgagaggagctgttaagcgactcatgggatgggagtggggaatgtag

SEQ ID NO: 220576 - DNA, 939 bp, Artificial Sequence
  derived and/or modified sequence
atgatgatcaaaaagaacgcttcctcagaggacttcttcattctgctgggttttagcaattggcctcagttggaagtggtgctcttcgtcgtcattctcatattttacctgatgacgctgacagggaatttgtttatcattattttgagctacgtcgatagccaccttcacacacccatgtacttcttcctgagcaaccttagtttcttggacttatgccacaccacctcctctatcccgcagctcttagtgaacttgagaggacccgagaagacaatctcctacgccggatgcatggttcagctgtattttgtgttagcactgggcattgctgagtgtgttctcctggttgttatgagctacgacaggtacgtcgccgtttgtcggccactgcattatactgtcctaatgcatcccagattttgccatctcttggctgccgcatcatgggtcattgggtttaccatctcagccttacatagcagcttcaccttttgggtgccactgtgcgggcataggctcgttgaccactttttctgtgaggtgccggctctcctgagactgtcctgtgtggatacgcacgccaacgagctcactctcatggtcatgtcatctatctttgtcctgattccacttatcctgatcctcacagcatatggagcgatcgctagagccgtacttagtatgcagagcactacagggctccagaaagtcttcagaacttgcggggctcatctgatggttgtttcactgttctttataccagtgatgtgtatgtaccttcagcctccatctgaaaatagtcctgatcaagggaagtttatcgccctgttctacaccgttgtgaccccctctttaaatcccctgatctataccctgagaaacaagcatgtaaagggagcagccaagcgcttgctcggatgggaatggggaaaatag

SEQ ID NO: 220577 - DNA, 939 bp, Artificial Sequence
  derived and/or modified sequence
atgatgatcaagaaaaacgcctctagcgaggacttctttattttgttaggattttcaaattggccgcagctggaggttgttctgtttgtagtgatcctgatcttttacttgatgaccttgacgggcaatcttttcatcatcatactgtcatatgttgatagccacctgcatacacctatgtatttctttctgtccaatctatctttcctggacctgtgtcataccactagctcgatcccccagttgttggtgaatctgaggggccctgagaagactatatcctacgccggatgcatggtgcagctgtacttcgtgctagctctcggtatagcggagtgcgtgttgctggtggtgatgtcatacgacaggtacgtggctgtttgtcgtcctttgcactacacagttctgatgcaccctcggttttgtcaccttttggcggctgcctcctgggttatcggttttacaatttctgccctgcacagctccttcaccttttgggtacccctgtgcggtcacagactggtcgatcactttttctgtgaggtgcccgcattgttgcgcctatcatgcgtggatactcacgccaacgagctgacccttatggttatgagtagcatcttcgtcctcatccctctgatcctgattctgactgcctacggcgcaatagccagggctgttctgtctatgcagagtactactgggcttcagaaggtctttagaacttgtggcgcacaccttatggtagttagtctattcttcatccctgtgatgtgtatgtacctacaaccacccagcgagaactctccagaccagggcaaattcatcgcactcttttacactgttgttacgccctctttaaatcccttgatttatacccttcgtaataaacatgtaaaaggtgcggctaagaggcttctggggtgggagtgggggaaatag

SEQ ID NO: 220578 - DNA, 939 bp, Artificial Sequence
  derived and/or modified sequence
atgatgataaagaagaacgcctccagcgaggacttttttatactgctggggttttcgaactggcctcaactggaggtcgttctgttcgttgtcatacttatattttacctgatgaccctaactggcaacttgttcatcatcattctcagttacgtggactctcacctgcacaccccaatgtacttcttcctgagcaatctctccttcctagatctgtgtcatacaactagtagtatcccacaactgttggtaaacctgcgaggaccagagaaaactatctcctatgctgggtgcatggtacagctgtactttgttctcgctttgggaatcgcggagtgcgtacttttggtggtgatgagctacgaccgatatgtggccgtatgtaggcctttgcactataccgtacttatgcatccacgcttttgccatttgttagcagccgcaagttgggtgatcggattcactatttccgctctgcacagttctttcactttctgggtacccctgtgtggccatcgcttagtagatcattttttctgtgaggtgcccgcactcctgcggctttcttgcgtcgacacccacgcgaatgaattgaccttaatggtcatgtcgagcattttcgtgctgattccgctgatattgatactgacagcctacggtgccatcgctcgggcagtcctctcaatgcaaagcacgacaggtctgcagaaagtctttagaacctgcggtgctcaccttatggtggtttccctgttttttattccagtgatgtgtatgtacctccagccaccatccgaaaattcaccagaccaagggaagttcattgcactgttttacaccgttgtcacgccctcactgaaccctctcatctacacactgcgcaacaaacatgtgaaaggcgctgccaaacggctgttagggtgggaatggggcaagtag

SEQ ID NO: 220579 - DNA, 939 bp, Artificial Sequence
  derived and/or modified sequence
atgatgattaagaaaaatgcctccagcgaagactttttcatcctgttgggattttccaactggcctcagctggaggttgttctgttcgtagtgatcctgatcttttacctcatgaccctgacagggaacctgtttattataatcctgtcctacgttgatagccatctgcatacaccgatgtacttctttctgtcaaacctgtctttcctggacctgtgtcataccacatcgtccatacctcagctgctggtcaatctgcgtggcccagaaaaaaccataagctatgccggttgcatggtgcagctctacttcgtgctggcactggggatcgctgagtgtgtactgcttgtggtgatgagctatgacagatacgttgctgtttgtcggccactgcactacacagtgttgatgcatccgagattctgccacctcctggctgccgcaagctgggtcattgggttcactataagcgcacttcattcatccttcactttttgggtgcctctgtgtgggcatagattagtggatcacttcttttgcgaggtgcccgcactcctgcgactcagctgtgttgatacccacgccaatgaactcacacttatggtaatgagctccatattcgtgctgattccactcatcctcatccttacagcctatggcgctatcgctagagcagttctctctatgcaatctacaacgggcctgcagaaggtgttccggacgtgcggggctcacctgatggtggtaagtctgttttttatcccagttatgtgcatgtacttgcagccacctagcgagaacagtcctgaccaaggcaaatttatcgcattgttttacacagtggttacacctagcctgaacccactgatctataccttgaggaacaaacatgttaagggtgctgctaaaagactgctggggtgggaatggggcaagtag

SEQ ID NO: 220580 - DNA, 939 bp, Artificial Sequence
  derived and/or modified sequence
atgatgatcaaaaaaaatgcctctagcgaggacttctttattcttttgggattttccaattggcctcagctggaggttgtgctgtttgtggtgattcttattttctaccttatgacattaactggcaaccttttcataattatcttgtcctatgtggatagccatctgcatactccaatgtacttcttcctttctaacctatcctttctcgacctgtgccataccaccagttcaatccctcagctcttagttaacctgagaggacctgagaagacaatatcttacgccggatgcatggtccagttgtattttgtcctcgcactgggaatcgcggaatgcgttctgcttgtggtgatgtcttacgaccgctatgttgccgtgtgtaggccactgcattatacggtcctgatgcatccacgattctgtcatctgctggccgctgcaagctgggtgatcggcttcactattagtgctttacacagtagcttcacattttgggttcccttgtgcggtcacaggctggtagaccactttttttgtgaggtacctgcactgttgaggctctcatgtgttgatactcatgccaatgaactgactctcatggtgatgagcagtatcttcgttctcataccactcatccttatactgactgcttacggggctattgccagagctgttttatcaatgcagtccactactggtctgcagaaagtcttccgaacatgcggtgctcacttaatggtggtctctcttttttttatccctgtcatgtgtatgtatctgcagccccctagtgagaacagccccgatcagggtaagttcattgccctattctacacggtggtgactcccagccttaatccccttatctacactcttagaaacaagcacgtcaagggggcagctaagcgcttgctcggttgggagtgggggaagtag

SEQ ID NO: 220581 - DNA, 939 bp, Artificial Sequence
  derived and/or modified sequence
atgctgatgaagaagaacgccagcttcgaggacttcttcatcctgctgggcttcagcaactggccccacctggaggtggtgctgttcgtggtgatcctgatcttctacctgatcaccctgatcggcaacctgttcatcatcatcctgagctacctggacagccacctgcacacccccatgtacttcttcctgagcaacctgagcttcctggacctgtgctacaccaccagcagcatcccccagctgctggtgaacctgtggggccccgagaagaccatcagctacgccggctgcaccgtgcagctgtacttcgtgctggccctgggcaccgccgagtgcgtgctgctggtggtgatgagctacgacagatacgccgccgtgtgcagacccctgcactacaccgtgctgatgcaccccagattctgcagactgctggccgccgccagctgggtgagcggcttcaccaccagcgccctgcacagcagcttcaccttctggatccccctgtgcagacacagactggtggaccacttcttctgcgaggtgcccgccctgctgagactgagctgcgtggacacccaggccaacgagctgaccctgatggtgatgagcagcatcttcgtgctgatccccctgatcctgatcctgaccagctacggcgccatcgccagagccgtgctgagcatgcagagcaccaccggcctgcagaaggtgctgagaacctgcggcgcccacctgatggtggtgagcctgttcttcatccccgtgatgtgcatgtacctgcagccccccagcgagaacagccaggaccagggcaagttcatcgccctgttctacaccgtggtgacccccagcctgaaccccctgatctacaccttcagaaacaaggacgtgagaggcgccgtgaagagactgatgggctgggagtggggcatgtag

SEQ ID NO: 220582 - DNA, 939 bp, Artificial Sequence
  derived and/or modified sequence
atgatgatcaagaagaacgccagcagcgaggacttcttcatcctgctgggcttcagcaactggccccagctggaggtggtgctgttcgtggtgatcctgatcttctacctgatgaccctgaccggcaacctgttcatcatcatcctgagctacgtggacagccacctgcacacccccatgtacttcttcctgagcaacctgagcttcctggacctgtgctacaccaccagcagcatcccccagctgctggtgaacctgagaggccccgagaagaccatcagctacgccggctgcatggtgcagctgtacttcgtgctggccctgggcatcgccgagtgcgtgctgctggtggtgatgagctacgacagatacgtggccgtgtgcagacccctgcactacaccgtgctgatgcaccccagattctgccacctgctggtggccgccagctgggtgatcggcttcaccatcagcgccctgcacagcagcttcaccttctgggtgcccctgtgcggccacagactggtggaccacttcttctgcgaggtgcccgccctgctgagactgagctgcgtggacacccacgccaacgagctgaccctgatggtgatgagcagcatcttcgtgctgatccccctgatcctgatcctgaccacctacggcgccatcgccagagccgtgctgagcatgcagagcaccaccggcctgcagaaggtgttcagaacctgcggcgcccacctgatggtggtgagcctgttcttcatccccgtgatgtgcatgtacctgcagccccccagcgagaacagccccgaccagggcaagttcatcgccctgttctacaccgtggtgacccccagcctgaaccccctgatctacaccctgagaaacaagcacgtgaagggcgccgccaagagactgctgggctgggagtggggcaagtag

SEQ ID NO: 220583 - DNA, 939 bp, Artificial Sequence
  derived and/or modified sequence
atgatgatcaagaagaacgccagcagcgaggacttcttcatcctgctgggcttcagcaactggccccagctggaggtggtgctgttcgtggtgatcctgatcttctacctgatgaccctgaccggcaacctgttcatcatcatcctgagctacgtggacagccacctgcacacccccatgtacttcttcctgagcaacctgagcttcctggacctgtgctacaccaccagcagcatcccccagctgctggtgaacctgagaggccccgagaagaccatcagctacgccggctgcatggtgcagctgtacttcgtgctggccctgggcatcaccgagtgcgtgctgctggtggtgatgagctacgacagatacgtggccgtgtgcagacccctgcactacaccgtgctgatgcaccccagattctgccacctgctggtggccgccagctgggtgatcggcttcaccatcagcgccctgcacagcagcttcaccttctgggtgcccctgtgcggccacagactggtggaccacttcttctgcgaggtgcccgccctgctgagactgagctgcgtggacacccacgccaacgagctgaccctgatggtgatgagcagcatcttcgtgctgatccccctgatcctgatcctgaccacctacggcgccatcgccagagccgtgctgagcatgcagagcaccaccggcctgcagaaggtgttcagaacctgcggcgcccacctgatggtggtgagcctgttcttcatccccgtgatgtgcatgtacctgcagccccccagcgagaacagccccgaccagggcaagttcatcgccctgttctacaccgtggtgacccccagcctgaaccccctgatctacaccctgagaaacaagcacgtgaagggcgccgccaagagactgctgggctgggagtggggcaagtag

SEQ ID NO: 220584 - DNA, 939 bp, Artificial Sequence
  derived and/or modified sequence
atgttaatgaagaagaacgcctcttttgaggacttcttcatcctcctcggcttttcaaactggccccacctcgaagtggtgctcttcgtggtaatattgatcttttatctgatcactctcatcgggaatctgttcatcatcatcctctcttatcttgatagccacctgcatacccctatgtactttttcttatcgaatctgtctttcctggacctttgttatactacgagcagcatcccccagctacttgtcaatctgtgggggccggaaaaaacgataagctatgccggctgcacggtacagctttatttcgtgctggcgttgggaaccgctgagtgtgttctgctggttgtcatgagttacgacaggtacgctgccgtctgccgccctctgcactatacggtgctgatgcaccccagattttgtcgcttgctggccgcagcgtcttgggtgtcgggatttaccacctcggcactgcactccagctttactttttggatacctttgtgccgccacagattagtggaccatttcttttgcgaggtacccgcacttttacgcctctcatgtgtggatacccaggctaatgaacttacactgatggtcatgagttcaattttcgttcttatcccactgatcctcatcctgacttcttacggcgccatagcaagagctgtgctaagcatgcagagtacaaccggcctgcagaaggtcctacgcacttgtggagcccaccttatggtggtatctcttttctttatcccggttatgtgtatgtacctgcagcctccctccgagaatagccaggaccaggggaagttcattgcgttgttctacaccgtggttacaccctcactgaatcctttgatctacaccttccgaaacaaagacgtacgaggcgcagtcaaaaggctgatgggatgggaatgggggatgtag

SEQ ID NO: 220585 - DNA, 939 bp, Artificial Sequence
  derived and/or modified sequence
atgatgatcaagaaaaatgcctcttctgaggacttcttcattctcctgggtttctcaaactggcctcagcttgaagtagttttgttcgtagtcatcttaattttttacctaatgacgttgaccgggaatctgtttatcatcattctgagttatgtcgatagccacttgcataccccgatgtatttcttcctgagcaacctgagctttctggacctttgctatactacgagttcaatcccccagcttctcgtaaacctgaggggccctgagaagaccatcagttacgctgggtgtatggttcagctgtactttgtacttgcgctcggaatcgcagaatgtgtactgttggtcgtcatgagttatgataggtacgtggccgtgtgcagacctttgcactatactgtgctcatgcatcctcgattctgccatttgctggtcgccgcctcatgggtgataggctttacgatcagtgctctgcactcctcttttactttttgggttcctctgtgcggacaccgattggtggaccacttcttctgcgaagtccccgcactcctgaggctgtcttgcgtcgacacacatgcaaatgagctgacgctcatggtgatgtcctcgatcttcgtgctgatccccctgattctaattctaactacctacggcgctatcgccagggccgtgctgagcatgcaaagtaccaccgggcttcagaaagtgttccggacgtgtggggcgcacctcatggtagtttctctgttcttcattccagttatgtgcatgtatctgcagccccctagcgaaaacagtcctgatcaaggcaaatttatagctctgttttacacggtggtcacacccagtttgaatcctctgatctacacccttagaaacaagcatgtaaagggagccgcaaaacgactgctggggtgggaatgggggaaatag

SEQ ID NO: 220586 - DNA, 939 bp, Artificial Sequence
  derived and/or modified sequence
atgatgataaagaaaaacgcaagtagcgaggatttctttatcctgctgggatttagtaactggccgcagctagaagttgtgctatttgtggtgatattgatattttatttgatgacattaacaggaaatctgttcatcatcatcttgagctatgtagacagccatttgcatacacctatgtacttttttctctcgaatctgagcttcctcgatctctgttataccaccagctccattccacagctgctggtgaaccttcgagggcctgaaaagaccatttcatacgctggatgtatggtgcagctgtatttcgtcttggctctgggcatcacagaatgtgtcctccttgttgtcatgagttacgacagatacgtcgcagtttgtcgaccgcttcattatacagtgttgatgcacccacgattttgccacctgctggtagccgcatcatgggtgatagggtttactatctccgccctgcactcttcatttacattctgggttcccctctgtgggcatcggctggtagatcactttttttgtgaggtgcctgctttactccgcctttcttgtgtcgatacacacgctaatgagttgactctgatggtaatgtccagcatctttgtcctcattcccctgatcctcattctgacaacttacggagccattgcccgagccgtcttgtctatgcagtccacaaccggcctgcagaaagtatttaggacatgcggggcccatttaatggttgtctctctgtttttcattcccgtgatgtgtatgtatcttcagccgccaagtgaaaattccccagaccaagggaaatttattgcactgttttatacagtcgtcacacccagtctcaatccccttatttacaccctgcgcaataaacacgttaagggggcagcaaagcggctcctcggatgggagtggggtaagtag

SEQ ID NO: 220587 - DNA, 939 bp, Artificial Sequence
  derived and/or modified sequence
atgatgatcaagaagaatgcgtcttctgaggatttttttattctactcggatttagcaattggcctcagctcgaggtggtcctcttcgtggtgatcttgatcttttatctgatgaccttgactggcaatctgttcattattattctgtcctacgtagattcccatcttcatacaccaatgtactttttcttgtctaatttatccttcctagatctttgttatactacctcaagcatccctcagctactggtgaatttaagaggccctgagaagactatctcctacgccggctgtatggtgcagttgtattttgtgctggcactgggcatagcagaatgcgtcctgctggtcgtcatgagttatgatcgatacgtagcagtatgtaggcctctccactatacagttcttatgcatccccgattttgtcacctcctcgtggccgcctcttgggttatcggtttcactatttcagccctccacagcagtttcaccttttgggttcctctctgcggacacagactggtcgatcactttttctgtgaggtcccagccctgctgaggctcagctgtgtggacactcatgctaacgaactgacattaatggtaatgagcagtatctttgtgctcatccctctgattttaatcttgaccacctacggcgctattgctcgggccgtgcttagcatgcagagcactaccggtctccagaaagtgttccggacctgcggagcgcatctgatggtagtgtccctgtttttcattccagttatgtgtatgtatctgcagccaccatccgagaatagcccagaccaggggaagttcattgcgctgttttatacagtcgttacgccctccctgaacccattaatttacacgctgcgaaacaagcacgttaaaggtgccgccaagcggctactgggttgggagtggggaaaatag

SEQ ID NO: 220588 - DNA, 939 bp, Artificial Sequence
  derived and/or modified sequence
atgctgatgaagaagaatgccagctttgaggacttcttcatcctgctgggcttcagcaactggccccacctggaggtggtgctgtttgtggtgatcctgatcttctacctgatcaccctgattggcaacctcttcatcatcatcctgagctacctggacagccacctgcacacccccatgtacttcttcctgagcaacctgtccttcctggacctgtgctacaccaccagcagcatcccccagctgctggtgaacctgtggggccctgagaagaccatctcctatgccggctgcaccgtgcagctgtactttgtgctggccctgggcacagcagaatgtgtgctgctggtggtgatgtcctatgacagatatgctgctgtgtgccggcccctgcactacacagtgctgatgcacccccgcttctgccgcctgctggccgccgcctcctgggtgtctggcttcaccaccagcgccctgcacagcagcttcaccttctggatccccctgtgccgccaccggctggtggaccacttcttctgtgaggtgcctgccctgctgcggctgagctgtgtggacacccaggccaatgagctgaccctgatggtgatgagcagcatctttgtgctgatccccctcatcctgatcctgaccagctatggagccatcgcccgggctgtgctgtccatgcagagcaccaccggcctgcagaaggtgctgcggacctgtggggcccacctgatggtggtgtccctcttcttcatccctgtgatgtgcatgtacctgcagcccccatctgagaacagccaggaccagggcaagttcatcgccctcttctacacagtggtgacccccagcctgaaccccctcatctacaccttcaggaacaaggatgtgagaggagctgtgaagaggctgatgggctgggagtggggcatgtag

SEQ ID NO: 220589 - DNA, 939 bp, Artificial Sequence
  derived and/or modified sequence
atgatgatcaagaagaatgccagcagcgaggacttcttcatcctgctgggcttcagcaactggccccagctggaggtggtgctgtttgtggtgatcctgatcttctacctgatgaccctgactggaaacctcttcatcatcatcctgtcctatgtggacagccacctgcacacccccatgtacttcttcctgagcaacctgtccttcctggacctgtgctacaccaccagcagcatcccccagctgctggtgaacctgcggggccctgagaagaccatctcctatgccggctgcatggtgcagctgtactttgtgctggccctgggcattgctgaatgtgtgctgctggtggtgatgtcctatgaccgctacgtggccgtgtgccggcccctgcactacacagtgctgatgcacccccgcttctgccacctgctggtggccgcctcctgggtgattggcttcaccatcagcgccctgcacagcagcttcaccttctgggtgcccctgtgtggccaccggctggtggaccacttcttctgtgaggtgcctgccctgctgcggctgagctgtgtggacacccacgccaatgagctgaccctgatggtgatgagcagcatctttgtgctgatccccctcatcctgatcctgaccacctatggagccatcgcccgggctgtgctgtccatgcagagcaccaccggcctgcagaaggtgttccgcacctgtggggcccacctgatggtggtgtccctcttcttcatccctgtgatgtgcatgtacctgcagcccccatctgagaacagcccagaccagggcaagttcatcgccctcttctacacagtggtgacccccagcctgaaccccctcatctacaccctgaggaacaagcacgtgaagggagctgccaagaggctgctgggctgggagtggggcaagtag

SEQ ID NO: 220590 - DNA, 939 bp, Artificial Sequence
  derived and/or modified sequence
atgatgatcaagaagaatgccagcagcgaggacttcttcatcctgctgggcttcagcaactggccccagctggaggtggtgctgtttgtggtgatcctgatcttctacctgatgaccctgactggaaacctcttcatcatcatcctgtcctatgtggacagccacctgcacacccccatgtacttcttcctgagcaacctgtccttcctggacctgtgctacaccaccagcagcatcccccagctgctggtgaacctgcggggccctgagaagaccatctcctatgccggctgcatggtgcagctgtactttgtgctggccctgggcatcacagaatgtgtgctgctggtggtgatgtcctatgaccgctacgtggccgtgtgccggcccctgcactacacagtgctgatgcacccccgcttctgccacctgctggtggccgcctcctgggtgattggcttcaccatcagcgccctgcacagcagcttcaccttctgggtgcccctgtgtggccaccggctggtggaccacttcttctgtgaggtgcctgccctgctgcggctgagctgtgtggacacccacgccaatgagctgaccctgatggtgatgagcagcatctttgtgctgatccccctcatcctgatcctgaccacctatggagccatcgcccgggctgtgctgtccatgcagagcaccaccggcctgcagaaggtgttccgcacctgtggggcccacctgatggtggtgtccctcttcttcatccctgtgatgtgcatgtacctgcagcccccatctgagaacagcccagaccagggcaagttcatcgccctcttctacacagtggtgacccccagcctgaaccccctcatctacaccctgaggaacaagcacgtgaagggagctgccaagaggctgctgggctgggagtggggcaagtag

SEQ ID NO: 220591 - DNA, 939 bp, Artificial Sequence
  derived and/or modified sequence
atgctgatgaagaagaacgccagcttcgaggacttcttcatcctgctggggttctccaattggccccatctagaagtggtcctcttcgtggtgattctaattttctacctgatcactttgatcggcaacctatttatcattatattgtcttaccttgattcccatctgcatactccaatgtattttttcttgtctaatctcagtttcctggacctgtgttataccaccagctccattccacagctcctcgtgaatctgtggggacctgaaaagacaattagttatgccggttgtaccgtgcaattatatttcgtcctggccctgggaacagccgaatgcgtgctgctggtggtaatgtcgtacgatcgttatgcggcagtgtgtaggccactgcactataccgtactcatgcaccccaggttctgcagactactggcagcagcctcatgggtatctggcttcacgactagcgctctccacagtagttttaccttctggatccctctgtgtcggcatagactggtcgatcatttcttctgtgaggtccccgcccttcttaggttatcatgtgttgacacccaagctaatgaactcaccctcatggtaatgtctagtatttttgtactcataccactcatcctgatcctcaccagttatggagcaattgcccgggccgttttatccatgcagtctacaacaggtctgcagaaggtgttgaggacctgcggggcacacctgatggttgtctcactgtttttcatccccgtgatgtgcatgtatctccaaccaccaagcgagaactctcaggaccagggtaaattcatcgcactgttctatactgtggtcactccctctctgaatccactcatttacacattccgcaacaaagatgttagaggcgccgtgaagcgcttgatgggctgggagtggggcatgtag

SEQ ID NO: 220592 - DNA, 939 bp, Artificial Sequence
  derived and/or modified sequence
atgatgatcaagaagaacgccagcagcgaggacttcttcatcctgctgggtttcagcaactggcctcagctggaggtggtgctgtttgtcgtcatactgatcttctacttaatgacacttactggaaacctcttcatcatcatcctgagttatgtcgattctcatctgcacaccccaatgtacttctttctgagcaatctttccttcctcgatctgtgctacaccacctccagcattcctcagctgctggttaacctacgaggtcccgaaaaaacgatctcttacgccggctgcatggtgcagctgtacttcgtgttagctctgggtatcgctgagtgcgtactcctggtggtcatgtcttatgacaggtacgtggccgtatgcaggcccctgcactacactgttttgatgcacccccgcttttgccatttgcttgtggcagcctcctgggtgattggcttcacgatatcagctttgcactcgagttttactttttgggtgccattgtgcggccacaggctcgtagatcattttttctgtgaggtgcccgccctgctcagactgtcctgcgtagacacccacgctaatgaacttactttaatggtgatgagctcgatattcgtcttaatcccccttatcctgattttaaccacctacggggccattgcccgggctgtgctatccatgcaatccacgactggtttacagaaggtgtttcgaacgtgtggagcacacctgatggttgtgtctctgttctttattccagtcatgtgcatgtacctccagcccccctcagagaattcgcctgaccagggtaagttcatcgcgctattttacacagtggtcacccccagcctgaaccctcttatttatacccttcgaaacaagcacgtgaaaggcgctgcgaagcgcctcctgggctgggagtggggtaaatag

SEQ ID NO: 220593 - DNA, 939 bp, Artificial Sequence
  derived and/or modified sequence
atgatgatcaagaagaacgccagcagcgaggacttcttcatcctgctgggattctcaaattggccccagttagaggtcgtgcttttcgtggtcatccttatattttatctgatgacactgacgggcaatctgttcatcatcattctgtcatacgtcgatagccacctgcatacccctatgtacttttttctatccaaccttagcttcctagacctctgctacaccacctctagcataccacagctgctggtgaatctgcggggtccagagaaaacgattagttatgccggctgtatggttcagctgtactttgtccttgcacttggcatcacagaatgtgtgttacttgtggttatgtcctatgatcgatacgtcgctgtgtgcagacccctgcattacaccgtcctcatgcatcccaggttttgccatttattggtcgccgctagttgggtgatcggttttactatctctgcactccactcaagcttcaccttctgggttcctttgtgcggacacaggctggtggaccactttttctgtgaagtcccggccctcctgagactaagctgcgtggatacccacgccaacgagttgacactgatggtgatgagttctatcttcgtgctaataccattgatcctcatcctgaccacctacggggcgatagcaagagcagtattgagcatgcagtctacaactggcctacagaaagtctttaggacatgcggggcccacctgatggtcgttagtctatttttcatccccgtaatgtgtatgtacctccagccaccttctgagaattcccctgatcaagggaaatttattgccctgttttacacagtggtgaccccatctctgaatcctctgatctatacgctgcggaataagcatgtgaagggggccgcgaagcggttgcttggttgggagtggggaaaatag

SEQ ID NO: 220594 - DNA, 939 bp, Artificial Sequence
  derived and/or modified sequence
atgatgatcaagaagaacgccagcagcgaggacttcttcatcctgcttgggttctcgaattggccacagttagaagtggtcttgttcgtcgtcatcctgattttctacctcatgactcttacaggcaatctatttattattattctgtcatacgtcgacagccatttgcatacacctatgtacttctttctgagcaacttgtcctttcttgacttgtgttatactaccagcagtattcctcagctattggtaaacctccgaggccccgagaagactatttcatatgcaggctgtatggttcaattgtacttcgtattggcactgggcatagctgaatgcgtgctgctggtagtaatgtcctacgatcgctatgtggctgtgtgccggccactgcattacaccgtccttatgcacccaaggttttgtcaccttcttgttgcagcaagttgggtgataggcttcaccatttcggctctccactccagcttcactttctgggtgcctctgtgcggccatcgtctggtggaccactttttttgcgaggtgcctgctctcctgcgcctcagctgcgtggacacgcacgcaaatgaactaacactgatggtaatgtctagcattttcgttcttatcccccttatccttatcctgacaacatacggggccatcgccagggccgttctgtccatgcagtccaccactggtctgcagaaagttttccgcacatgcggggcgcacctgatggtcgtatctctcttctttataccggtcatgtgtatgtacctgcaacccccctcagagaatagtccagaccaggggaaattcattgccctattttacactgttgtgaccccgagcctgaatccactgatttatacgctcaggaataaacacgtcaagggtgcagccaaaagattacttggctgggaatgggggaaatag

SEQ ID NO: 220595 - DNA, 1273 bp, Artificial Sequence
  derived and/or modified sequence
aatcaatttaactttttaaaataaaaaattattttcttaaatattgtctttctgattatggaatatcttagtcttcatttatccaaatgttaactcaaggatgtatataaaagaactcagtaacttgaaaagctattacttgtatccacagctggacaaatatctcaatgaagcatacaaaggaaactgtataaaaattctactgccataatggtgcacattatctggaattgggatacttttttctccaatctgtttgcaagtgagcagttggcaatgcatggacagactttgagtttatgcgattctttctttaggtacaggaaaaataagaatgttgatgaaaaaaaatgcaagttttgaagacttctttattctacttggattttctaactggcctcatctggaagtagttctctttgtggttatcttgatcttctacttgataacactgataggaaacctgttcatcatcatcctgtcatacctggactcccatctccacactcccatgtacttcttcctttcaaatctctcatttctggatctctgctacaccaccagctctatccctcagttgctggtgaatctctggggcccggaaaagaccatctcttatgctggttgtacggttcaactttactttgttctcgcactgggaaccgcagagtgtgtcctactggtggtgatgtcctatgatcgttatgcagctgtgtgtagacctttgcattacactgtcctcatgcaccctcgtttctgccgcttgttggctgcggcttcttgggtaagtggttttacaacctcagcacttcattcctcctttactttctggatacccctatgtagacatcgcctagtggatcacttcttctgtgaagttccagcacttctgcgattatcatgtgttgatacccaggcaaatgagctgaccctcatggtcatgagctccatttttgttctcatacctctcatcctcatcctcacttcctatggtgccattgcccgggctgtactgagcatgcaatcaaccactgggcttcagaaagtgcttaggacatgtggagcccatcttatggttgtatctctctttttcattccagtcatgtgcatgtatctccagccaccatcagaaaattctcaagatcaaggcaagttcattgccctcttttacactgttgtcacacctagtcttaaccctctaatctacactttcagaaacaaggatgtaagaggggcagtgaagagactaatggggtgggaatgggggatgtga

SEQ ID NO: 220596 - DNA, 1041 bp, Artificial Sequence
  derived and/or modified sequence
gggatacttttgtcttcaatctgtttgcaagtgagcggttgacaatgcatggacagactttgagtttatgtggttctttctttaggtataagaaaaagatgaatgatgattaaaaaaaatgcaagttcggaagacttctttattctacttggattttctaattggcctcagctggaagtagttctctttgtggttatcttgatcttctacctgatgacactgacaggaaacctgttcatcatcatcctgtcatacgtggactcccatctccacacaccaatgtacttcttcctttcaaacctctcatttctggatctctgctacaccaccagctctatccctcagttgctggtgaatctccggggcccggaaaagaccatctcgtatgctggttgcatggttcaactttactttgttcttgcactgggaatcgcagagtgtgtcctactggtggtgatgtcgtatgatcgttatgtagctgtgtgtagacctttgcattacactgtcctcatgcaccctcgtttctgccacttgttggttgcggcttcttgggtaattggttttactatctcagcacttcattcctcctttactttctgggtacccctttgtggacatcgcctagtggatcacttcttctgtgaagttccagcacttctgcgtttatcatgtgttgacacccatgcaaatgagctgaccctcatggtcatgagctccatttttgttctcatacctctcattctcattctcactacctatggtgccattgcccgggctgtactgagcatgcaatcaaccactgggcttcagaaagtgtttaggacatgtggagcccatcttatggttgtatctctctttttcattccagtcatgtgcatgtatctccagccaccatcagaaaattctcctgatcagggcaagttcattgccctcttttatactgttgtcacaccgagtcttaatcctctaatctacactctcagaaacaagcatgtaaaaggggcagcgaagagactattggggtgggagtgggggaagtga

SEQ ID NO: 220597 - DNA, 1041 bp, Artificial Sequence
  derived and/or modified sequence
gggatacttttgtcttcaatctgtttgcaagtgagcggttgacaatgcatggacagactttgagtttatgtggttctttctttaggtataagaaaaagatgaatgatgattaaaaaaaatgcaagttcggaagacttctttattctacttggattttctaattggcctcagctggaagtagttctctttgtggttatcttgatcttctacctgatgacactgacaggaaacctgttcatcatcatcctgtcatacgtggactcccatctccacacaccaatgtacttcttcctttcaaacctctcatttctggatctctgctacaccaccagctctatccctcagttgctggtgaatctccggggcccggaaaagaccatctcgtatgctggttgcatggttcaactttactttgttcttgcactgggaatcacagagtgtgtcctactggtggtgatgtcatatgatcgttatgtagctgtgtgtagacctttgcattacactgtcctcatgcaccctcgtttctgccacttgttggttgcggcttcttgggtaattggttttactatctcagcacttcattcctcctttactttctgggtacccctttgtggacatcgcctagtggatcacttcttctgtgaagttccagcacttctgcgtttatcatgtgttgacacccatgcaaatgagctgaccctcatggtcatgagctccatttttgttctcatacctctcattctcattctcactacctatggtgccattgcccgggctgtactgagcatgcaatcaaccactgggcttcagaaagtgtttaggacatgtggagcccatcttatggttgtatctctctttttcattccagtcatgtgcatgtatctccagccaccatcagaaaattctcctgatcagggcaagttcattgccctcttttatactgttgtcacaccgagtcttaatcctctaatctacactctcagaaacaagcatgtaaaaggggcagcgaagagactattggggtgggagtgggggaagtga

SEQ ID NO: 220598 - DNA, 939 bp, Artificial Sequence
  derived and/or modified sequence
atgctgatgaaaaagaatgcttcattcgaagacttcttcatcctcctcggattctccaactggccacatctggaagtcgtcctattcgtggtgattctgattttctatttgataacccttattggcaatctgttcatcatcattctttcatatctagattcccacctgcacacgcctatgtatttcttcctctccaacctgtcttttctggacctctgctatactacttcctctatccctcagctccttgtgaacttgtggggtcccgaaaagacaattagttatgcagggtgcaccgtacagctgtattttgtgctcgctctggggaccgcagagtgtgtcttgcttgtggtgatgtcatatgataggtacgccgcagtgtgccggcctctgcattacacagtccttatgcaccctaggttttgccggttgttagcggctgcctcgtgggtttccgggtttaccacatctgctcttcacagcagctttactttttggataccgctctgccgacaccgcttggtggaccacttcttctgtgaggtgccggcactgttacgcttgagctgtgttgacactcaggcaaatgaattgaccttgatggtaatgtcctctatcttcgttcttatccccctgatactgatcttgacctcttacggcgcaattgccagggctgtgcttagtatgcagagcaccaccggccttcagaaggtgctgcggacgtgtggcgctcatttaatggtcgtgtctctatttttcattccggtaatgtgcatgtacttacagcccccatccgagaactcccaggaccaggggaaatttattgctctgttttacacagtggttacgccgagcctaaaccccctcatctacacattcagaaacaaggacgtgcggggagcagtaaagagactgatgggctgggaatggggaatgtag

SEQ ID NO: 220599 - DNA, 939 bp, Artificial Sequence
  derived and/or modified sequence
atgatgattaagaagaatgcgtcctcagaagacttttttatattgctgggcttctccaattggcctcaactggaggttgttctgttcgttgtaatcctaatcttctacctgatgacgcttactggcaacctgtttatcatcatcttgtcttatgtagactcacatctgcatactcctatgtattttttcttatccaatttgagcttcctggatctctgctataccacaagttctattccgcagctgttggtaaaccttcgcggaccggagaaaacaataagctacgctggctgtatggttcaactgtattttgttctggcactgggcatagcagaatgtgttctgctggtggtcatgagctacgacagatacgtcgccgtctgccggcctctccactacaccgtgctgatgcacccgaggttctgccatctgcttgttgctgccagctgggtgatcggctttacaatcagcgccctccatagtagctttactttctgggtcccgctatgtggacaccggctggtggatcatttcttctgtgaggtgccggctctgttgaggctgagttgcgtggatacacacgctaatgaactcactctgatggtgatgagtagtatcttcgtgctaataccgctgatcttaatcctgactacctacggcgctatcgcaagggctgttctgagcatgcagagtacaaccggtctccagaaagtgttccgcacatgcggcgcacaccttatggtggttagcttattctttattccagtcatgtgcatgtaccttcagcctccaagcgagaattcgcccgatcaggggaagtttattgccttattctataccgtggttacaccttctttgaatccacttatctataccttaaggaataaacatgtgaagggagctgctaaaaggctactgggctgggaatggggaaaatag

SEQ ID NO: 220600 - DNA, 939 bp, Artificial Sequence
  derived and/or modified sequence
atgatgattaagaaaaatgcctcgtcagaagacttttttattctcctggggttcagcaactggcctcaactggaggtcgtgctttttgtagtgatcctcatcttctacctcatgaccctgacggggaatctgtttatcataatattgagttatgtcgactcacatctgcacacacccatgtacttcttcctgtcaaacctgagtttcctggacctctgctatacaacgagtagcatccctcaactcctagtgaacttacgcggaccggagaaaacaataagctatgcaggctgtatggtccagctgtacttcgttcttgctctaggtatcaccgagtgcgtgttgttggtcgttatgtcctacgacagatacgttgcagtgtgtagaccccttcactacaccgtgcttatgcaccctcgtttttgccatctgctcgtcgctgcatcttgggtaattggtttcaccatcagtgcgctccatagcagcttcactttttgggttccgctgtgtggccatcggttggtcgatcattttttctgcgaggtccctgcactgcttcgactgtcttgtgtggacactcacgcaaacgagctcacactcatggtgatgtcctctatttttgtcctcataccactgatcctgattctcaccacctacggtgctatagccagagctgttttgtctatgcagtcaactactgggttacagaaagtgtttcgtacttgtggcgctcacctgatggtggtgagtctattctttatcccagtgatgtgtatgtacctgcagccacctagtgagaacagcccagaccaggggaagttcatcgcgctcttttacactgtagttaccccctccctgaatccacttatctacaccctcagaaacaagcacgtcaagggtgcagccaagcgactgcttggctgggaatggggaaagtag

SEQ ID NO: 220601 - DNA, 939 bp, Artificial Sequence
  derived and/or modified sequence
atgatgattaagaaaaacgcatccagtgaagacttcttcatcctcctcggattctccaactggccacaattagaagtggtgctctttgtggtgatactgatcttctacctgatgaccttgactgggaatctcttcattatcatcctgtcttacgtcgacagccacctccacacaccaatgtacttctttctgtctaacttaagttttttagacctctgctacaccacctcctctattcctcagcttcttgtcaatttgcgcggaccagaaaaaaccatcagttacgctggatgcatggtgcagttatatttcgtcttggctctgggaatcgcagagtgtgtcctattggtcgtgatgtcctatgatcgctatgtagctgtgtgtcggcctctacactacactgtgcttatgcaccctagattttgccacctgttggtcgccgcttcctgggttattgggtttacgatctccgccctgcacagctcgttcaccttttgggtgcctttgtgcgggcacagactagtggatcatttcttttgcgaagttcctgccctgttgagattatcttgcgtggacacccatgcaaatgagttaacgctgatggtgatgagctcaatcttcgttctcatacccctcatcctgattttaacaacttacggcgcaatcgcaagggccgtcctcagcatgcagagtaccactggccttcagaaagtattcaggacctgtggagctcacttaatggtggtcagtctgttctttatccccgtcatgtgcatgtacctgcagcctcctagtgagaactcccccgatcagggtaaatttattgccttgttctacaccgttgtgactccttcgctgaaccctctcatttacacattaaggaataaacacgtgaagggggctgcgaaaaggctgctcggatgggagtgggggaagtag

SEQ ID NO: 220602 - protein, 514 aa, Artificial Sequence
  derived and/or modified sequence
MKEAGQMQNLESARAGRSVSTQTGSMTGQIPRLSKVNLFTLLSLWMELFPAEAQRQKSQKNEEGKHGPLGDNEERTRVSTDKRQVKRTGLVVVKNMKIVGLHCSSEDLHAGQIALIKHGSRLKNCDLYFSRKPCSACLKMIVNAGVNRISYWPADPEISLLTEASSSEDAKLDAKAVERLKSNSRAHVCVLLQPLVCYMVQFVEETSYKCDFIQKITKTLPDANTDFYYECKQERIKEYEMLFLVSNEEMHKQILMTIGLENLCENPYFSNLRQNMKDLILLLATVASSVPNFKHFGFYRSNPEQINEIHNQSLPQEIARHCMVQARLLAYRTEDHKTGVGAVIWAEGKSRSCDGTGAMYFVGCGYNAFPVGSEYADFPHMDDKQKDREIRKFRYIIHAEQNALTFRCQEIKPEERSMIFVTKCPCDECVPLIKGAGIKQIYAGDVDVGKKKADISYMRFGELEGVSKFTWQLNPSGAYGLEQNEPERRENGVLRPVPQKEEQHQDKKLRLGIH

SEQ ID NO: 220603 - protein, 316 aa, Artificial Sequence
  derived and/or modified sequence
MVQFVEETSYKCDFIQKITKTLPDANTDFYYECKQERIKEYEMLFLVSNEEMHKQILMTIGLENLCENPYFSNLRQNMKDLILLLATVASSVPNFKHFGFYRSNPEQINEIHNQSLPQEIARHCMVQARLLAYRTEDHKTGVGAVIWAEGKSRSCDGTGAMYFVGCGYNAFPVGSEYADFPHMDDKQKDREIRKFRYIIHAEQNALTFRCQEIKPEERSMIFVTKCPCDECVPLIKGAGIKQIYAGDVDVGKKKADISYMRFGELEGVSKFTWQLNPSGAYGLEQNEPERRENGVLRPVPQKEEQHQDKKLRLGIH

SEQ ID NO: 220604 - DNA, 1545 bp, Artificial Sequence
  derived and/or modified sequence
atgaaggaggccggccagatgcagaacctggagagcgccagagccggcagaagcgtgagcacccagaccggcagcatgaccggccagatccccagactgagcaaggtgaacctgttcaccctgctgagcctgtggatggagctgttccccgccgaggcccagagacagaagagccagaagaacgaggagggcaagcacggccccctgggcgacaacgaggagagaaccagagtgagcaccgacaagagacaggtgaagagaaccggcctggtggtggtgaagaacatgaagatcgtgggcctgcactgcagcagcgaggacctgcacgccggccagatcgccctgatcaagcacggcagcagactgaagaactgcgacctgtacttcagcagaaagccctgcagcgcctgcctgaagatgatcgtgaacgccggcgtgaacagaatcagctactggcccgccgaccccgagatcagcctgctgaccgaggccagcagcagcgaggacgccaagctggacgccaaggccgtggagagactgaagagcaacagcagagcccacgtgtgcgtgctgctgcagcccctggtgtgctacatggtgcagttcgtggaggagaccagctacaagtgcgacttcatccagaagatcaccaagaccctgcccgacgccaacaccgacttctactacgagtgcaagcaggagagaatcaaggagtacgagatgctgttcctggtgagcaacgaggagatgcacaagcagatcctgatgaccatcggcctggagaacctgtgcgagaacccctacttcagcaacctgagacagaacatgaaggacctgatcctgctgctggccaccgtggccagcagcgtgcccaacttcaagcacttcggcttctacagaagcaaccccgagcagatcaacgagatccacaaccagagcctgccccaggagatcgccagacactgcatggtgcaggccagactgctggcctacagaaccgaggaccacaagaccggcgtgggcgccgtgatctgggccgagggcaagagcagaagctgcgacggcaccggcgccatgtacttcgtgggctgcggctacaacgccttccccgtgggcagcgagtacgccgacttcccccacatggacgacaagcagaaggacagagagatcagaaagttcagatacatcatccacgccgagcagaacgccctgaccttcagatgccaggagatcaagcccgaggagagaagcatgatcttcgtgaccaagtgcccctgcgacgagtgcgtgcccctgatcaagggcgccggcatcaagcagatctacgccggcgacgtggacgtgggcaagaagaaggccgacatcagctacatgagattcggcgagctggagggcgtgagcaagttcacctggcagctgaaccccagcggcgcctacggcctggagcagaacgagcccgagagaagagagaacggcgtgctgagacccgtgccccagaaggaggagcagcaccaggacaagaagctgagactgggcatccactag

SEQ ID NO: 220605 - DNA, 3383 bp, Artificial Sequence
  derived and/or modified sequence
agtgggccgttgccttacagttgctgagaggaggcgagaggcgggggcgctagggccgagatcatgtctgactgggagaggtttccttggcagcagaggacgctaggtttgggatgaaagaagctgggcagatgcaaaatctggagagcgcgagggccgggcggtcagtcagcacccagactggcagcatgaccggtcagataccaaggctttctaaagtcaaccttttcactctgctcagcctctggatggagctctttccagcagaagcccagcggcaaaaatctcagaaaaatgaagagggaaagcatggacccttaggagataatgaagagaggaccagagtatctactgacaaaagacaggtaaagagaactggtcttgtggtggtgaaaaacatgaaaattgttggtctccactgttctagtgaagatttacatgccgggcagattgctcttattaaacatgggtcaaggctgaaaaactgtgatctttatttttccagaaaaccatgttctgcttgtttgaaaatgattgtaaatgctggagttaaccgaatttcatactggcctgctgatccagaaataagtttgcttacggaggcttctagttctgaagatgcaaagttagatgccaaagcagtggaaagattgaagtcaaacagtcgggcccatgtgtgtgtcttacttcaacctttggtgtgttatatggtgcagtttgtagaggagacctcttacaaatgtgactttattcaaaaaattacaaaaacattgccggatgctaacactgacttttattatgaatgtaaacaagaaagaataaaagaatatgaaatgttatttttggtttcaaatgaagaaatgcataagcaaatactgatgactataggtttggagaacctgtgtgaaaatccatactttagcaatctaaggcaaaacatgaaagaccttatcctacttttggccacagtagcttccagtgtgccgaactttaaacacttcggattttaccgtagcaatccagaacagattaatgaaattcacaatcaaagtttgccacaggaaattgcaaggcactgcatggttcaggccaggttattggcatatcgaactgaggatcataaaacaggagttggggcagtcatttgggcagaagggaaatctagaagttgtgatggaacaggtgccatgtactttgtaggatgtggttacaatgcttttcctgttggatctgagtatgctgacttcccacacatggatgacaagcagaaagacagagaaataaggaaattcagatacatcatacatgcggaacagaatgccttgacatttaggtgtcaagaaataaaaccagaagaaagaagcatgatttttgtgacaaagtgcccatgtgatgagtgtgtacctttaattaaaggtgcaggcataaaacaaatctatgcaggagatgtagatgttggaaaaaagaaggcagacatctcttacatgaggttcggggagcttgaaggtgttagcaaatttacgtggcagctgaatccatcaggagcttatggtcttgaacaaaatgagcctgaaaggagagaaaatggtgtgttgagacctgtcccacagaaggaagagcagcaccaggacaagaagctgcgcctcggaatccactaagaaggcctgtctacactgcaggggaacctcaagaacttttcattgcacttctaaaattcagccttgttcattcagaaaataaggatggattttgtgaataattgaaaagattttttaaggaagctaatttatttctaggatacaaatggtgttaataagaatatttgtcttttagatttatgtgtgggttttccataatgtagtagtgtgttattttattacacgaaatgagggagcaataacttcaaccaatgtaatcaccaacagggactgatttctatttatcttgactttatattagccaatttgaaagggtctgcttcacaagaggtcatgcctctgcagggaatcacacaccttttgagaaatattaattcttttgaattacaagagtgacagttagtaaactgctccagggaaataagtgtcatcttttaagagtcagtgtatagcaaaccaaaagatcacatttatacccaaagctttctagtaatcagaatttacttaattagaattgactcataaaaataaagttagtggactttgtctccatttttaaagtatattttgtaaatgttaattctgtggtcctgtttatcacagactttgggtagcaataggaagagagtgttattctgagacagtgtcgctgcttgatatcactgactcttgaaatcactaacagtgaacctcaaatttggttatgatgttaacagagaagaaatatttgagtctggaatattgaaactagctttcctagaattccattaataaatgctgctcccccatatagtcttcccttctgtataattaacataggttgtctcatggctttgatcttcaaaaggaagagccttttaaaaacatttgccaacctcaagaataaatactgaaagtcttgaaagtatggtcatttcagctattccagattgctgtctgtgatttctcacatttttatttgctgagaaacattcagaaaattattccaaaaatgaaggtacattttctgttctctcctaggttagagaggggtggcctggggtgcttcatgagaaatgtcttcctggatctgcggtggtcaggtttgcctctgcttttgttccctgcctttccgccacatcacacggcctcactgggcttcctaccagtttctcagaattacacgcacgaccatccaaacattggctccatgccagggctgtgactgcagcctgtgtaggaccatggggagttcagagtcatcatacaaggcagccaagaactgccataaacactacacagatggagggcatgggataggacaggagaggaggtgatgtacacttagaggtaactaaggctagtttgaaaaccgtgaattaagatattcttatcagtataaaaacactgagattgcttacctcccaaattgctttattgtattaactctcatgcttcagctcttggatttgttgtttctaactaacatgtcatgtacaccaaacattttataaatcaatcagtaaatattttgtaagacccaaaatcctggcatattgccaggtctgtggatttgcctgttgggtgttgggatgggatatcagaggaagaagcatacaagtgggaaaaactgtgattagaaagggaaaaataggcatttccacagtactattaagagaggcatgataatgccattttttttcttctgtacaactggtcagatttcaataaataatcattgatggt

SEQ ID NO: 220606 - DNA, 1545 bp, Artificial Sequence
  derived and/or modified sequence
atgaaggaagccggccaaatgcaaaaccttgaatcagcccgggccggccgaagcgtgagcacacagacggggtcgatgacgggtcagattcctaggctctctaaagtgaaccttttcaccttgctgagcctgtggatggagctgttccctgccgaagctcagcgccaaaagtcgcagaagaatgaagaggggaagcatggacctctgggggataatgaggagcggacacgggtctctactgataagcgacaggtgaagagaaccggactcgtggtcgtgaagaacatgaagattgtcgggcttcattgctcaagtgaggacctgcatgccggccagatcgccctgataaagcacgggtcaaggctgaaaaattgtgatctttattttagcagaaaaccctgttccgcatgtttaaaaatgattgtgaacgccggggtgaacagaatatcctactggcctgcagatccggaaataagtcttctaaccgaggcttctagcagtgaagacgccaagctggatgcaaaggctgtcgaaaggctgaagtctaacagcagggcacacgtgtgcgtgttgctccagcccctggtgtgttacatggttcagttcgtggaagagacatcctacaaatgcgactttatccaaaagatcactaaaacccttcctgatgcaaataccgacttctactatgagtgtaaacaggagcgaattaaagagtatgagatgttattcctggtaagcaacgaagaaatgcacaagcagattctcatgacgattgggttagaaaacctttgtgagaatccttacttctccaatttacgacagaacatgaaagatcttattttactcctggctaccgtggcttctagcgtacctaacttcaaacacttcggcttctacagatcaaaccccgaacagattaacgaaatccacaaccaaagcctgccccaggaaatcgctcggcattgcatggtccaggccagactacttgcctaccgcaccgaggatcacaaaacaggcgtgggtgccgtcatttgggctgagggtaaatctcgcagctgcgatggcactggtgccatgtattttgtgggctgtggttataatgccttccccgttgggagtgaatatgcagacttcccacacatggacgacaaacaaaaggaccgagaaattaggaaattccgctatatcatacacgctgagcaaaatgccctgaccttcaggtgccaggagatcaaacccgaagaaaggtcaatgatctttgtgaccaaatgtccatgtgacgagtgcgtgcctttaataaagggcgctggaattaaacagatttacgccggggacgtagacgtcggcaaaaagaaagccgacatttcctacatgaggtttggagaactcgagggcgtcagtaaatttacctggcagctgaatccttctggagcatacgggttagagcagaatgaacccgagcggagagaaaacggagttctgaggcctgtgcctcaaaaggaagagcagcatcaggataagaaactgcggctgggaattcactag

SEQ ID NO: 220607 - DNA, 1545 bp, Artificial Sequence
  derived and/or modified sequence
atgaaggaggccggccagatgcagaacctggagagcgcccgggccggccgctctgtgtccacccagacaggctccatgacaggccagatcccccggctgagcaaggtgaacctcttcaccctgctgagcctgtggatggagctgtttcctgctgaggcccagaggcagaagagccagaagaatgaggagggcaagcacggccccctgggggacaatgaggagaggaccagggtgtccacagacaagaggcaggtgaagaggacaggcctggtggtggtgaagaacatgaagatcgtgggcctgcactgcagcagcgaggacctgcacgccggccagatcgccctgatcaagcacggcagccggctgaagaactgtgacctgtacttcagcaggaagccctgcagcgcctgcctgaagatgattgtgaatgctggggtgaaccgcatctcctactggccagctgaccctgagatcagcctgctgacagaggccagcagcagtgaagatgccaagctggatgccaaggctgtggagcggctgaagagcaacagccgggcccacgtgtgtgtgctgctgcagcccctggtgtgctacatggtgcagtttgtggaggagaccagctacaagtgtgacttcatccagaagatcaccaagaccctgcctgatgccaacacagacttctactatgagtgcaagcaggagcgcatcaaggagtatgagatgctgttcctggtgtccaatgaggagatgcacaagcagatcctgatgaccatcggcctggagaacctgtgtgagaacccctacttcagcaacctgcggcagaacatgaaggacctgatcctgctgctggccaccgtggccagctctgtgcccaacttcaagcacttcggcttctaccgcagcaaccctgagcagatcaatgagatccacaaccagagcctgccccaggagatcgcccggcactgcatggtgcaggcccggctgctggcctacagaacagaggaccacaagacaggagtgggcgccgtcatctgggccgagggcaagagccgcagctgtgatggcaccggggccatgtactttgtgggctgcggctacaatgccttccctgtgggctctgaatatgctgacttcccccacatggatgacaagcagaaggaccgggagatcaggaagttccgctacatcatccatgctgagcagaatgccctgaccttccgctgccaggagatcaagccagaggagaggtccatgatctttgtgaccaagtgcccctgtgatgaatgtgtgcccctcatcaagggggccggcatcaagcagatctatgctggagatgtggatgtgggcaagaagaaggctgacatctcctacatgagatttggagagctggagggcgtgtccaagttcacctggcagctgaaccccagcggggcctacggcctggagcagaatgaacctgagcggcgggagaatggagtgctgcggcctgtgccccagaaggaggagcagcaccaggacaagaagctgcggctgggcatccactag

SEQ ID NO: 220608 - DNA, 1545 bp, Artificial Sequence
  derived and/or modified sequence
atgaaggaggccggccagatgcagaacctggagagcgcccgggccggaagatccgtgtctacccagaccggaagcatgacaggacagattccgcggctgagcaaggttaacttgttcaccctgctgtcattatggatggagctgtttcctgctgaggctcagcggcagaaatcacagaaaaatgaagagggaaagcacggccctttgggggacaacgaggagaggacaagggtgagtaccgacaaacggcaggtcaaacggaccgggctagtcgtcgtgaaaaacatgaaaatcgtcgggctgcactgttcatctgaagaccttcatgcagggcagattgccctcatcaaacatggatccagattgaagaactgtgacctatattttagccgcaagccttgcagtgcatgcttaaagatgatagtgaacgccggggtcaaccggatttcatactggcccgcagatccagagatcagtctgctgactgaagcgtcgagtagcgaagacgccaaactggacgccaaagctgttgagaggttgaaaagcaactctcgcgcccatgtctgcgtcctgctccaaccccttgtgtgttatatggtgcagtttgtggaagagaccagttacaaatgtgacttcattcagaaaataacgaaaacacttccggacgcaaacacggacttctactatgagtgtaagcaagaaaggataaaggagtacgagatgctttttctggtgagtaatgaagagatgcataagcagattctcatgaccattgggctcgaaaatctgtgcgagaacccatatttctcaaatctgcggcagaacatgaaggacctgattctgttattggctacggtcgcctccagcgtgcccaatttcaagcactttggattctataggagtaacccggaacagatcaacgagattcacaaccagtcactccctcaggagatcgctagacattgcatggttcaggccagactgcttgcctacaggaccgaagatcataagactggggtgggcgccgtaatttgggctgagggaaaaagccggtcctgtgatggaacgggcgccatgtacttcgtggggtgtgggtacaatgcgttccccgtgggatcagaatacgccgacttcccacatatggatgataaacagaaagaccgagagattcgtaagtttaggtacatcatccacgcggagcaaaatgcgttgacgtttaggtgccaggaaatcaagcctgaagaaaggagtatgatattcgtcactaaatgcccatgcgacgaatgtgtccctctgattaaaggagcaggaattaaacagatttacgccggagacgtggacgtgggaaaaaaaaaggccgatatctcctacatgaggttcggggagctggaaggcgtttctaagtttacgtggcaactgaatccatcaggcgcctacgggctagagcagaacgaaccagagaggcgcgagaacggtgtgctgcgtcccgtgccccagaaggaggaacaacatcaagataagaagttacgattggggatccactag

SEQ ID NO: 220609 - DNA, 1545 bp, Artificial Sequence
  derived and/or modified sequence
atgaaagaagctggccagatgcagaacctagaatccgcgagggccggaaggagcgtgtcaacccagactggtagcatgacaggtcagatcccgcgtctgtccaaggtcaatctgttcacactgctatcactgtggatggagctgttccccgctgaggctcagagacagaagagtcagaagaacgaggaggggaagcatggccctttgggcgacaatgaagagcgaacaagagtttccaccgacaagcgtcaggtgaaacggacagggttggtggttgtaaagaatatgaaaatagtggggctgcactgtagcagcgaggacctacatgccggacaaatagctctaatcaagcacggatctagactcaaaaactgtgatttgtatttctcacgtaagccgtgctccgcatgccttaaaatgattgtgaacgcaggggtcaacagaatttcttattggcccgctgacccagagatcagtcttctgaccgaggctagtagttcggaggacgcaaaactggacgctaaagcagtcgaaaggctgaagagcaactcccgggcacacgtttgcgtcctcttgcagccattagtctgctatatggtccagtttgttgaggagaccagctacaaatgcgattttatccagaaaattaccaaaactctgcctgacgccaacaccgacttctattacgaatgtaaacaggagaggatcaaggagtacgagatgctgttccttgtcagcaatgaggagatgcataagcagattctgatgaccatcggattagagaatctgtgcgagaacccctatttttctaacctgcgtcaaaacatgaaagacctgattcttctactcgccacagttgcatcctctgtaccaaacttcaaacacttcgggttctacaggtcgaatcccgagcagatcaatgagattcataaccagagcctgcctcaggaaatcgcgagacattgtatggtgcaggccaggttgctggcctaccgcaccgaagatcataaaacaggtgtgggggctgttatatgggccgaagggaagtctaggagctgcgacggcaccggggctatgtatttcgtcggatgcgggtataatgcctttcccgtggggagtgagtatgccgactttccccacatggatgataagcagaaagaccgggaaatccggaaatttcgctatataatccatgcagagcagaatgccttgacctttaggtgtcaggaaatcaagccagaagaacgatctatgatatttgttacaaaatgtccctgcgatgagtgcgtgcccttgattaagggcgctgggatcaagcagatttacgcgggagatgtggatgtaggcaagaagaaggcggacatatcctacatgaggtttggcgagttggagggtgtttctaagttcacgtggcagcttaatccatccggtgcatacggcctggagcagaacgagcccgaaaggagggagaacggcgttctgcggccagtgcctcagaaggaggagcaacatcaggacaagaagcttcgcctcgggatccattag

SEQ ID NO: 220610 - protein, 551 aa, Artificial Sequence
  derived and/or modified sequence
MAENWKNCFEEELICPICLHVFVEPVQLPCKHNFCRGCIGEAWAKDSGLVRCPECNQAYNQKPGLEKNLKLTNIVEKFNALHVEKPPAALHCVFCRRGPPLPAQKVCLRCEAPCCQSHVQTHLQQPSTARGHLLVEADDVRAWSCPQHNAYRLYHCEAEQVAVCQYCCYYSGAHQGHSVCDVEIRRNEIRKMLMKQQDRLEEREQDIEDQLYKLESDKRLVEEKVNQLKEEVRLQYEKLHQLLDEDLRQTVEVLDKAQAKFCSENAAQALHLGERMQEAKKLLGSLQLLFDKTEDVSFMKNTKSVKILMDRTQTCTSSSLSPTKIGHLNSKLFLNEVAKKEKQLRKMLEGPFSTPVPFLQSVPLYPCGVSSSGAEKRKHSTAFPEASFLETSSGPVGGQYGAAGTASGEGQSGQPLGPCSSTQHLVALPGGAQPVHSSPVFPPSQYPNGSAAQQPMLPQYGGRKILVCSVDNCYCSSVANHGGHQPYPRSGHFPWTVPSQEYSHPLPPTPSVPQSLPSLAVRDWLDASQQPGHQDFYRVYGQPSTKHYVTS

SEQ ID NO: 220611 - protein, 550 aa, Artificial Sequence
  derived and/or modified sequence
MAENWKNCFEEELICPICLHVFVEPVQLPCKHNFCRGCIGEAWAKDSGLVRCPECNQAYNQKPGLEKNLKLTNIVEKFNALHVEKPPAALHCVFCRRGPPLPAQKVCLRCEAPCCQSHVQTHLQQPSTARGHLLVEADDVRAWSCPQHNAYRLYHCEAEQVAVCQYCCYYSGAHQGHSVCDVEIRRNEIRMLMKQQDRLEEREQDIEDQLYKLESDKRLVEEKVNQLKEEVRLQYEKLHQLLDEDLRQTVEVLDKAQAKFCSENAAQALHLGERMQEAKKLLGSLQLLFDKTEDVSFMKNTKSVKILMDRTQTCTSSSLSPTKIGHLNSKLFLNEVAKKEKQLRKMLEGPFSTPVPFLQSVPLYPCGVSSSGAEKRKHSTAFPEASFLETSSGPVGGQYGAAGTASGEGQSGQPLGPCSSTQHLVALPGGAQPVHSSPVFPPSQYPNGSAAQQPMLPQYGGRKILVCSVDNCYCSSVANHGGHQPYPRSGHFPWTVPSQEYSHPLPPTPSVPQSLPSLAVRDWLDASQQPGHQDFYRVYGQPSTKHYVTS

SEQ ID NO: 220612 - DNA, 1656 bp, Artificial Sequence
  derived and/or modified sequence
atggccgagaactggaagaactgcttcgaggaggagctgatctgccccatctgcctgcacgtgttcgtggagcccgtgcagctgccctgcaagcacaacttctgcagaggctgcatcggcgaggcctgggccaaggacagcggcctggtgagatgccccgagtgcaaccaggcctacaaccagaagcccggcctggagaagaacctgaagctgaccaacatcgtggagaagttcaacgccctgcacgtggagaagccccccgccgccctgcactgcgtgttctgcagaagaggcccccccctgcccgcccagaaggtgtgcctgagatgcgaggccccctgctgccagagccacgtgcagacccacctgcagcagcccagcaccgccagaggccacctgctggtggaggccgacgacgtgagagcctggagctgcccccagcacaacgcctacagactgtaccactgcgaggccgagcaggtggccgtgtgccagtactgctgctactacagcggcgcccaccagggccacagcgtgtgcgacgtggagatcagaagaaacgagatcagaaagatgctgatgaagcagcaggacagactggaggagagagagcaggacatcgaggaccagctgtacaagctggagagcgacaagagactggtggaggagaaggtgaaccagctgaaggaggaggtgagactgcagtacgagaagctgcaccagctgctggacgaggacctgagacagaccgtggaggtgctggacaaggcccaggccaagttctgcagcgagaacgccgcccaggccctgcacctgggcgagagaatgcaggaggccaagaagctgctgggcagcctgcagctgctgttcgacaagaccgaggacgtgagcttcatgaagaacaccaagagcgtgaagatcctgatggacagaacccagacctgcaccagcagcagcctgagccccaccaagatcggccacctgaacagcaagctgttcctgaacgaggtggccaagaaggagaagcagctgagaaagatgctggagggccccttcagcacccccgtgcccttcctgcagagcgtgcccctgtacccctgcggcgtgagcagcagcggcgccgagaagagaaagcacagcaccgccttccccgaggccagcttcctggagaccagcagcggccccgtgggcggccagtacggcgccgccggcaccgccagcggcgagggccagagcggccagcccctgggcccctgcagcagcacccagcacctggtggccctgcccggcggcgcccagcccgtgcacagcagccccgtgttcccccccagccagtaccccaacggcagcgccgcccagcagcccatgctgccccagtacggcggcagaaagatcctggtgtgcagcgtggacaactgctactgcagcagcgtggccaaccacggcggccaccagccctaccccagaagcggccacttcccctggaccgtgcccagccaggagtacagccaccccctgccccccacccccagcgtgccccagagcctgcccagcctggccgtgagagactggctggacgccagccagcagcccggccaccaggacttctacagagtgtacggccagcccagcaccaagcactacgtgaccagctag

SEQ ID NO: 220613 - DNA, 1653 bp, Artificial Sequence
  derived and/or modified sequence
atggccgagaactggaagaactgcttcgaggaggagctgatctgccccatctgcctgcacgtgttcgtggagcccgtgcagctgccctgcaagcacaacttctgcagaggctgcatcggcgaggcctgggccaaggacagcggcctggtgagatgccccgagtgcaaccaggcctacaaccagaagcccggcctggagaagaacctgaagctgaccaacatcgtggagaagttcaacgccctgcacgtggagaagccccccgccgccctgcactgcgtgttctgcagaagaggcccccccctgcccgcccagaaggtgtgcctgagatgcgaggccccctgctgccagagccacgtgcagacccacctgcagcagcccagcaccgccagaggccacctgctggtggaggccgacgacgtgagagcctggagctgcccccagcacaacgcctacagactgtaccactgcgaggccgagcaggtggccgtgtgccagtactgctgctactacagcggcgcccaccagggccacagcgtgtgcgacgtggagatcagaagaaacgagatcagaatgctgatgaagcagcaggacagactggaggagagagagcaggacatcgaggaccagctgtacaagctggagagcgacaagagactggtggaggagaaggtgaaccagctgaaggaggaggtgagactgcagtacgagaagctgcaccagctgctggacgaggacctgagacagaccgtggaggtgctggacaaggcccaggccaagttctgcagcgagaacgccgcccaggccctgcacctgggcgagagaatgcaggaggccaagaagctgctgggcagcctgcagctgctgttcgacaagaccgaggacgtgagcttcatgaagaacaccaagagcgtgaagatcctgatggacagaacccagacctgcaccagcagcagcctgagccccaccaagatcggccacctgaacagcaagctgttcctgaacgaggtggccaagaaggagaagcagctgagaaagatgctggagggccccttcagcacccccgtgcccttcctgcagagcgtgcccctgtacccctgcggcgtgagcagcagcggcgccgagaagagaaagcacagcaccgccttccccgaggccagcttcctggagaccagcagcggccccgtgggcggccagtacggcgccgccggcaccgccagcggcgagggccagagcggccagcccctgggcccctgcagcagcacccagcacctggtggccctgcccggcggcgcccagcccgtgcacagcagccccgtgttcccccccagccagtaccccaacggcagcgccgcccagcagcccatgctgccccagtacggcggcagaaagatcctggtgtgcagcgtggacaactgctactgcagcagcgtggccaaccacggcggccaccagccctaccccagaagcggccacttcccctggaccgtgcccagccaggagtacagccaccccctgccccccacccccagcgtgccccagagcctgcccagcctggccgtgagagactggctggacgccagccagcagcccggccaccaggacttctacagagtgtacggccagcccagcaccaagcactacgtgaccagctag

SEQ ID NO: 220614 - DNA, 1656 bp, Artificial Sequence
  derived and/or modified sequence
atggccgaaaattggaaaaattgtttcgaagaggaacttatctgcccaatctgcttgcatgtcttcgtggagcctgtgcagctaccatgcaaacacaacttttgcaggggctgtataggtgaggcctgggccaaggacagcgggctggtgaggtgtccagaatgtaatcaggcctataaccagaagcctggccttgagaagaacctaaaactgaccaacattgtggagaaattcaatgccttgcacgtggaaaaacctcctgccgccctacactgcgtgttctgccggagaggcccgcctctgcccgcacagaaggtgtgtcttaggtgcgaggctccctgttgtcagtctcatgtacagacccatcttcaacagcctagtactgcccgcggccatttgctggtcgaagcggacgatgttcgagcctggagctgcccacagcataacgcctatagactctatcactgtgaagccgagcaagtggctgtgtgtcaatattgctgttattattccggagctcaccagggccactctgtgtgcgatgttgagattcgcagaaacgagatccgtaagatgctgatgaagcagcaggaccggctagaggagcgtgagcaagacatagaagaccaactgtataagcttgaaagcgataaacgcctcgtggaagaaaaagtgaaccagcttaaggaggaggttcggcttcagtacgaaaaactgcaccagctgctcgatgaggatctcagacagaccgttgaggtgctagacaaagctcaggccaagttctgtagtgaaaacgccgctcaggcccttcacctcggagagcgcatgcaggaagcaaagaagctcctcggttctttgcagttattgtttgacaagaccgaggatgttagcttcatgaagaatacaaaatcagtgaaaatcctgatggacagaactcagacctgtaccagttccagcttgtcccccactaaaattgggcacttgaatagcaagttgttcctgaatgaagtggctaagaaagagaagcaactgagaaagatgctggagggaccgtttagtacgccggtgccgttcttgcagtcggtgccactctatccttgcggagtgtcatcttccggagcagagaagcggaagcacagtactgcattccctgaagcctcgtttctggaaacctcctccgggcccgtcgggggccaatacggagccgccgggacagcatcgggcgaaggccagagcggacaaccactggggccatgctcctcaacccagcaccttgttgcgttgcctgggggcgcgcagcctgtgcatagtagcccagtgtttcctcccagccagtacccgaacggttccgcagcccaacagccaatgctgcctcagtacgggggcaggaagattctcgtgtgttctgtagacaattgttactgctccagtgtggcaaaccacggcggccaccagccataccctagaagcggacattttccgtggactgtgccctctcaggagtatagtcatcctctgcctcccactccctcagtgccccagtcattaccttctctggcagtgagagactggctggacgcctcccaacaaccgggtcatcaagatttctacagggtgtacggacagccgtcaactaagcactatgtgacctcttag

SEQ ID NO: 220615 - DNA, 1653 bp, Artificial Sequence
  derived and/or modified sequence
atggctgaaaactggaaaaattgttttgaggaggagctgatttgcccaatctgcctgcacgtgtttgtcgaacccgtgcagctaccatgtaaacacaacttttgtagaggctgcatcggtgaggcctgggctaaggatagcgggctggtgcgctgccctgagtgcaatcaggcctataatcagaagccaggtctggagaagaacctcaagttaacaaatattgtggaaaagttcaatgccctgcacgtggaaaagccaccagctgcattgcattgcgtgttctgccggaggggcccaccattgcccgcccaaaaggtatgtttgcggtgcgaggcaccctgttgtcaaagccatgtgcagacccaccttcagcagccctcaacggcacgggggcatctgcttgtcgaagcggatgatgtgagagcatggtcctgtccccagcacaatgcataccggctctatcattgcgaggccgaacaggtggccgtttgccaatactgctgctattactccggggctcatcaagggcattccgtctgtgatgttgagattaggagaaatgagattcggatgctgatgaagcagcaggacaggttagaagagcgcgaacaggatattgaggaccagctatataaacttgaatccgataagcgcttagtggaagagaaagttaaccagttgaaagaagaagttcgtctacagtacgaaaaactccatcaactgctggatgaggacctccgccagactgtggaagtcttagacaaggcgcaggcgaagttttgctcagaaaacgcggctcaggctctgcacttaggagagcggatgcaagaagctaaaaagttgctgggttctctccagttgctctttgataaaacagaggatgtgagcttcatgaaaaatactaagtccgtcaagattctgatggaccggactcagacgtgcacgtcctctagtttaagcccaacaaaaatcgggcatctgaatagcaaacttttcctcaatgaggtagctaagaaagaaaagcagctgcggaaaatgctggaaggcccgttctccaccccagttccgttcctgcagtctgttcctttatatccctgcggcgtaagcagctcaggcgctgaaaagcgaaaacattctacagcattccctgaggcgtcatttctcgagaccagttctggccctgttggaggacagtacggtgcagcaggcaccgcttcgggggagggtcagagtgggcaaccactcgggccctgcagcagcacgcagcacctggtggcacttccgggcggggcccagcctgtccatagctctccggtgttcccgccaagccagtatccaaacggctccgctgctcagcagccaatgcttccgcagtacggcgggcggaagattctggtgtgcagcgtcgataattgctactgtagctcagttgctaatcatggcggacaccaaccttacccccggtctgggcattttccttggacagtgccctctcaggagtactctcaccccctgccccccacgccttcggtgccccaatctctgcctagcttggccgtgcgggactggttggatgcctcccagcaaccggggcaccaggatttttacagggtatacgggcaaccctctacaaaacattatgtgacctcatag

SEQ ID NO: 220616 - DNA, 1656 bp, Artificial Sequence
  derived and/or modified sequence
atggccgagaactggaagaactgctttgaggaggagctgatctgccccatctgcctgcacgtgtttgtggagcctgtgcagctgccctgcaagcacaacttctgccggggctgcattggagaggcctgggccaaggacagcggcctggtgcgctgcccagagtgcaaccaggcctacaaccagaagccaggcctggagaagaacctgaagctgaccaacatcgtggagaagttcaatgccctgcacgtggagaagcccccagctgccctgcactgtgtgttctgccggcggggcccccccctgcctgcccagaaggtgtgcctgcgctgtgaggccccctgctgccagagccacgtgcagacccacctgcagcagcccagcacagcccggggccacctgctggtggaggctgatgatgtgcgggcctggagctgcccccagcacaatgcctaccgcctgtaccactgtgaggccgagcaggtggccgtgtgccagtactgctgctactacagcggggcccaccagggccacagcgtgtgtgatgtggagatcagaagaaatgagatcaggaagatgctgatgaagcagcaggaccggctggaggagcgggagcaggacatcgaggaccagctgtacaagctggagagtgacaagaggctggtggaggagaaggtgaaccagctgaaggaggaggtgcggctgcagtatgagaagctgcaccagctgctggatgaggacctgcggcagacagtggaggtgctggacaaggcccaggccaagttctgcagtgaaaatgctgcccaggccctgcacctgggggagaggatgcaggaggccaagaagctgctgggcagcctgcagctgctgtttgacaagacagaagatgtgtccttcatgaagaacaccaagtctgtgaagatcctgatggacaggacccagacctgcaccagcagcagcctgagccccaccaagattggccacctgaacagcaagctgttcctgaatgaggtggccaagaaggagaagcagctgaggaagatgctggagggccccttcagcacccctgtgcccttcctgcagagcgtgcccctgtacccctgtggggtgagcagcagcggggctgagaagaggaagcacagcacagccttccctgaggccagcttcctggagaccagcagcggccctgtgggcggccagtacggggctgctggaacagccagcggggagggccagagcggccagcccctgggcccctgcagcagcacccagcacctggtggccctgcctggaggagcccagcctgtgcacagcagccctgtgttcccccccagccagtaccccaacggcagcgctgcccagcagcccatgctgccccagtatggaggcaggaagatcctggtgtgcagcgtggacaactgctactgcagctctgtggccaaccacggcggccaccagccctaccccaggagcggccacttcccctggacagtgcccagccaggagtacagccaccccctgccccccaccccatctgtgccccagagcctgcccagcctggccgtgcgggactggctggatgccagccagcagcccggccaccaggacttctacagagtgtatggccagcccagcaccaagcactacgtgaccagctag

SEQ ID NO: 220617 - DNA, 1653 bp, Artificial Sequence
  derived and/or modified sequence
atggccgagaactggaagaactgctttgaggaggagctgatctgccccatctgcctgcacgtgtttgtggagcctgtgcagctgccctgcaagcacaacttctgccggggctgcattggagaggcctgggccaaggacagcggcctggtgcgctgcccagagtgcaaccaggcctacaaccagaagccaggcctggagaagaacctgaagctgaccaacatcgtggagaagttcaatgccctgcacgtggagaagcccccagctgccctgcactgtgtgttctgccggcggggcccccccctgcctgcccagaaggtgtgcctgcgctgtgaggccccctgctgccagagccacgtgcagacccacctgcagcagcccagcacagcccggggccacctgctggtggaggctgatgatgtgcgggcctggagctgcccccagcacaatgcctaccgcctgtaccactgtgaggccgagcaggtggccgtgtgccagtactgctgctactacagcggggcccaccagggccacagcgtgtgtgatgtggagatcagaagaaatgagatccgcatgctgatgaagcagcaggaccggctggaggagcgggagcaggacatcgaggaccagctgtacaagctggagagtgacaagaggctggtggaggagaaggtgaaccagctgaaggaggaggtgcggctgcagtatgagaagctgcaccagctgctggatgaggacctgcggcagacagtggaggtgctggacaaggcccaggccaagttctgcagtgaaaatgctgcccaggccctgcacctgggggagaggatgcaggaggccaagaagctgctgggcagcctgcagctgctgtttgacaagacagaagatgtgtccttcatgaagaacaccaagtctgtgaagatcctgatggacaggacccagacctgcaccagcagcagcctgagccccaccaagattggccacctgaacagcaagctgttcctgaatgaggtggccaagaaggagaagcagctgaggaagatgctggagggccccttcagcacccctgtgcccttcctgcagagcgtgcccctgtacccctgtggggtgagcagcagtggagctgagaagaggaagcacagcacagccttccctgaggccagcttcctggagaccagcagcggccctgtgggcggccagtatggagctgctggaacagccagcggggagggccagagcggccagcccctgggcccctgcagcagcacccagcacctggtggccctgcccggcggggcccagcctgtgcacagcagccctgtgtttcctcccagccagtacccaaatggatctgctgcccagcagcccatgctgccccagtatggaggcaggaagatcctggtgtgcagcgtggacaactgctactgcagctctgtggccaaccacggcggccaccagccctaccccaggagcggccacttcccctggacagtgcccagccaggagtacagccaccccctgccccccacccccagcgtgccccagagcctgcccagcctggccgtgcgggactggctggatgccagccagcagcccggccaccaggacttctacagagtgtatggccagcccagcaccaagcactacgtgaccagctag

SEQ ID NO: 220618 - DNA, 1656 bp, Artificial Sequence
  derived and/or modified sequence
atggccgagaactggaagaactgcttcgaggaggagctgatctgccccatttgtttacacgtttttgtcgagcccgtgcagcttccctgtaaacacaatttttgtcgaggctgtataggagaagcctgggccaaggacagtggcctggtaagatgcccagaatgtaatcaagcatataatcagaagcccggcctggagaagaatctgaaactgaccaacatcgtggaaaaatttaatgcactgcacgtagagaaacctccagccgccctccactgtgtgttctgccgacgtggaccaccgttgcccgcacagaaggtgtgtttgagatgcgaagccccttgttgtcagtcacacgttcagacacacctgcagcagccaagtacagccaggggccaccttctggttgaggccgatgatgtgcgcgcatggagttgcccgcagcataacgcctacagactgtatcactgcgaggcggagcaggtggcagtgtgtcaatactgctgttattatagcggggctcaccaggggcacagcgtctgcgacgtcgagatcagacggaatgagattcgcaagatgttaatgaagcaacaggaccgattagaagagagggagcaggacatcgaagaccagctgtacaagctggaatctgataagaggctagttgaggagaaggtgaaccaactgaaggaagaggttcggctccaatacgaaaaactgcatcagctgctggatgaggacttacggcagaccgtcgaggtgttggacaaggcccaagccaagttttgctcggaaaatgctgctcaggcgctccaccttggtgagcggatgcaggaggcaaagaaactgctgggctctttacagttgcttttcgacaagacggaggacgtgagctttatgaaaaacacaaagagcgtgaagatcctgatggaccggacacagacgtgtactagctcttccctctcgcccacgaagatcggacatctgaattcaaaactctttcttaacgaagtggcaaagaaagaaaagcaactgcgcaagatgctggaaggtccattctctacgcctgtgcctttcctacagtccgtcccactgtatccttgcggtgtttcctcaagcggggccgagaagcgcaagcatagcactgccttcccagaagctagtttcctggagacctcctccggacctgtgggcgggcagtacggtgccgctggcactgccagcggcgaggggcagtcaggccagccattggggccatgttccagtacccagcacctcgtagccttacccggaggcgcccaacctgtccattcctcacccgtctttcctccgtcacagtatcccaatgggtccgcggcacagcaacccatgctcccccagtacggtggaagaaagatcctggtatgctcagtggacaactgttactgctcctccgtggccaatcacggcggccaccaaccatacccccgttccgggcacttcccttggactgttccatcacaggaatactcacatcctctgccccctactccatctgtaccccagagcctaccttctctggctgttcgtgactggctcgacgccagccagcagcccgggcaccaggacttttaccgggtttacgggcagccctccactaaacactacgtgacatcttag

SEQ ID NO: 220619 - DNA, 1653 bp, Artificial Sequence
  derived and/or modified sequence
atggccgagaactggaagaactgcttcgaggaggagctgatctgccctatatgcttacatgtttttgtcgaacctgtgcagctcccctgcaagcacaatttctgtaggggctgcataggagaagcgtgggctaaggattcagggctcgtgcggtgtccagagtgtaatcaggcatataaccaaaaaccaggcttagagaaaaacctcaagctgaccaatatagttgaaaagttcaacgcgctacatgtggaaaaacctccagccgcactccattgtgtcttttgccgtagggggcctccgcttcctgctcagaaggtctgccttaggtgtgaagcgccatgttgccaaagtcacgtgcaaacccatcttcagcagccttcaacggcccgcggacatctcctcgtggaagctgacgacgttagagcctggagttgtccccagcacaacgcatatagactgtatcactgtgaagcagaacaggtcgctgtgtgtcagtattgctgttactactcgggagctcaccaggggcatagtgtgtgtgatgttgaaatccggaggaatgagatcagaatgttgatgaagcagcaggatagactggaagagagggaacaagatatcgaagatcagttatacaaactcgaatcagacaaaagacttgtggaggagaaggtgaaccagctaaaagaggaggtccggctgcagtatgaaaagctacaccagttattggacgaggatttgcggcaaacggtggaggtgctcgacaaagcccaggccaaattctgttcagaaaacgcagcacaagctctgcacctaggagagaggatgcaagaggcaaaaaagctcctaggcagcctgcaattgctgtttgataaaaccgaggacgtgtcctttatgaaaaatacaaagtcggtgaagattttgatggaccgcactcaaacatgtaccagttcctctctgtccccaacgaaaatcgggcatttaaacagcaaactgtttctcaatgaggtggcgaagaaagagaagcagctgcggaaaatgctcgagggaccattttcgaccccggtgccatttttgcagtccgtgcccctgtatccgtgtggcgtttcctccagtggagccgagaagcgcaagcactccaccgcgtttcctgaagcgtccttcttagagacctcctcgggcccggttggaggccaatatggagccgccggcactgcttctggcgaggggcagtcaggacagccactgggcccatgcagcagcactcagcacctggtggcacttcccggtggggcccagcctgttcacagcagcccagtattccctccctcccagtatcccaacggctccgccgcgcaacaaccaatgttaccccagtatggtggacgcaagatcctggtatgcagtgtggataattgctactgtagtagcgtggcaaatcacggcgggcatcaaccctatcctaggtcaggccattttccatggactgtgcctagccaggaatacagtcaccctctgcctcctacaccgtcggtcccgcagagcctcccctccctcgccgtgagggactggcttgatgcttctcagcaacccggacatcaggatttttaccgtgtgtacggtcagcctagcaccaagcattacgtgactagttag

SEQ ID NO: 220620 - DNA, 1656 bp, Artificial Sequence
  derived and/or modified sequence
atggccgagaactggaagaactgcttcgaggaagagctgatctgtcccatctgtctacatgtctttgtggagcctgttcagcttccgtgtaaacacaatttctgcagagggtgtatcggggaggcgtgggccaaagactctggtctggtcaggtgccccgagtgcaaccaagcatacaatcagaagcctggactggagaaaaatctgaaattaactaatatcgttgagaaattcaatgctttgcacgtggagaaaccacccgctgcacttcactgtgtattctgtcgacggggaccgccactccctgcgcagaaagtgtgtctgcggtgcgaggccccttgttgccagtcccacgttcagacccaccttcaacagccttccaccgccaggggtcatctactggtggaggccgatgatgtccgagcctggtcatgtcctcaacacaacgcttatagattataccattgtgaggcggaacaggtggctgtgtgtcaatattgttgttattattctggagcacaccagggacattcggtgtgtgatgtcgaaatacgtcgaaatgaaatacggaaaatgctgatgaaacagcaagatcgcctggaggaaagagagcaggacatcgaggaccagctctacaagttagagtccgacaagcgcctggttgaggagaaagtgaatcagttgaaggaggaggtgcgccttcagtacgaaaaactccaccagctgttagatgaagaccttagacaaacggtcgaggtcctggataaggcccaggcgaagttttgctccgagaacgctgcccaagcactgcatctgggcgagagaatgcaagaggctaaaaagttactggggtctctgcagctgttgttcgacaaaaccgaagatgtgtccttcatgaaaaatacaaagagcgttaaaatcctcatggataggacacaaacatgcacatcatcctcactctcgcctacaaaaataggccacttgaacagcaaactctttctgaacgaggtggcgaaaaaagagaaacagctccggaagatgcttgaagggccattctctacgcccgtgcccttcctccagtcagtccccctgtacccctgcggggtgtcctcatccggtgcggaaaagagaaagcactctaccgcattccccgaggctagttttctggagacttcgagcggccctgtaggtggccaatatggtgctgcaggtacagcctcaggcgaaggccagtccggacagcctctgggcccttgttcttccactcagcatctggtggcccttcctggcggagctcagccagtgcacagctccccggtgtttcccccatcccagtatccaaatggctcagccgctcagcagccaatgctgcctcagtacgggggacgtaagatcctagtgtgctcagttgacaattgttattgttcttccgtcgctaaccatggcggtcaccagccctaccccagatccgggcatttcccctggacagtaccaagtcaggaatacagccaccccctcccgcctaccccctctgtccctcaaagcttgccctctctggccgtgcgggactggctcgatgcgtcccagcagccaggccatcaggatttctatcgcgtgtacggccagccgtcaaccaagcactatgtcacttcctag

SEQ ID NO: 220621 - DNA, 1653 bp, Artificial Sequence
  derived and/or modified sequence
atggcagaaaactggaagaactgctttgaagaggaacttatttgccccatttgtcttcacgtgtttgtggagcccgtacagctgccttgcaagcacaacttttgtcgcggatgcatcggcgaggcctgggctaaagacagcggcctggtacggtgtcccgaatgtaatcaggcatacaaccagaaaccgggattggagaagaatctaaagttaacaaatattgtggaaaaattcaacgccctgcacgtggagaaaccaccagccgcactccactgcgtgttttgtcgcaggggcccaccgctgcccgcacagaaggtgtgtcttagatgcgaggccccttgttgtcagtcccatgtacagactcacctgcagcagccctcaacagcaagggggcacttgcttgtggaggcagacgatgttcgtgcatggagttgccctcagcataacgcctatagactgtatcactgcgaggctgagcaggtcgccgtgtgccagtattgttgttactacagcggagcccaccaaggtcacagtgtgtgtgacgtggaaatcagaaggaatgagatacgtatgctgatgaagcagcaggaccgtttggaggagcgcgagcaagacatagaggaccagctgtataagctggagtcggataaaagactggtagaggaaaaagtcaatcaactcaaggaagaagttaggctccagtacgagaagctgcaccagctgctcgacgaggacctgagacaaaccgtcgaagttctcgataaggcgcaggccaagttttgttccgagaatgccgcacaggcacttcacctcggcgagcggatgcaggaagcgaagaaactcctggggtctctgcagctgctgtttgataagactgaggatgtgtcattcatgaagaatactaagagcgttaagatcctaatggatcgtacccagacatgtacaagctcttccctctccccgaccaagatcggccatctaaatagtaaactcttcctcaatgaagtggccaaaaaggaaaaacagctccgcaaaatgctcgagggaccatttagcaccccggttcccttcctccagtcagttccactgtacccgtgcggcgtgagtagctcgggcgctgaaaagcgaaaacatagtactgccttcccagaggcctcttttctcgagacctcttccggccctgtcggtgggcagtatggagccgcaggcactgcgtcaggagaagggcagagtggacagccactgggaccgtgctccagtacccaacatctcgtggccctccccggtggcgcacaacccgtgcatagttcacccgtgtttccaccctcacagtaccccaacggtagcgccgcacaacaaccgatgcttccgcaatatgggggtcggaaaatcctggtctgtagcgtcgacaactgctactgttctagcgtggctaaccacgggggacatcagccctacccgcgttctggccattttccatggacagtgccgtcccaggagtactctcatccactcccccctaccccaagtgtgccccagtcattgccatcactggcggtcagggattggctcgacgcgtctcagcagccaggccaccaggatttctaccgggtgtacggacaaccatcgactaaacattacgtcacatcatag

SEQ ID NO: 220622 - DNA, 2742 bp, Artificial Sequence
  derived and/or modified sequence
gagcgaccgtcggggccggctggggccggagctcggggctcggtgggcctacagcggctccggacggacccccggggctggggagtcggggaggcctgccccggccccctgcccgcggccgccatggcggagaattggaagaactgcttcgaggaggagctcatctgccctatctgcctgcacgttttcgtggagccagtgcagctgccgtgcaaacacaacttctgccggggctgcatcggcgaggcgtgggccaaggacagcggcctcgtacgctgcccagagtgcaaccaggcctacaaccagaagccgggcctggagaagaacctgaagctcaccaacatcgtggagaagttcaatgccctgcacgtggagaagccgccggcggcgctgcactgcgtgttctgccgccgcggccccccgctgcccgcgcagaaggtctgcctgcgctgcgaggcgccctgctgccagtcccacgtgcagacgcacctgcagcagccctccaccgcccgcgggcacctcctggtggaggcggacgacgtgcgggcctggagctgcccgcagcacaacgcctaccgcctctaccactgcgaggccgagcaggtggccgtgtgccagtactgctgctactacagcggcgcgcatcagggacactcggtgtgcgacgtggagatccgaaggaatgaaatccggaagatgctcatgaagcagcaggaccggctggaggagcgagagcaggacattgaggaccagctgtacaaactcgagtcagacaagcgcctggtggaggagaaagtgaaccaactgaaggaggaagttcggctgcagtacgagaagctgcaccagctgctggacgaggacctgcggcagacagtggaggtcctagacaaggcccaggccaagttctgcagcgagaacgcagcgcaggcgctgcacctcggggagcgcatgcaggaggccaagaagctgctgggctccctgcagctgctctttgataagacggaggatgtcagcttcatgaagaacaccaagtctgtgaaaatcctgatggacaggacccagacctgcacgagcagcagcctttcccccactaagatcggccacctgaactccaagctcttcctgaacgaagtggccaagaaggagaagcagctgcggaaaatgctagaaggccccttcagcacgccggtgcccttcctgcagagtgtccccctgtacccttgcggcgtgagcagctctggggcggaaaagcgcaagcactcaacggccttcccagaggccagtttcctagagacgtcgtcgggccctgtgggcggccagtacggggcggcgggcacagccagcggtgagggccagtctgggcagcccctggggccctgcagctccacgcagcacttggtggccctgccgggcggcgcccaaccagtgcactcaagccccgtgttccccccatcgcagtatcccaatggctccgccgcccagcagcccatgctcccccagtatggcggccgcaagattctcgtctgttctgtggacaactgttactgttcttccgtggccaaccatggcggccaccagccctacccccgctccggccactttccctggacagtgccctcgcaggagtactcacacccgctcccgcccacaccctccgtcccccagtcccttcccagcctggcggtcagagactggcttgacgcctcccagcagcccggccaccaggatttctacagggtgtatgggcagccgtccaccaaacactacgtgacgagctaacgccacgcaggcggcggggcgctggggaatcttcctccccagcccccgggctcgggagttatgcatccagagacctgcccttctaccttcctcgcctcccctcttcctcattccattgccccaggtcttttccttttggattttgttttggttttggctttgtttttgatttttttttattatgaatctcctggacgcagaggtgacagtgggagctggcctgggccaggacggcaggtggccctggagatgggaaagtgtctgtgtcgaggcgctgagctctctctctgtttctccttttttcctctactccttccccttcacacccccgtggctggaaggaacctcggcttccctgaaagcttgggggtcccacccttcttaccccacccgggaggaacgcccagggccccgggcttgtttctcctcttgttttccttttgggcagtttgatcactgatcgagtaaggaatgacctttagattgtgcgacttttgtttttgtttttttaaatttttttaaaccaagaatgatttctcctgcttccttctcctcaccatcttcccagacggagttcaaaggccacttctcaagcagcttttggcaccttcagcctcagagtggaatcttttaaagacaggacccctatgtccaggaaaggggaaaaggaactttgccaatgatagtgaccacagcaaaagcaaataataataatattaataataataaagagaaataaaataataaaataaaaaacaatagcacagcccttgttgaggtcagcagggaggaggggctgcccggagttgggtccttgcctggattttgacacagcaacttcctgtagtgagcactttgtatgaatcgtggacttcctgttctcaaggcgcaggtatttattctgtatctgtctagagcacacaccaaaatccaaccttctaataaacatgatggcgcagtccc

SEQ ID NO: 220623 - DNA, 2828 bp, Artificial Sequence
  derived and/or modified sequence
agcgaccgtcggggccggctggggccggagctcggggctcggtgggcctacagcggctccggacggacccccggggctggggagtcggggaggcctgccccggccccctgcccgcggccgccatggcggagaattggaagaactgcttcgaggaggagctcatctgccctatctgcctgcacgttttcgtggagccagtgcagctgccgtgcaaacacaacttctgccggggctgcatcggcgaggcgtgggccaaggacagcggcctcgtacgctgcccagagtgcaaccaggcctacaaccagaagccgggcctggagaagaacctgaagctcaccaacatcgtggagaagttcaatgccctgcacgtggagaagccgccggcggcgctgcactgcgtgttctgccgccgcggccccccgctgcccgcgcagaaggtctgcctgcgctgcgaggcgccctgctgccagtcccacgtgcagacgcacctgcagcagccctccaccgcccgcgggcacctcctggtggaggcggacgacgtgcgggcctggagctgcccgcagcacaacgcctaccgcctctaccactgcgaggccgagcaggtggccgtgtgccagtactgctgctactacagcggcgcgcatcagggacactcggtgtgcgacgtggagatccgaaggaatgaaatccggatgctcatgaagcagcaggaccggctggaggagcgagagcaggacattgaggaccagctgtacaaactcgagtcagacaagcgcctggtggaggagaaagtgaaccaactgaaggaggaagttcggctgcagtacgagaagctgcaccagctgctggacgaggacctgcggcagacagtggaggtcctagacaaggcccaggccaagttctgcagcgagaacgcagcgcaggcgctgcacctcggggagcgcatgcaggaggccaagaagctgctgggctccctgcagctgctctttgataagacggaggatgtcagcttcatgaagaacaccaagtctgtgaaaatcctgatggacaggacccagacctgcacgagcagcagcctttcccccactaagatcggccacctgaactccaagctcttcctgaacgaagtggccaagaaggagaagcagctgcggaaaatgctagaaggccccttcagcacgccggtgcccttcctgcagagtgtccccctgtacccttgcggcgtgagcagctctggggcggaaaagcgcaagcactcaacggccttcccagaggccagtttcctagagacgtcgtcgggccctgtgggcggccagtacggggcggcgggcacagccagcggtgagggccagtctgggcagcccctggggccctgcagctccacgcagcacttggtggccctgccgggcggcgcccaaccagtgcactcaagccccgtgttccccccatcgcagtatcccaatggctccgccgcccagcagcccatgctcccccagtatggcggccgcaagattctcgtctgttctgtggacaactgttactgttcttccgtggccaaccatggcggccaccagccctacccccgctccggccactttccctggacagtgccctcgcaggagtactcacacccgctcccgcccacaccctccgtcccccagtcccttcccagcctggcggtcagagactggcttgacgcctcccagcagcccggccaccaggatttctacagggtgtatgggcagccgtccaccaaacactacgtgacgagctaacgccacgcaggcggcggggcgctggggaatcttcctccccagcccccgggctcgggagttatgcatccagagacctgcccttctaccttcctcgcctcccctcttcctcattccattgccccaggtcttttccttttggattttgttttggttttggctttgtttttgatttttttttattatgaatctcctggacgcagaggtgacagtgggagctggcctgggccaggacggcaggtggccctggagatgggaaagtgtctgtgtcgaggcgctgagctctctctctgtttctccttttttcctctactccttccccttcacacccccgtggctggaaggaacctcggcttccctgaaagcttgggggtcccacccttcttaccccacccgggaggaacgcccagggccccgggcttgtttctcctcttgttttccttttgggcagtttgatcactgatcgagtaaggaatgacctttagattgtgcgacttttgtttttgtttttttaaatttttttaaaccaagaatgatttctcctgcttccttctcctcaccatcttcccagacggagttcaaaggccacttctcaagcagcttttggcaccttcagcctcagagtggaatcttttaaagacaggacccctatgtccaggaaaggggaaaaggaactttgccaatgatagtgaccacagcaaaagcaaataataataatattaataataataaagagaaataaaataataaaataaaaaacaatagcacagcccttgttgaggtcagcagggaggaggggctgcccggagttgggtccttgcctggattttgacacagcaacttcctgtagtgagcactttgtatgaatcgtggacttcctgttctcaaggcgcaggtatttattctgtatctgtctagagcacacaccaaaatccaaccttctaataaacatgatggcgcagtcccactccctgcctcgcctgttcccctatcccccccaggcctgggatcttcaggcgtcggtgtggggaggggcccctgccctccttgccttga

SEQ ID NO: 220624 - protein, 63 aa, Artificial Sequence
  derived and/or modified sequence
MAAPLSVEVEFGGGAELLFDGIKKHRVTLPGQEEPWDIRNLLIWIKKNLLKERPELFIQGDSV

SEQ ID NO: 220625 - protein, 101 aa, Artificial Sequence
  derived and/or modified sequence
MAAPLSVEVEFGGGAELLFDGIKKHRVTLPGQEEPWDIRNLLIWIKKNLLKERPELFIQGDSVRPGILVLINDADWELLGELDYQLQDQDSVLFISTLHGG

SEQ ID NO: 220626 - DNA, 306 bp, Artificial Sequence
  derived and/or modified sequence
atggccgcccccctgagcgtggaggtggagttcggcggcggcgccgagctgctgttcgacggcatcaagaagcacagagtgaccctgcccggccaggaggagccctgggacatcagaaacctgctgatctggatcaagaagaacctgctgaaggagagacccgagctgttcatccagggcgacagcgtgagacccggcatcctggtgctgatcaacgacgccgactgggagctgctgggcgagctggactaccagctgcaggaccaggacagcgtgctgttcatcagcaccctgcacggcggctag

SEQ ID NO: 220627 - DNA, 306 bp, Artificial Sequence
  derived and/or modified sequence
atggctgcccccctaagcgtcgaggtggagtttggagggggggcggaattattgttcgatggtatcaagaaacaccgcgtaaccctccctgggcaagaggagccatgggacattaggaatcttcttatatggatcaagaagaacctgttgaaagagaggccggaactattcatccagggcgactctgttcggcctgggatcctcgttctcattaatgatgccgactgggaactgctgggcgagctggattaccaactacaagaccaggacagcgtcctgttcatcagtacactgcacggggggtag

SEQ ID NO: 220628 - DNA, 306 bp, Artificial Sequence
  derived and/or modified sequence
atggccgcccccctgtctgtggaggtggagtttggaggcggcgctgagctgctgtttgatggcatcaagaagcaccgggtgaccctgcccggccaggaggagccctgggacatccggaacctgctgatctggatcaagaagaacctgctgaaggagaggcctgagctgttcatccagggcgacagcgtgcggcccggcatcctggtgctgatcaatgatgctgactgggagctgctgggggagctggactaccagctgcaggaccaggacagcgtgctcttcatcagcaccctgcatggaggatag

SEQ ID NO: 220629 - DNA, 306 bp, Artificial Sequence
  derived and/or modified sequence
atggccgcccccctgagcgtggaggtggagttcggcggcggcgccgagttgctgttcgacggcatcaagaaacaccgggtaactcttcccggacaggaggagccatgggacatccgcaatttgcttatctggattaaaaaaaacctgttaaaggaaaggcccgaactgtttatccagggggattcagtgcgcccggggatcctagtattgattaatgacgcagactgggaactgctcggagaactggactaccaactgcaggatcaagacagcgtattattcatctccactctccacggcggctag

SEQ ID NO: 220630 - DNA, 306 bp, Artificial Sequence
  derived and/or modified sequence
atggcagcccctctctctgtcgaagtagagttcggtggcggtgccgagcttctcttcgatggcatcaagaagcacagggtcacgcttccaggacaggaagagccctgggacattaggaatctgctgatttggatcaagaaaaacttgctaaaagagaggcccgaattgttcatccagggcgatagcgtgcgccctggaatcttggtcctaatcaacgacgccgattgggagttgctgggagaattagattatcagttgcaggatcaggatagcgtgctgttcatctccactcttcacggcggatag

SEQ ID NO: 220631 - DNA, 1368 bp, Artificial Sequence
  derived and/or modified sequence
ccggaaatttgcgggcgcgccggaagttgaggggagtttcctgcgagctcggcttcctcaacatggctgcgcccttgtcagtggaggtggagttcggaggtggtgcggagctcctgtttgacggtattaagaaacatcgagtcactttgcctggacaggaggaaccctgggacatccggaacctgctcatctggatcaagaagaatttgctaaaagagcggccagagttgttcatccagggagacagcgtgcggccaggaattctggtgctgattaacgatgccgactgggagctactgggtgagctggactaccagcttcaggaccaggacagcgtcctcttcatctccactctgcacggcggctgagggcccttctctgggcctgggcacccttagaggggagaacgaagcaatcagacatccccttgggccctgcttccaggtctccctgtcccccttgcctgccttcttccctgctctgtcccctaagctccctccaggcagggaaaagaggccaggtgctaaaaatgagcctttctcaagcacgtgagcagcggaaggcagacaggcgccagagcccagcactcccttttccagcagctgtggtgggggagggttcccctccagtttgtcaagagttgaaggaggctctgtggccaggtgacctggctgccttccactccttgtacctcagtctaaacatggagtggccgctgacaaggcgctccagccccagagccagcgtcttcatggggaagatgaatggacctgagtagctgaaggaaggcccctccctacccaaagactggaggcttctcagcctcaatttccctgtctgtacagctgagggctctgcctgtcccccactgctatcagtatggaaccccagctggggtcccctattgagtgccgactccccccaccgccagcagctgctcctccagccacacccctcctgctccccccacccctagcccttgaccctggctggcctgccccgctccacaggccaccagatgggctcctgagaccctccccaggctgcttacagctcattctgctgggggtagagatgaggggagggagtaagttaaaccttggactagcaagtagaagcctggggggatgcgtgtgcctcagtttcctcctccacaactgaatatagtggctgaaaactggggagatacttgatggcgcgaatgtccgttttctctcccttcccacctcctgcaggaagcaggacggggcaggcagcacctggtaggcacagtgctttgcccctcctccccttcccttctggaagtcttggggcctcagtgcttgcaacagccggccttgggcaaataaaagactaggttgtttacta

SEQ ID NO: 220632 - protein, 105 aa, Artificial Sequence
  derived and/or modified sequence
MSIYFPIHCPDYLRSAKMTEVMMNTQPMEEIGLSPRKDGLSYQIFPDPSDFDRCCKLKDRLPSIVVEPTEGEVESGELRWPPEEFLVQEDEQDNCEETAKENKEQ

SEQ ID NO: 220633 - DNA, 318 bp, Artificial Sequence
  derived and/or modified sequence
atgtctatctatttccctatccactgtcccgattatctcaggtcggccaaaatgaccgaggttatgatgaacacccaaccgatggaggagatcggactgagcccaaggaaagacggactctcctatcaaattttcccggatccatccgacttcgaccgatgctgcaagctcaaggaccggttgcctagtatcgtagtagagcctaccgagggggaagtggaaagcggagagcttcgctggcctccagaggaatttctcgtgcaggaggatgagcaggataattgtgaggaaactgcaaaagagaacaaagagcagtag

SEQ ID NO: 220634 - DNA, 318 bp, Artificial Sequence
  derived and/or modified sequence
atgagcatctacttccccatccactgcccagactacctgcggagcgccaagatgacagaggtgatgatgaacacccagcccatggaggagatcggcctgagccccaggaaggatggcctgagctaccagatcttcccagaccccagcgactttgaccgctgctgcaagctgaaggaccggctgcccagcatcgtggtggagcccacagaaggagaggtggagagcggggagctgcgctggcccccagaggagttcctggtgcaggaggatgagcaggacaactgtgaggagacagccaaggagaacaaggagcagtag

SEQ ID NO: 220635 - DNA, 2933 bp, Artificial Sequence
  derived and/or modified sequence
ggggctgagtgctcagtggagagcggggagttgtgtccaccttgccgacgtcgctagccgtggggctgtcctgggaaggcggacggcgagcgcccggtgtccgcactcggccgcctgccgtgcccgtctgcgcccgtgtcatcctcactcgggacgcagggaccgtttttaaatcacaggggcgtgtgtcagcctgccctaggacttcatgtctatatatttccccattcactgccccgactatctgagatcggccaagatgactgaggtgatgatgaacacccagcccatggaggagatcggcctcagcccccgcaaggatggcctttcctaccagatcttcccagacccgtcagattttgaccgctgctgcaaactgaaggaccgtctgccctccatagtggtggaacccacagaaggggaggtggagagcggggagctccggtggccccctgaggagttcctggtccaggaggatgagcaagataactgcgaagagacagcgaaagaaaataaagagcagtagagtccctgtggactcccatgggtcataccagccagcatctgttcctgaactgtgtttttcccatcatgacggaagaagagagtgagccgcaattgttctgaaaatgtcaaacgaggcttctgttttgcacctgcagatcaccgagttggttttcttttcttttcttgcctttttttttttttgaaatttgccgagcagtggagccctctgacaatttgcaaggccctctgagaaaggaagctgcttagagccagggggttagtgggtgaggggagcgagtgctgtttttgagatcattatctgaactcaggcagcctagtagaggcagtggtgggattccaatgggtcttggtgggtgggaggtggggcatgtgcaaagcaagcaaggaacatttggggtaagaaaacaaacatgaggcaaaagaaaaaatacatgtttttaagaaaacattgagcagagaactgcagccaggatgcgctcagcagacattcactctggctgctgggacatcagaaaacaaagtcttcatctctctctccagtttcacccaccccaccctttgctttcatttcaggtgtgttggtctatatgacagggaggagagtaaaggagagcaggagcaattggctgcctgcaaagccagctggaggtgaagtgcaggaaaggaaaggtcaccccattctactccatggcctctctgctcccagctgtggtaggctcacatagccagtgtgatcggtttttaagaggcagtgcttttcagcttttctccctgatatatccattttgcttcccagcactttttaggagtagtgagagcacttcctgcccttgttggaagccccagggtggacactcagcacgaaggtctctcccttaactgctgcccttccaagacttgctcccgagatggagtgggcgtggtcttccaggctggcccttccttctcctcaccgccaccttccctgccccagccccagcagccatgggtacatgggtccccagctcacctatggattcccgccagtctgcccagctgcagtactcacgccccatgggggatcttggtctgtttttcttgtgggagcctagtggagagcagacgtggctttttatgtgtcttgttggggaggtgacttgcatggtggggacaaggctgtcgtggcaaccttgggatcgagtttgagactaaaggatgtcatgagatccctggcttctccccatgttgttcccggacaagggcagaagggaggcatggcaagggacctctgctgtccttactcaacagtggtcctcatccctccccacctcccactgcttcctgcaagggcaccagttgtatgagaaagttggcctttggacttaggatttcttattgtagctaagagccatctgaagcagcaggttgcaggacaaatgcttcagtccgccgagagcagtaccgtgtggccaagaggtggactcagagccttccttgagctaaactcggccaaccaaggcacgcagcatgtcccctcaggtctccagtcagtccaggttgaccctcagttctggacgtgtgtatatagctgtatttaatacctcaaggtcattgtggctctggggatgccggggcaggaggacgagggtgcgctgtggacacagcagtccgcggaattccgttctgggaagccaatggtcgccggcaccccttgcttcctccctctgttgtctgcctgtgtgacacacatcaatggcaataacttcttccaactcctcgcagaagtgggagaggccggcagcctgcaccgagaggggctttcctctctcttgctccccgcttcgttctgttttggctgcagagagtggttcatccatactctcattccctcgcctccccttgtggacgggggtcttgccttttcaattcctgtgttttggtgtcttcccttatctgctaccctgaatcacctgtcctggtcttgctgtgtgatgggaacatgcttgtaaactgcgtaacaaatctactttgtgtatgtgtctgtttatgggggtggtttattatttttgctggtccctagaccactttgtatgaccgtttgcagtctgagcaggccaggggctgacagctaatgtcaggaccctcagcggtggagcctgctggggggacccagctgctcttggacaagtggctgagctcctatctggcctcctctttttttttttttcaagtaatttgtgtgtatttctaactgattgtattgaaaaaattcctagtatttcagtaaaaatgcctgttgtgagatgaacctcctgtaacttctatctgttcttttttgaggctcagggagaaactagcatttttttttttccaaactactttttgtcactgtgacagttgtaaataaagtttgaaaatgctttcca

SEQ ID NO: 220636 - DNA, 318 bp, Artificial Sequence
  derived and/or modified sequence
atgagcatctacttccccatccactgccccgactacctgcggagcgcaaaaatgacagaggtgatgatgaatacacagccaatggaagaaatcggcttgagcccccgtaaagacgggctttcttaccaaatcttcccagacccttcagatttcgaccgatgctgcaagctgaaagacagattacctagcattgtggtggaaccaacggaaggggaagtggaaagcggcgagctgcgctggcccccagaggagtttctggtccaggaggatgaacaggacaactgcgaagaaacagcgaaagagaataaggaacagtag

SEQ ID NO: 220637 - DNA, 318 bp, Artificial Sequence
  derived and/or modified sequence
atgtccatatacttcccaatccactgtcccgactaccttagaagcgcaaaaatgaccgaagttatgatgaatacccagcctatggaagagattgggctttctccgaggaaggatggcctctcctaccagatcttccctgacccctcagatttcgatcgttgttgcaaactcaaggatcgtcttccaagcatcgtggtagaacccacagagggggaggtagagtccggcgagctccggtggccgcctgaggagtttttggtccaggaggacgagcaggataattgcgaagaaacagccaaagaaaataaggagcagtag

SEQ ID NO: 220638 - DNA, 318 bp, Artificial Sequence
  derived and/or modified sequence
atgagcatctacttccccatccactgccccgactacctgagaagcgccaagatgaccgaggtgatgatgaacacccagcccatggaggagatcggcctgagccccagaaaggacggcctgagctaccagatcttccccgaccccagcgacttcgacagatgctgcaagctgaaggacagactgcccagcatcgtggtggagcccaccgagggcgaggtggagagcggcgagctgagatggccccccgaggagttcctggtgcaggaggacgagcaggacaactgcgaggagaccgccaaggagaacaaggagcagtag

SEQ ID NO: 220639 - protein, 510 aa, Artificial Sequence
  derived and/or modified sequence
MPLSLGAEMWGPEAWLLLLLLLASFTGRCPAGELETSDVVTVVLGQDAKLPCFYRGDSGEQVGQVAWARVDAGEGAQELALLHSKYGLHVSPAYEGRVEQPPPPRNPLDGSVLLRNAVQADEGEYECRVSTFPAGSFQARLRLRVLVPPLPSLNPGPALEEGQGLTLAASCTAEGSPAPSVTWDTEVKGTTSSRSFKHSRSAAVTSEFHLVPSRSMNGQPLTCVVSHPGLLQDQRITHILHVSFLAEASVRGLEDQNLWHIGREGAMLKCLSEGQPPPSYNWTRLDGPLPSGVRVDGDTLGFPPLTTEHSGIYVCHVSNEFSSRDSQVTVDVLDPQEDSGKQVDLVSASVVVVGVIAALLFCLLVVVVVLMSRYHRRKAQQMTQKYEEELTLTRENSIRRLHSHHTDPRSQPEESVGLRAEGHPDSLKDNSSCSVMSEEPEGRSYSTLTTVREIETQTELLSPGSGRAEEEEDQDEGIKQAMNHFVQENGTLRAKPTGNGIYINGRGHLV

SEQ ID NO: 220640 - DNA, 1533 bp, Artificial Sequence
  derived and/or modified sequence
atgcctctttccctgggcgcagaaatgtggggcccggaagcttggctcctgctacttttgctgctcgccagtttcacaggccgctgtccggccggcgagttagagacatcggatgtggtgactgtggtgctggggcaggacgcaaaactgccatgtttctaccgcggcgactcaggcgagcaggtcggacaggtggcctgggcaagagtcgacgctggcgaaggcgctcaggaacttgcactgctgcactccaagtacggccttcatgtgtcacctgcgtatgagggtagagtagaacagccacctccccccagaaatcctctcgacgggtcagtgctgctccggaacgcagtgcaggccgatgagggcgagtacgaatgccgagtaagtacttttcccgccggctcattccaggcccgtttgcgcctgagagtcctcgtgccaccattgcccagcctaaatcctggacctgccctggaggagggtcagggccttacactcgcagccagttgtacggctgaggggtcgcccgcaccatccgtaacatgggacacggaggtgaaaggtaccaccagtagtagaagcttcaaacattcacggagcgctgcagtcacaagcgagtttcacctggtgccttcaaggagcatgaacggacagccactgacttgtgtggtgagccatccagggcttttgcaagatcagcgtatcactcatatcctgcacgtttcatttctcgccgaggcatctgtgcggggactggaagatcagaatctgtggcacataggtagagagggcgctatgctgaagtgtctgtccgagggccagccacctccttcctataattggacccgactggacgggcccctccccagtggcgttcgtgtcgatggagatacgctgggattcccgcccctgacaacggagcactctggcatatatgtctgtcacgtgtcgaacgagtttagcagcagagacagccaggtgactgttgatgtcctcgatccccaggaagattccggaaagcaggtcgatttggtctcagcgagcgtggtcgtggtcggagtaatagccgcccttctgttctgtctgctggttgtcgtggtggtcctcatgtctagataccaccgacgaaaagcgcaacagatgactcagaagtatgaagaagagctcactttgacacgggagaattctataagacggcttcatagccaccatacagaccccagatctcagcccgaagagtccgttgggctgagggcagaaggacaccctgattctcttaaagacaactcttcatgttctgtcatgagcgaggagcccgagggccggtcctatagcaccctgacaacagtgcgagagatcgagactcaaaccgaattgctaagcccagggagcggccgggctgaagaagaggaggaccaagatgaggggatcaagcaagcaatgaatcattttgtgcaggagaatggtactcttcgcgcaaagccaaccggcaacggaatatatatcaatggcagaggccacctcgtgtag

SEQ ID NO: 220641 - DNA, 1533 bp, Artificial Sequence
  derived and/or modified sequence
atgcccctgagcctgggcgctgagatgtggggccctgaggcctggctgctgctgctgctgctgctggccagcttcaccggccgctgcccagctggggagctggagaccagtgatgtggtgacagtggtgctgggccaggatgccaagctgccctgcttctacagaggagacagcggggagcaggtgggccaggtggcctgggcccgggtggatgctggggagggcgcccaggagctggccctgctgcacagcaaatatggcctgcacgtgtccccagcctatgagggccgggtggagcagcccccacctccaagaaaccccctggatggctctgtgctgctgagaaatgctgtgcaggctgatgaaggagaatatgagtgccgggtgtccaccttccctgctggcagcttccaggcccggctgcggctgcgggtgctggtgccccccctgcccagcctgaaccctggccctgccctggaggagggccagggcctgaccctggccgccagctgcacagctgagggcagccctgcccccagcgtgacctgggacacagaggtgaagggcaccaccagcagccgctccttcaagcacagccgctctgctgctgtgaccagcgagttccacctggtgcccagccgctccatgaatggccagcccctgacctgtgtggtgagccaccctggcctgctgcaggaccagaggatcacccacatcctgcacgtgtccttcctggccgaggcctctgtgcggggcctggaggaccagaacctgtggcacatcggccgggagggcgccatgctgaagtgcctgtctgagggccagcccccacccagctacaactggacccggctggatggccccctgcccagcggcgtgcgggtggatggagacaccctgggcttcccccccctgaccacagagcacagcggcatctacgtgtgccacgtgtccaatgagttcagcagccgggacagccaggtgacagtggatgtgctggacccccaggaggacagcggcaagcaggtggacctggtgtctgcctctgtggtggtggtgggcgtgattgctgccctgctcttctgcctgctggtggtggtggtggtgctgatgagccgctaccacaggaggaaggcccagcagatgacccagaagtatgaggaggagctgaccctgaccagagaaaattccatccggcggctgcacagccaccacacagaccccaggagccagcctgaggagagcgtgggcctgcgggcagagggccacccagacagcctgaaggacaacagcagctgcagcgtgatgtctgaggagcctgagggccgcagctacagcaccctgaccaccgtgcgggagattgagacccagacagagctgctgagccctggcagcggccgggcagaggaggaggaggaccaggatgagggcatcaagcaggccatgaaccactttgtgcaggagaatggcaccctgcgggccaagcccactggaaatggcatctacatcaatggccggggccacctggtgtag

SEQ ID NO: 220642 - DNA, 1533 bp, Artificial Sequence
  derived and/or modified sequence
atgcccctgagcctgggcgccgagatgtggggccccgaggcctggctccttttattgctattgctcgcatcgttcaccggaagatgtcctgccggcgaacttgagacgtcagacgtagtgacggtggtactgggccaggatgccaagcttccctgcttctacagaggtgactcgggtgagcaggtgggacaggtggcctgggccagggtggatgccggcgaaggcgcacaggaactcgcccttctccattccaaatatggactccatgtgagtcctgcttatgagggccgggtggagcaaccgccccccccacgcaacccactggatggctcagtgcttctgcggaatgctgtacaggccgacgagggcgagtatgaatgccgagtgagtacctttcccgcagggagtttccaggcccgactgcgcctgagagtgctggtgcccccactgccttcattaaaccctggtcccgcgctggaagaagggcagggcctgactctcgccgctagctgcaccgctgaaggatcccctgctccttctgtgacctgggatactgaagtgaaggggaccacgtcgagtcgctcattcaagcactccaggagtgccgcggtaacttcagagtttcacctggttccgagcagatcaatgaacgggcagccactcacctgcgtcgtatctcacccaggcctcctgcaggatcagcgcataacacatattctgcatgttagttttctggcagaggccagtgtgcgagggctagaggaccaaaacctctggcacataggcagagagggagcgatgctgaagtgccttagcgagggccagcccccaccctcttataactggaccaggttggatggacccctgccgagtggggtgcgcgtggatggcgataccttggggtttccccctctaaccactgagcattcaggaatctatgtatgccatgtaagcaatgagttctcttctcgagattctcaggtgactgttgacgtgctggaccctcaggaggacagtggtaaacaggtggatttagtgtccgcctctgtggtggtcgtcggggtcatagcagccctgctgttctgcctcctggtggtcgtggttgtgttaatgagtcgttatcacaggcggaaggcccaacaaatgacacagaagtacgaagaagagctaaccctcactagagaaaacagcattaggcggcttcacagccaccacaccgatcccaggtctcaacctgaagagtcagtgggtctaagagccgaaggtcatcccgactccctgaaagacaacagctcatgtagcgtgatgtccgaggagcccgagggacgcagttactcaacacttactaccgtccgcgagatcgaaactcagaccgagctgctgtctccaggttcgggcagagcggaagaggaggaagaccaggatgaaggtatcaaacaggcgatgaaccacttcgtgcaggaaaacggaaccctacgtgctaagcccaccggcaatggcatttacatcaatggtcgaggccacctggtctag

SEQ ID NO: 220643 - DNA, 3502 bp, Artificial Sequence
  derived and/or modified sequence
acgcacctgttctgacctgctgagcaggttcccaggtttctgccgtcgttgttggccacagcgtgggaagcagctctgggggagctcggagctcccgatcacggcttcttgggggtagctacggctgggtgtgtagaacggggccggggctggggctgggtcccctagtggagacccaagtgcgagaggcaagaactctgcagcttcctgccttctgggtcagttccttattcaagtctgcagccggctcccagggagatctcggtggaacttcagaaacgctgggcagtctgcctttcaaccatgcccctgtccctgggagccgagatgtgggggcctgaggcctggctgctgctgctgctactgctggcatcatttacaggccggtgccccgcgggtgagctggagacctcagacgtggtaactgtggtgctgggccaggacgcaaaactgccctgcttctaccgaggggactccggcgagcaagtggggcaagtggcatgggctcgggtggacgcgggcgaaggcgcccaggaactagcgctactgcactccaaatacgggcttcatgtgagcccggcttacgagggccgcgtggagcagccgccgcccccacgcaaccccctggacggctcagtgctcctgcgcaacgcagtgcaggcggatgagggcgagtacgagtgccgggtcagcaccttccccgccggcagcttccaggcgcggctgcggctccgagtgctggtgcctcccctgccctcactgaatcctggtccagcactagaagagggccagggcctgaccctggcagcctcctgcacagctgagggcagcccagcccccagcgtgacctgggacacggaggtcaaaggcacaacgtccagccgttccttcaagcactcccgctctgctgccgtcacctcagagttccacttggtgcctagccgcagcatgaatgggcagccactgacttgtgtggtgtcccatcctggcctgctccaggaccaaaggatcacccacatcctccacgtgtccttccttgctgaggcctctgtgaggggccttgaagaccaaaatctgtggcacattggcagagaaggagctatgctcaagtgcctgagtgaagggcagccccctccctcatacaactggacacggctggatgggcctctgcccagtggggtacgagtggatggggacactttgggctttcccccactgaccactgagcacagcggcatctacgtctgccatgtcagcaatgagttctcctcaagggattctcaggtcactgtggatgttcttgacccccaggaagactctgggaagcaggtggacctagtgtcagcctcggtggtggtggtgggtgtgatcgccgcactcttgttctgccttctggtggtggtggtggtgctcatgtcccgataccatcggcgcaaggcccagcagatgacccagaaatatgaggaggagctgaccctgaccagggagaactccatccggaggctgcattcccatcacacggaccccaggagccagccggaggagagtgtagggctgagagccgagggccaccctgatagtctcaaggacaacagtagctgctctgtgatgagtgaagagcccgagggccgcagttactccacgctgaccacggtgagggagatagaaacacagactgaactgctgtctccaggctctgggcgggccgaggaggaggaagatcaggatgaaggcatcaaacaggccatgaaccattttgttcaggagaatgggaccctacgggccaagcccacgggcaatggcatctacatcaatgggcggggacacctggtctgacccaggcctgcctcccttccctaggcctggctccttctgttgacatgggagattttagctcatcttgggggcctccttaaacacccccatttcttgcggaagatgctccccatcccactgactgcttgacctttacctccaacccttctgttcatcgggagggctccaccaattgagtctctcccaccatgcatgcaggtcactgtgtgtgtgcatgtgtgcctgtgtgagtgttgactgactgtgtgtgtgtggaggggtgactgtccgtggaggggtgactgtgtccgtggtgtgtattatgctgtcatatcagagtcaagtgaactgtggtgtatgtgccacgggatttgagtggttgcgtgggcaacactgtcagggtttggcgtgtgtgtcatgtggctgtgtgtgacctctgcctgaaaaagcaggtattttctcagaccccagagcagtattaatgatgcagaggttggaggagagaggtggagactgtggctcagacccaggtgtgcgggcatagctggagctggaatctgcctccggtgtgagggaacctgtctcctaccacttcggagccatgggggcaagtgtgaagcagccagtccctgggtcagccagaggcttgaactgttacagaagccctctgccctctggtggcctctgggcctgctgcatgtacatattttctgtaaatatacatgcgccgggagcttcttgcaggaatactgctccgaatcacttttaatttttttcttttttttttcttgccctttccattagttgtattttttatttatttttatttttatttttttttagagatggagtctcactatgttgctcaggctggccttgaactcctgggctcaagcaatcctcctgcctcagcctccctagtagctgggactttaagtgtacaccactgtgcctgctttgaatcctttacgaagagaaaaaaaaaattaaagaaagcctttagatttatccaatgtttactactgggattgcttaaagtgaggcccctccaacaccagggggttaattcctgtgattgtgaaaggggctacttccaaggcatcttcatgcaggcagccccttgggagggcacctgagagctggtagagtctgaaattagggatgtgagcctcgtggttactgagtaaggtaaaattgcatccaccattgtttgtgataccttagggaattgcttggacctggtgacaagggctcctgttcaatagtggtgttggggagagagagagcagtgattatagaccgagagagtaggagttgaggtgaggtgaaggaggtgctgggggtgagaatgtcgcctttccccctgggttttggatcactaattcaaggctcttctggatgtttctctgggttggggctggagttcaatgaggtttatttttagctggcccacccagatacactcagccagaatacctagatttagtacccaaactcttcttagtctgaaatctgctggatttctggcctaagggagaggctcccatccttcgttccccagccagcctaggacttcgaatgtggagcctgaagatctaagatcctaacatgtacattttatgtaaatatgtgcatatttgtacataaaatgatattctgtttttaaataaacagacaaaacttgttc

SEQ ID NO: 220644 - DNA, 1533 bp, Artificial Sequence
  derived and/or modified sequence
atgcctctcagcctgggcgctgagatgtgggggccagaggcttggcttctgctccttttgctgctggcctcatttacagggaggtgtcctgccggtgaactcgaaacctctgacgttgtgaccgtcgtgctgggacaagatgctaagctgccatgtttttacagaggcgactcaggcgagcaagtgggacaagtggcctgggcccgtgtcgatgccggagaaggcgcacaggagctggccctcttgcactccaaatatggtctccacgtcagtccagcctatgagggccgtgtggaacagccaccacccccacgcaaccctcttgacggaagtgtgctcctcagaaacgccgtgcaggccgatgagggtgagtacgagtgtcgcgtcagcacgtttccagcaggttctttccaggccaggctccgtctacgcgtcctcgtgccccctctgccaagtttgaaccctgggccagccctggaagaaggccaaggactgactctcgcagcctcctgcactgccgagggtagtcctgctcccagcgtgacctgggacactgaggtcaaaggcaccaccagcagcagaagcttcaagcactccaggagcgcagctgttacctcagaattccacttagtcccaagcaggtccatgaatggccaaccgctgacatgtgtggtgtcacatccgggactgctgcaggaccagcggattactcatatactgcatgtgtcattcctggccgaggcatcggtgcgcggtctagaggaccaaaatctgtggcatatcggccgagagggggctatgctgaaatgtctttcggaggggcagccaccgccatcctataactggaccagactcgacggcccattaccctctggcgttcgggtggatggcgatactcttgggttcccccctcttactaccgagcactcgggcatttatgtgtgtcacgttagcaacgaattcagctccagggactctcaggttactgtagatgtgctagatccacaggaggactctgggaaacaggtcgaccttgtttctgcatctgtagtggtggtcggggtgatcgccgctctgttgttttgcctgctggtcgtcgtggtggtgctgatgtctaggtaccataggcggaaggcacagcagatgactcagaaatatgaggaagagctgacattaactcgcgagaatagtattcggagacttcacagccaccacacggacccaaggtctcagcccgaggaatctgtgggtctgcgggcagagggccatccagattcactgaaggacaactcatcctgcagcgttatgagcgaggaacctgaaggacgctcctactctactctcaccacagtaagagagatcgaaacgcagacagaattgctctctcccggatccgggagggccgaagaggaggaagaccaggacgaagggattaagcaggccatgaaccactttgtccaagagaatggtacacttagggcaaaacccaccggaaatggtatctatattaacggcagagggcacctggtgtag

SEQ ID NO: 220645 - DNA, 1533 bp, Artificial Sequence
  derived and/or modified sequence
atgcccctgagcctgggcgccgagatgtggggccccgaggcctggctgctgctgctgctgctgctggccagcttcaccggcagatgccccgccggcgagctggagaccagcgacgtggtgaccgtggtgctgggccaggacgccaagctgccctgcttctacagaggcgacagcggcgagcaggtgggccaggtggcctgggccagagtggacgccggcgagggcgcccaggagctggccctgctgcacagcaagtacggcctgcacgtgagccccgcctacgagggcagagtggagcagccccccccccccagaaaccccctggacggcagcgtgctgctgagaaacgccgtgcaggccgacgagggcgagtacgagtgcagagtgagcaccttccccgccggcagcttccaggccagactgagactgagagtgctggtgccccccctgcccagcctgaaccccggccccgccctggaggagggccagggcctgaccctggccgccagctgcaccgccgagggcagccccgcccccagcgtgacctgggacaccgaggtgaagggcaccaccagcagcagaagcttcaagcacagcagaagcgccgccgtgaccagcgagttccacctggtgcccagcagaagcatgaacggccagcccctgacctgcgtggtgagccaccccggcctgctgcaggaccagagaatcacccacatcctgcacgtgagcttcctggccgaggccagcgtgagaggcctggaggaccagaacctgtggcacatcggcagagagggcgccatgctgaagtgcctgagcgagggccagcccccccccagctacaactggaccagactggacggccccctgcccagcggcgtgagagtggacggcgacaccctgggcttcccccccctgaccaccgagcacagcggcatctacgtgtgccacgtgagcaacgagttcagcagcagagacagccaggtgaccgtggacgtgctggacccccaggaggacagcggcaagcaggtggacctggtgagcgccagcgtggtggtggtgggcgtgatcgccgccctgctgttctgcctgctggtggtggtggtggtgctgatgagcagataccacagaagaaaggcccagcagatgacccagaagtacgaggaggagctgaccctgaccagagagaacagcatcagaagactgcacagccaccacaccgaccccagaagccagcccgaggagagcgtgggcctgagagccgagggccaccccgacagcctgaaggacaacagcagctgcagcgtgatgagcgaggagcccgagggcagaagctacagcaccctgaccaccgtgagagagatcgagacccagaccgagctgctgagccccggcagcggcagagccgaggaggaggaggaccaggacgagggcatcaagcaggccatgaaccacttcgtgcaggagaacggcaccctgagagccaagcccaccggcaacggcatctacatcaacggcagaggccacctggtgtag

SEQ ID NO: 220646 - protein, 594 aa, Artificial Sequence
  derived and/or modified sequence
MSAGEVERLVSELSGGTGGDEEEEWLYGGPWDVHVHSDLAKDLDENEVERPEEENASANPPSGIEDETAENGVPKPKVTETEDDSDSDSDDDEDDVHVTIGDIKTGAPQYGSYGTAPVNLNIKTGGRVYGTTGTKVKGVDLDAPGSINGVPLLEVDLDSFEDKPWRKPGADLSDYFNYGFNEDTWKAYCEKQKRIRMGLEVIPVTSTTNKITAEDCTMEVTPGAEIQDGRFNLFKVQQGRTGNSEKETALPSTKAEFTSPPSLFKTGLPPSRNSTSSQSQTSTASRKANSSVGKWQDRYGRAESPDLRRLPGAIDVIGQTITISRVEGRRRANENSNIQVLSERSATEVDNNFSKPPPFFPPGAPPTHLPPPPFLPPPPTVSTAPPLIPPPGFPPPPGAPPPSLIPTIESGHSSGYDSRSARAFPYGNVAFPHLPGSAPSWPSLVDTSKQWDYYARREKDRDRERDRDRERDRDRDRERERTRERERERDHSPTPSVFNSDEERYRYREYAERGYERHRASREKEERHRERRHREKEETRHKSSRSNSRRRHESEEGDSHRRHKHKKSKRSKEGKEAGSEPAPEQESTEATPAE

SEQ ID NO: 220647 - DNA, 2198 bp, Artificial Sequence
  derived and/or modified sequence
atgcgcagacggacctgcgctggaggcttcatctttgccgccgctgccgtcgccttcctgggattggagtctcgagctttcttcgttcgttcgtcggcgggttcgcgcccttctcgcgcctcggggctgcgaggctggggaaggggttggagggggctgttgatcgccgcgtttaagttgcgctcggggcggccatgtcggccggcgaggtcgagcgcctagtgtcggagctgagcggcgggaccggaggggatgaggaggaagagtggctctatggcggcccatgggacgtgcatgtgcacagtgatttggcaaaggacctagatgaaaatgaagttgaaaggccagaagaagaaaatgccagtgctaatcctccatctggaattgaagatgaaactgctgaaaatggtgtaccaaaaccgaaagtgactgagaccgaagatgatagtgatagtgacagcgatgatgatgaagatgatgttcatgtcactataggagacattaaaacgggagcaccacagtatgggagttatggtacagcacctgtaaatcttaacatcaagacagggggaagagtttatggaactacagggacaaaagtcaaaggagtagaccttgatgcacctggaagcattaatggagttccactcttagaggtagatttggattcttttgaagataaaccatggcgtaaacctggtgctgatctttctgattattttaattatgggtttaatgaagatacctggaaagcttactgtgaaaaacaaaagaggatacgaatgggacttgaagttataccagtaacctctactacaaataaaattacggccgaagactgtactatggaagttacaccaggtgcagagatccaagatggcagattcaatctttttaaggtacagcagggaagaactggaaactcagagaaagaaactgcccttccatctacaaaagctgagtttacttctcctccttctttgttcaagactgggcttccaccgagcagaaacagcacttcttctcagtctcagacaagtactgcctccagaaaagccaattcaagcgttgggaagtggcaggatcgatatgggagggccgaatcacctgatctaaggagattacctggggcaattgatgttatcggtcagactataactatcagccgagtagaaggcaggcgacgggcaaatgagaacagcaacatacaggtcctttctgaaagatctgctactgaagtagacaacaattttagcaaaccacctccgtttttccctccaggagctcctcccactcaccttccacctcctccatttcttccacctcctccgactgtcagcactgctccacctctgattccaccaccgggttttcctcctccaccaggcgctccacctccatctcttataccaacaatagaaagtggacattcctctggttatgatagtcgttctgcacgtgcatttccatatggcaatgttgcctttccccatcttcctggttctgctccttcgtggcctagtcttgtggacaccagcaagcagtgggactattatgccagaagagagaaagaccgagatagagagagagacagagacagagagcgagaccgtgatcgggacagagaaagagaacgcaccagagagagagagagggagcgtgatcacagtcctacaccaagtgttttcaacagcgatgaagaacgatacagatacagggaatatgcagaaagaggttatgagcgtcacagagcaagtcgagaaaaagaagaacgacatagagaaagacgacacagggagaaagaggaaaccagacataagtcttctcgaagtaatagtagacgtcgccatgaaagtgaagaaggagatagtcacaggagacacaaacacaaaaaatctaaaagaagcaaagaaggaaaagaagcgggcagtgagcctgcccctgaacaggagagcaccgaagctacacctgcagaataggcatggttttggccttttgtgtatattagtaccagaagtagatactataaatcttgttatttttctggataatgtttaagaaatttaccttaaatcttgttctgtttgttagtatgaaaagttaactttttttccaaaataaaagagtgaatttttcatgttaagttaaaaatctttgtcttgtactatttcaaaaataaaaagacagcaatgacttta

SEQ ID NO: 220648 - DNA, 1785 bp, Artificial Sequence
  derived and/or modified sequence
atgtccgctggcgaggtcgaaagactggttagtgaactctccggcgggaccggtggggacgaagaggaggagtggttatatggagggccatgggatgtgcatgtgcactccgatctcgccaaagatcttgatgagaacgaagtggagcggcccgaagaggagaacgcctccgcgaacccacctagcggtattgaggatgagacggcggaaaatggcgtcccgaaaccgaaggtaacggaaacagaagacgatagtgactctgactccgatgacgacgaggatgacgttcatgtgacaatcggcgacatcaagactggggctcctcaatacggatcttacgggaccgcccctgttaacttgaacataaaaacaggaggacgggtgtacggaaccaccgggactaaggtgaagggggttgacctggacgccccagggtctataaacggtgttcctcttctggaggtcgacttggattcctttgaagataagccctggcgcaagcctggcgcggatttgtccgattacttcaattatggctttaatgaggatacctggaaagcgtattgcgagaaacagaagagaatcagaatgggcttagaagtaattcctgtgacctcgaccaccaataagattacagcagaagactgcaccatggaggtaacgcctggggcagaaatacaggatggaagattcaatctgttcaaggttcagcaaggtagaaccggaaactctgaaaaggagacagccttaccttctactaaagcagaatttacctctccaccgtctctttttaaaaccggcttgccaccgtctagaaacagtacaagcagccagagccaaacttctaccgcttccagaaaggctaattcctcagtcggaaaatggcaggatagatacggaagagccgaaagccccgacttgcggagactgcccggcgctatcgatgtgattgggcagactatcactatttcgagagtggaaggcagaagaagggctaatgaaaacagcaacatacaagtgcttagcgaacgatccgccacggaggttgataataatttttctaagccgccaccatttttccccccaggcgctcctcctacccacctgccgccacccccttttctacccccaccaccaacagtcagtacggccccccccctgatcccaccgcctggtttcccgccgccacccggcgctccacccccgagcctaattccaacaattgagagcggacacagctccggttatgattcgagaagcgctagagccttcccatatggaaatgttgcattccctcatttaccaggaagcgccccgagctggccgtcgctggtcgataccagcaagcagtgggattactacgctagaagagagaaggaccgagatcgcgagcgcgaccgggacagggagcgggatagagatagagatcgtgagagggaaaggaccagggaacgggagagggagcgcgaccacagccctaccccatcagtgttcaattcggacgaagagcgctaccggtatcgcgaatacgccgagcgcggttatgaaaggcaccgtgcgtccagggagaaggaagaacgtcacagagaacggaggcatcgcgaaaaagaggaaacaagacacaagtcctcgcgctccaatagtcgcaggcgccatgaaagcgaagagggggattcccacagaagacacaagcacaaaaagtcaaaacgctcgaaggaaggcaaggaggctggcagtgagcccgcccctgaacaggagtccactgaagctacacctgccgagtag

SEQ ID NO: 220649 - DNA, 1785 bp, Artificial Sequence
  derived and/or modified sequence
atgtctgctggggaggtggagcggctggtgtctgagctgagcggcggcactggaggagatgaggaggaggagtggctgtatggaggcccctgggatgtgcacgtgcacagcgacctggccaaggacctggatgaaaatgaggtggagaggcctgaggaggagaatgccagcgccaacccccccagcggcattgaagatgaaacagcagaaaatggagtgcccaagcccaaggtgacagaaacagaagatgacagcgacagcgacagtgatgatgatgaagatgatgtgcacgtgaccatcggggacatcaagacaggagccccccagtatggcagctatggaacagcccctgtgaacctgaacatcaagacaggaggccgggtgtatggcaccaccggcaccaaggtgaagggcgtggacctggatgcccctggcagcatcaacggggtgcccctgctggaggtggacctggacagctttgaggacaagccctggaggaagccaggagctgacctgagtgactacttcaactacggcttcaatgaagacacctggaaggcctactgtgagaagcagaagaggatccgcatgggcctggaggtgattcctgtgaccagcaccaccaacaagatcacagctgaggactgcaccatggaggtgaccccaggagctgagatccaggacggccgcttcaacctcttcaaggtgcagcagggccgcactggaaacagcgagaaggagacagccctgcccagcaccaaggccgagttcaccagcccccccagcctcttcaagacaggcctgccccccagcaggaacagcaccagcagccagagccagaccagcacagccagcaggaaggccaacagctctgtgggcaagtggcaggacagatatggccgggcagagagcccagacctgcggcggctgcccggggccattgatgtgattggccagaccatcaccatcagccgggtggagggcagaagaagagccaatgaaaacagcaacatccaggtgctgtctgagaggtctgccacagaggtggacaacaacttcagcaagcccccacccttcttccccccaggggccccacccacccacctgcccccaccacccttcctgcccccaccacccaccgtgtccacagcccctcctctcatccccccacctggcttccccccacctcctggggcccccccacccagcctcatccccaccatcgagagcggccacagcagcggctatgacagccgcagcgcccgggccttcccctatggaaatgtggccttcccccacctgcccggcagcgcccccagctggcccagcctggtggacaccagcaagcagtgggactactatgcccggcgggagaaggaccgggaccgggagcgggaccgggaccgggagcgggaccgggaccgggaccgggagcgggagaggacccgggagcgggagcgggagcgggaccacagccccacccccagcgtcttcaacagtgatgaggagcgctaccgctaccgggagtatgcagagcggggctatgagcggcaccgggccagccgggagaaggaggagcggcaccgggagaggaggcaccgggagaaggaggagaccaggcacaagagcagccgcagcaacagcagaagaagacatgagagcgaggagggggacagccacagaagacacaagcacaagaagagcaagaggagcaaggagggcaaggaggccggcagcgagcccgcccctgagcaggagagcacagaggccaccccagctgagtag

SEQ ID NO: 220650 - DNA, 1785 bp, Artificial Sequence
  derived and/or modified sequence
atgagcgccggcgaggtggagcggctggtgagcgagctgagcggcggtactggtggcgacgaggaggaggagtggctgtatggcggaccatgggatgtgcatgtccactccgacctggctaaagatctggatgaaaacgaagtcgaacggccagaagaggagaatgcttccgccaatcctcccagtgggattgaagacgagacagccgagaatggcgtcccgaaaccgaaagtgactgagaccgaggatgatagcgactcagactccgatgatgacgaggatgatgttcacgtcactatcggcgacatcaaaactggggccccccaatatggctcctacggaactgctccagttaatctgaacatcaaaacgggtggccgcgtgtacggtaccacgggaacaaaagtgaagggggtcgacctggacgcacccggcagcataaacggtgtccccctgctggaagtggacttagattcatttgaggataagccttggcgaaagcccggcgcagatctatccgattattttaattatgggttcaatgaagacacctggaaagcttactgcgagaagcagaagcgaattcggatggggctcgaagtgatccccgtgacatccacaacgaacaagattactgcagaggattgcactatggaggttacccctggcgccgagattcaggatgggcgcttcaacctgtttaaggtgcaacagggtcggaccggaaactcagagaaagagactgcactcccttccacaaaggccgaatttacatcaccaccgtccctgttcaagacggggctgcccccttcaagaaattcgacaagcagccaaagccagacaagcaccgccagcagaaaggctaatagctccgtggggaagtggcaggaccggtacggcagagccgagtcccccgatctcaggaggctgcctggtgcaatcgatgttatcggccagacaattactatttctagagttgaaggaaggagaagagccaacgaaaattctaacatacaagtgttatctgaacggagcgccacagaagttgacaataactttagcaaaccacctcctttttttccacccggggccccgcccacccatctaccccccccccctttcctgccgccaccaccgaccgtgtctactgccccaccacttattccacctcccggctttccccccccccccggcgcaccccctccaagcctcataccaacaatcgagtccggacactcctccggatacgattcccggagcgctcgggcgttcccttatggcaatgttgctttccctcatctgccaggttcagcaccctcttggccaagcttggtggacaccagtaagcagtgggattactatgctaggcgcgagaaagatcgcgaccgggagagggacagggatcgcgagagagaccgagaccgcgaccgcgaacgggagcggacaagggaaagggagagggaacgcgatcactccccgaccccttctgtctttaattctgacgaagagcgctacagatatagagagtatgctgagcgggggtatgaaagacaccgtgcctcaagggagaaagaggagcgacaccgggagaggcggcatcgggagaaggaagagacccggcacaagtcctcaagatcaaacagcagacggcggcatgaatccgaagagggtgattctcaccgccggcacaaacataagaaatctaaaagatccaaagagggcaaagaggccggcagcgaaccagcccctgaacaggagagcactgaggctactcccgccgagtag

SEQ ID NO: 220651 - DNA, 1785 bp, Artificial Sequence
  derived and/or modified sequence
atgtctgcaggggaggtcgagaggctggtgagtgaattgtctggcggaactggaggtgacgaagaagaggagtggttgtatggaggcccttgggatgtacacgtgcatagtgacctcgcgaaagatctcgatgaaaacgaggttgaaagacccgaagaggagaacgcgtcggccaaccctccgtcgggcatcgaggacgaaacggccgaaaatggtgtaccgaagccgaaagtgaccgagacggaggacgactcagactcagactccgatgacgatgaagacgatgtgcatgtgaccataggagacattaagactggcgcaccacagtatgggtcctacggtaccgccccagttaatctcaatataaagacaggtggcagagtctatgggacaaccggcaccaaagtgaaaggagtggacttggacgcaccaggaagtatcaacggagtaccactgctcgaggtcgatctagactcgtttgaagacaaaccttggagaaaacctggggcagacctcagtgattacttcaattacgggtttaatgaggacacctggaaggcatactgcgaaaagcagaaacggatccgcatgggtctggaggtgatacctgttacctctacaaccaataaaattacagcagaagactgtactatggaggtaacccctggcgcagagattcaggacggtcggttcaacctgtttaaggtgcagcaggggcgtaccgggaatagcgaaaaggaaaccgcactcccaagtactaaggccgagtttaccagtcctccgtcactcttcaagactggactcccaccatcccgcaatagtacaagcagccagtcccagacgtcaacggcttcgagaaaagcgaacagcagtgtgggaaaatggcaggatcggtacgggagggccgagtccccggatcttcgtagactgccaggagctatcgacgtcatcgggcagaccataaccatcagccgggtagaggggagaagaagagcgaatgaaaacagcaatatacaagttctttcagagcggtcagctacagaggtggacaataacttttcaaagcccccacctttcttcccacccggagccccaccgacacacctaccgcctcctcctttcctgcctccaccaccaaccgtgagtacggcgccacctctgatccccccaccagggttccctcctccacctggagccccaccccctagcctgatacccaccatagagtctggacattcctccggatacgacagccgttctgcgagggctttcccctatgggaacgtagcttttcctcacctaccaggcagtgcaccctcttggccctcgctcgttgacacaagtaaacagtgggactattatgccaggagggagaaagacagagaccgcgaaagagatagggaccgggagcgagacagggatagagatagggagagagaacgcacaagggagagggagcgagaacgggatcacagccccacgcccagtgtgttcaattctgacgaagagaggtatagataccgcgagtacgcagagcggggatatgagcgccacagagcctcccgggaaaaggaagagcggcaccgagaacggaggcaccgagaaaaagaggagacccgtcacaaatccagcaggtctaactcaaggaggagacatgagagcgaagagggcgactctcatcgtcgacacaagcataagaaaagcaagagatctaaggaggggaaggaggctgggagtgaaccggcaccagagcaggaatccactgaagccacccccgctgaatag

SEQ ID NO: 220652 - DNA, 1785 bp, Artificial Sequence
  derived and/or modified sequence
atgagcgccggcgaggtggagagactggtgagcgagctgagcggcggcaccggcggcgacgaggaggaggagtggctgtacggcggcccctgggacgtgcacgtgcacagcgacctggccaaggacctggacgagaacgaggtggagagacccgaggaggagaacgccagcgccaacccccccagcggcatcgaggacgagaccgccgagaacggcgtgcccaagcccaaggtgaccgagaccgaggacgacagcgacagcgacagcgacgacgacgaggacgacgtgcacgtgaccatcggcgacatcaagaccggcgccccccagtacggcagctacggcaccgcccccgtgaacctgaacatcaagaccggcggcagagtgtacggcaccaccggcaccaaggtgaagggcgtggacctggacgcccccggcagcatcaacggcgtgcccctgctggaggtggacctggacagcttcgaggacaagccctggagaaagcccggcgccgacctgagcgactacttcaactacggcttcaacgaggacacctggaaggcctactgcgagaagcagaagagaatcagaatgggcctggaggtgatccccgtgaccagcaccaccaacaagatcaccgccgaggactgcaccatggaggtgacccccggcgccgagatccaggacggcagattcaacctgttcaaggtgcagcagggcagaaccggcaacagcgagaaggagaccgccctgcccagcaccaaggccgagttcaccagcccccccagcctgttcaagaccggcctgccccccagcagaaacagcaccagcagccagagccagaccagcaccgccagcagaaaggccaacagcagcgtgggcaagtggcaggacagatacggcagagccgagagccccgacctgagaagactgcccggcgccatcgacgtgatcggccagaccatcaccatcagcagagtggagggcagaagaagagccaacgagaacagcaacatccaggtgctgagcgagagaagcgccaccgaggtggacaacaacttcagcaagcccccccccttcttcccccccggcgccccccccacccacctgccccccccccccttcctgccccccccccccaccgtgagcaccgccccccccctgatccccccccccggcttcccccccccccccggcgcccccccccccagcctgatccccaccatcgagagcggccacagcagcggctacgacagcagaagcgccagagccttcccctacggcaacgtggccttcccccacctgcccggcagcgcccccagctggcccagcctggtggacaccagcaagcagtgggactactacgccagaagagagaaggacagagacagagagagagacagagacagagagagagacagagacagagacagagagagagagagaaccagagagagagagagagagagagaccacagccccacccccagcgtgttcaacagcgacgaggagagatacagatacagagagtacgccgagagaggctacgagagacacagagccagcagagagaaggaggagagacacagagagagaagacacagagagaaggaggagaccagacacaagagcagcagaagcaacagcagaagaagacacgagagcgaggagggcgacagccacagaagacacaagcacaagaagagcaagagaagcaaggagggcaaggaggccggcagcgagcccgcccccgagcaggagagcaccgaggccacccccgccgagtag

SEQ ID NO: 220653 - protein, 615 aa, Artificial Sequence
  derived and/or modified sequence
MARACLIQRLPIKRDCTPVFVRGLSSPSAAMALLSEGLDEVPAACLSPCGPPNPTELFSESRRLALEELVAGGPEAFAAFLRRERLARFLNPDEVHAILRAAERPGEEGAAAAAAAEDSFGSSHDCSSGTYFPEQSDLEPPLLELGWPAFYQGAYRGATRVETHFQPRGAGEGGPYGCKDALRQQLRSAREVIAVVMDVFTDIDIFRDLQEICRKQGVAVYILLDQALLSQFLDMCMDLKVHPEQEKLMTVRTITGNIYYARSGTKIIGKVHEKFTLIDGIRVATGSYSFTWTDGKLNSSNLVILSGQVVEHFDLEFRILYAQSKPISPKLLSHFQSSNKFDHLTNRKPQSKELTLGNLLRMRLARLSSTPRKADLDPEMPAEGKAERKPHDCESSTVSEEDYFSSHRDELQSRKAIDAATQTEPGEEMPGLSVSEVGTQTSITTACAGTQTAVITRIASSQTTIWSRSTTTQTDMDENILFPRGTQSTEGSPVSKMSVSRSSSLKSSSSVSSQGSVASSTGSPASIRTTDFHNPGYPKYLGTPHLELYLSDSLRNLNKERQFHFAGIRSRLNHMLAMLSRRTLFTENHLGLHSGNFSRVNLLAVRDVALYPSYQ

SEQ ID NO: 220654 - protein, 569 aa, Artificial Sequence
  derived and/or modified sequence
MALLSEGLDEVPAACLSPCGPPNPTELFSESRRLALEELVAGGPEAFAAFLRRERLARFLNPDEVHAILRAAERPGEEGAAAAAAAEDSFGSSHDCSSGTYFPEQSDLEPPLLELGWPAFYQGAGEGGPYGCKDALRQQLRSAREVIAVVMDVFTDIDIFRDLQEICRKQGVAVYILLDQALLSQFLDMCMDLKVHPEQEKLMTVRTITGNIYYARSGTKIIGKVHEKFTLIDGIRVATGSYSFTWTDGKLNSSNLVILSGQVVEHFDLEFRILYAQSKPISPKLLSHFQSSNKFDHLTNRKPQSKELTLGNLLRMRLARLSSTPRKADLDPEMPAEGKAERKPHDCESSTVSEEDYFSSHRDELQSRKAIDAATQTEPGEEMPGLSVSEVGTQTSITTACAGTQTAVITRIASSQTTIWSRSTTTQTDMDENILFPRGTQSTEGSPVSKMSVSRSSSLKSSSSVSSQGSVASSTGSPASIRTTDFHNPGYPKYLGTPHLELYLSDSLRNLNKERQFHFAGIRSRLNHMLAMLSRRTLFTENHLGLHSGNFSRVNLLAVRDVALYPSYQ

SEQ ID NO: 220655 - DNA, 1710 bp, Artificial Sequence
  derived and/or modified sequence
atggccctgctgagcgagggcctggacgaggtgcccgccgcctgcctgagcccctgcggcccccccaaccccaccgagctgttcagcgagagcagaagactggccctggaggagctggtggccggcggccccgaggccttcgccgccttcctgagaagagagagactggccagattcctgaaccccgacgaggtgcacgccatcctgagagccgccgagagacccggcgaggagggcgccgccgccgccgccgccgccgaggacagcttcggcagcagccacgactgcagcagcggcacctacttccccgagcagagcgacctggagccccccctgctggagctgggctggcccgccttctaccagggcgccggcgagggcggcccctacggctgcaaggacgccctgagacagcagctgagaagcgccagagaggtgatcgccgtggtgatggacgtgttcaccgacatcgacatcttcagagacctgcaggagatctgcagaaagcagggcgtggccgtgtacatcctgctggaccaggccctgctgagccagttcctggacatgtgcatggacctgaaggtgcaccccgagcaggagaagctgatgaccgtgagaaccatcaccggcaacatctactacgccagaagcggcaccaagatcatcggcaaggtgcacgagaagttcaccctgatcgacggcatcagagtggccaccggcagctacagcttcacctggaccgacggcaagctgaacagcagcaacctggtgatcctgagcggccaggtggtggagcacttcgacctggagttcagaatcctgtacgcccagagcaagcccatcagccccaagctgctgagccacttccagagcagcaacaagttcgaccacctgaccaacagaaagccccagagcaaggagctgaccctgggcaacctgctgagaatgagactggccagactgagcagcacccccagaaaggccgacctggaccccgagatgcccgccgagggcaaggccgagagaaagccccacgactgcgagagcagcaccgtgagcgaggaggactacttcagcagccacagagacgagctgcagagcagaaaggccatcgacgccgccacccagaccgagcccggcgaggagatgcccggcctgagcgtgagcgaggtgggcacccagaccagcatcaccaccgcctgcgccggcacccagaccgccgtgatcaccagaatcgccagcagccagaccaccatctggagcagaagcaccaccacccagaccgacatggacgagaacatcctgttccccagaggcacccagagcaccgagggcagccccgtgagcaagatgagcgtgagcagaagcagcagcctgaagagcagcagcagcgtgagcagccagggcagcgtggccagcagcaccggcagccccgccagcatcagaaccaccgacttccacaaccccggctaccccaagtacctgggcaccccccacctggagctgtacctgagcgacagcctgagaaacctgaacaaggagagacagttccacttcgccggcatcagaagcagactgaaccacatgctggccatgctgagcagaagaaccctgttcaccgagaaccacctgggcctgcacagcggcaacttcagcagagtgaacctgctggccgtgagagacgtggccctgtaccccagctaccagtag

SEQ ID NO: 220656 - DNA, 1710 bp, Artificial Sequence
  derived and/or modified sequence
atggcactgttgtctgaagggctggatgaagttcctgcagcctgcttgtctccttgcggtcctcccaatcctactgagctcttctccgaatccaggcgcctggctctcgaagagctggtggccggcggtccagaggcattcgcagcctttctacgtcgcgaaagattggcacgattcctaaatcccgatgaggtccatgcgatcctgcgcgcagccgagagaccaggagaagagggagccgctgccgctgcggccgcagaagactccttcggtagctctcacgattgctcttccggaacgtactttcctgagcagtcagacctcgagcccccgttgttagagttaggctggccagccttctatcaaggggccggcgagggcggcccgtatggctgcaaggacgcactacgccagcagctccgctcagcacgggaggtgattgcggtggtcatggacgtcttcactgatattgacatctttagggatttgcaagaaatatgccgcaagcagggcgtggctgtgtacatcctcctcgatcaggcgcttctgtctcagttcttggatatgtgtatggacctgaaagtgcatcctgaacaggagaaactcatgaccgtgaggactattaccgggaacatttattacgctcgctcagggaccaagatcatcggcaaggttcacgaaaaattcaccctgatcgatggtattcgcgtggcaaccggatcttactcattcacatggaccgatggcaagcttaattcatccaatctggtcattctgtccggccaggtagttgaacacttcgatctggaatttcgcatcctgtacgctcagtcaaaacccattagtcccaagctccttagccactttcagtcatccaacaaattcgatcacctgacaaatcgaaagcctcagagcaaagaacttaccctgggcaacttgcttcgtatgaggctcgcacgtctgagctccacaccacggaaagctgatctcgatcctgagatgcctgccgagggaaaagcggagcgtaagccacatgactgtgagagcagcaccgtgtcggaggaagattattttagtagccacagggacgagttgcagtccaggaaagcaatcgacgctgcaacacagacagagccaggggaagagatgccagggctgtcggtgagtgaggttggaacccagacatctatcactacagcttgtgccggaacccagactgctgtgatcaccaggatagcttcaagtcagactaccatctggtcacggtcaaccaccacacagaccgacatggacgaaaatatcctatttccgagaggtactcaaagcacagaaggttcgcctgtttccaaaatgtccgtgtctcgcagtagtagccttaagtcttcatccagcgtgtcctctcagggctctgttgcctcttcgaccgggagcccggctagcatccgcacgacagatttccataatcccggttatcctaagtacttgggcaccccccatctagaattatatctgtctgactccctgcggaatttgaacaaagagcgtcaatttcattttgcaggaatccgttcccggctgaaccacatgctggctatgctgtcacgccgaacgctatttaccgaaaatcacctcggactgcactcggggaacttcagcagagtgaacctcttggcagtgcgggatgtggcattgtatccttcctatcagtag

SEQ ID NO: 220657 - DNA, 2429 bp, Artificial Sequence
  derived and/or modified sequence
aaagcagccaatgggagagccgaggcggggaggtgcggccaatggcgcgggcctgtttgattcaaaggttgcctataaagcgggactgcacgccggtttttgtccgagggctgtcgagtccgagcgccgccatggctctgctgtccgagggcctggacgaggtgcccgccgcctgcctgtcgccgtgcgggccgcccaacccgaccgagctgttcagcgagtcacggcgcctggctctggaggagctggtggcgggcggccccgaagccttcgcggccttcctgcgacgcgagcgcctggctcgtttcctgaaccccgatgaggtgcacgccattctgcgcgcggcggagaggccgggagaggagggcgcggcggcggcggcggcggccgaggactcgttcggctcctcgcacgactgctcttcgggcacctacttccccgagcagtcggacctggagccaccgctgttggagcttggctggcccgccttctaccagggcgcctaccgcggcgccacgcgtgtcgagacgcacttccagccccgcggcgctggcgaaggtggcccctacggctgcaaggacgctctgcgccagcagctccgctcggcgcgagaggtgattgcagtggtcatggacgtgttcacagacatcgacatcttcagagacctgcaagaaatatgcaggaaacagggagttgctgtgtatatccttctggaccaggctctcctctctcaatttctggatatgtgcatggatctgaaagttcatcctgaacaggaaaagttaatgacagttcggactatcacaggaaatatctactatgcaaggtcaggaactaagattattgggaaggttcacgaaaagttcacgttgattgatggcatccgcgtggcaacaggctcctacagttttacatggacggatggcaaattaaacagcagtaacttggtaattctgtctggccaagtggttgaacactttgatctggagttccgaatcctgtatgcccagtccaagcccatcagccccaaactcctgtctcacttccagagcagcaacaagtttgatcacctcaccaaccgaaaaccacagtccaaggagctcaccctgggcaacctgctgcggatgcggctggctaggctgtcaagtactcccaggaaggcggacctggacccagagatgcccgcagagggcaaggcagagcgcaagccccatgactgtgagtcctctactgttagtgaggaagactacttcagcagccacagggacgagctccagagcagaaaggccattgacgctgccactcaaacagagccaggagaggagatgccagggctgagtgtgagtgaggtgggaacacaaaccagcatcaccacagcatgtgctggtacccagactgcagtcatcaccaggatagcaagctctcaaaccacgatttggtccagatcgaccactactcagactgacatggatgagaacattctctttcctcgaggaactcaatctacagaagggtcaccagtctcaaaaatgtctgtatcgagatcttccagtttgaagtcttcctcctctgtgtcttcccaaggctctgtggcaagctccactggttctcccgcttccatcagaaccactgacttccacaatcctggctatcccaagtacctgggcaccccccacctggaactgtacttgagtgactcacttagaaacttgaacaaagagcggcaattccacttcgctggtatcaggtcccggctcaaccacatgctggctatgctgtcaaggagaacactctttactgaaaaccaccttggccttcattctggcaatttcagcagagttaatttgcttgctgttagagatgtagcactttatccttcctatcagtaactgctccgtgttcagactcctggtttcttccaggcttacagtggacatcatcagcttcctgctttaaaaaatatcttatgtccctaattgcctttcttttacctgactttgtcacctttgttgtctttgaattctttaggctgcatattattttacatgctttgttttgtcatgtatataccaggtattggttttatggtttaaacactatggatacaggggtttgttttgcacaattttaatagtcatgcactacataatgatgttttggtcaatgacagaccacgtatatgttggcagtctcataagattataatactgtatttttactataccttttctgtgtttagatacaaataccattatgttacagttgcctacagtattcagtgcagtaacatgatgtacaggtttgtagcctgttttgcatttttcttaggttgtatgctcttctgttttaaaggtttgaatcaccagcatttttgtgatcaaaatcctatttagaaaaaataaaactactttctgtttatctctttagaa

SEQ ID NO: 220658 - DNA, 1710 bp, Artificial Sequence
  derived and/or modified sequence
atggccctgctgtctgagggcctggatgaggtgcctgctgcctgcctgagcccctgtggcccccccaaccccacagagctgttcagcgagagccggcggctggccctggaggagctggtggccggcggccctgaggcctttgctgccttcctgcggcgggagcggctggcccgcttcctgaacccagatgaggtgcacgccatcctgcgggctgctgagaggcctggagaggagggcgctgctgctgctgctgctgctgaagattcttttggcagcagccatgactgcagcagcggcacctacttccctgagcagagcgacctggagccccccctgctggagctgggctggccagccttctaccagggcgctggggagggcggcccctacggctgcaaggatgccctgcggcagcagctgcggagcgcccgggaggtgattgctgtggtgatggatgtgttcacagacatcgacatcttccgggacctgcaggagatctgcaggaagcagggcgtggccgtgtacatcctgctggaccaggccctgctgagccagttcctggacatgtgcatggacctgaaggtgcaccctgagcaggagaagctgatgacagtgaggaccatcactggaaacatctactatgcccggagcggcaccaagatcatcggcaaggtgcatgagaagttcaccctgattgatggcatccgggtggccaccggcagctacagcttcacctggacagatggcaagctgaacagcagcaacctggtgatcctgagcggccaggtggtggagcactttgacctggagttccgcatcctgtatgcccagagcaagcccatcagccccaagctgctgagccacttccagagcagcaacaagtttgaccacctgaccaacaggaagccccagagcaaggagctgaccctgggcaacctgctgaggatgaggctggcccggctgagcagcacccccaggaaggctgacctggaccctgagatgcctgctgagggcaaggccgagaggaagccccatgactgtgagagcagcacagtgtctgaggaggactacttcagcagccacagagatgagctgcagagcaggaaggccattgatgctgccacccagacagagcctggagaggagatgcctggcctgtctgtgtctgaggtgggcacccagaccagcatcaccacagcctgtgccggcacccagacagctgtgatcacccgcatcgccagcagccagaccaccatctggagccgcagcaccaccacccagacagacatggatgagaacatcctcttcccccggggcacccagagcacagagggcagccctgtgtccaagatgtctgtgagccgcagcagcagcctgaagagcagcagctctgtgagcagccagggctctgtggccagcagcacaggcagccctgccagcatccgcaccacagacttccacaaccctggctaccccaagtacctgggcaccccccacctggagctgtacctgagtgacagcctgaggaacctgaacaaggagcggcagttccactttgctggcatccgcagccggctgaaccacatgctggccatgctgagcaggaggaccctcttcacagagaaccacctgggcctgcacagcggcaacttcagccgggtgaacctgctggccgtgagagatgtggccctgtaccccagctaccagtag

SEQ ID NO: 220659 - DNA, 1710 bp, Artificial Sequence
  derived and/or modified sequence
atggccctgctgagcgagggcctggacgaggtgcccgccgcctgcctaagcccctgtggaccccctaaccccaccgagctgtttagcgagtcacgcagacttgcgttagaggaactggtcgccgggggccccgaagccttcgcggcttttctacgccgagagagattagcaagattccttaaccctgacgaagtgcatgctatattacgagctgccgaaagacccggagaagagggcgctgcagccgctgcggcggcagaggatagttttggtagcagtcacgattgttcctccggaacctacttcccggagcagtctgatctggagcctcccctgctagaacttggctggccagcgttctaccagggggctggggaaggtggcccgtatgggtgcaaagacgcgctccggcagcagctgcgctctgcacgtgaggtgatcgccgttgttatggatgtatttaccgacatagatatctttagggacctccaagagatatgcagaaaacagggggtggccgtttatatactcctggaccaggctctgttgagccagtttttagacatgtgtatggatctgaaagtgcatcctgaacaggaaaagctaatgacagtcagaaccatcaccggtaatatctactacgcgcggtctggaacaaaaattataggaaaagtgcatgagaagttcacattgatcgatggaatccgtgtagctacggggagctactcattcacatggactgatggcaagttgaacagctcaaacctcgttatcctgagtggacaggtggtggagcattttgacctggagttccggatcctgtacgcccagtctaagcccatcagcccaaaactgttatcccacttccagagttcaaataaattcgatcatctcacgaatcgtaaaccacagtccaaggagttgactcttgggaatctgctgcgcatgaggctcgctaggcttagttcgacaccacgcaaagccgatctagatcctgaaatgccggcggaggggaaggccgaaagaaagccacatgattgtgagagttccacggtctcagaggaggattattttagtagtcaccgtgatgagctacagtctcggaaagccatcgatgcagcaactcagactgagcccggcgaagaaatgccaggcctaagcgtctccgaagtgggcacacagacatccattaccaccgcctgcgccggcacacaaacagccgtgattactcggatcgcgtcatcccaaactactatatggtcacgcagcaccacaactcagacagacatggatgaaaacatactgtttccccgcggcacccagagtactgaaggcagccctgtgtccaagatgtctgtgtcccggtcctctagcctgaaaagctccagctcagtttcttcccagggcagtgtggctagcagcaccggctcccccgcaagcattcgaaccacagacttccacaaccctggctatcccaagtacctcggtacaccacacctggaactatacctatctgactccctgcggaaccttaacaaggagcgccagttccacttcgccggcattagaagtcgactgaaccacatgctggcaatgctgagccgcagaaccctgtttaccgaaaaccacctgggtttgcacagcgggaacttttctagggtgaatttactggcagtgcgagacgtcgccttatacccatcctaccaatag

SEQ ID NO: 220660 - DNA, 2238 bp, Artificial Sequence
  derived and/or modified sequence
atggctctgctgtccgagggcctggacgaggtgcccgccgcctgcctgtcgccgtgcgggccgcccaacccgaccgagctgttcagcgagtcacggcgcctggctctggaggagctggtggcgggcggccccgaagccttcgcggccttcctgcgacgcgagcgcctggctcgtttcctgaaccccgatgaggtgcacgccattctgcgcgcggcggagaggccgggagaggagggcgcggcggcggcggcggcggccgaggactcgttcggctcctcgcacgactgctcttcgggcacctacttccccgagcagtcggacctggagccaccgctgttggagcttggctggcccgccttctaccagggcgctggcgaaggtggcccctacggctgcaaggacgctctgcgccagcagctccgctcggcgcgagaggtgattgcagtggtcatggacgtgttcacagacatcgacatcttcagagacctgcaagaaatatgcaggaaacagggagttgctgtgtatatccttctggaccaggctctcctctctcaatttctggatatgtgcatggatctgaaagttcatcctgaacaggaaaagttaatgacagttcggactatcacaggaaatatctactatgcaaggtcaggaactaagattattgggaaggttcacgaaaagttcacgttgattgatggcatccgcgtggcaacaggctcctacagttttacatggacggatggcaaattaaacagcagtaacttggtaattctgtctggccaagtggttgaacactttgatctggagttccgaatcctgtatgcccagtccaagcccatcagccccaaactcctgtctcacttccagagcagcaacaagtttgatcacctcaccaaccgaaaaccacagtccaaggagctcaccctgggcaacctgctgcggatgcggctggctaggctgtcaagtactcccaggaaggcggacctggacccagagatgcccgcagagggcaaggcagagcgcaagccccatgactgtgagtcctctactgttagtgaggaagactacttcagcagccacagggacgagctccagagcagaaaggccattgacgctgccactcaaacagagccaggagaggagatgccagggctgagtgtgagtgaggtgggaacacaaaccagcatcaccacagcatgtgctggtacccagactgcagtcatcaccaggatagcaagctctcaaaccacgatttggtccagatcgaccactactcagactgacatggatgagaacattctctttcctcgaggaactcaatctacagaagggtcaccagtctcaaaaatgtctgtatcgagatcttccagtttgaagtcttcctcctctgtgtcttcccaaggctctgtggcaagctccactggttctcccgcttccatcagaaccactgacttccacaatcctggctatcccaagtacctgggcaccccccacctggaactgtacttgagtgactcacttagaaacttgaacaaagagcggcaattccacttcgctggtatcaggtcccggctcaaccacatgctggctatgctgtcaaggagaacactctttactgaaaaccaccttggccttcattctggcaatttcagcagagttaatttgcttgctgttagagatgtagcactttatccttcctatcagtaactgctccgtgttcagactcctggtttcttccaggcttacagtggacatcatcagcttcctgctttaaaaaatatcttatgtccctaattgcctttcttttacctgactttgtcacctttgttgtctttgaattctttaggctgcatattattttacatgctttgttttgtcatgtatataccaggtattggttttatggtttaaacactatggatacaggggtttgttttgcacaattttaatagtcatgcactacataatgatgttttggtcaatgacagaccacgtatatgttggcagtctcataagattataatactgtatttttactataccttttctgtgtttagatacaaataccattatgttacagttgcctacagtattcagtgcagtaacatgatgtacaggtttgtagcctgttttgcatttttcttaggttgtatgctcttctgttttaaaggtttgaatcaccagcatttttgtgatcaaaatcctatttagaaaaaataaaactactttctgttt

SEQ ID NO: 220661 - DNA, 1710 bp, Artificial Sequence
  derived and/or modified sequence
atggcactactctcagagggacttgatgaggtgccggcagcctgtctgagcccctgtggccctcccaatcctaccgagctcttttcagaaagccgaagactcgcactggaggagctcgtggcagggggtcccgaagcgtttgccgctttccttagaagggaacggctggccagatttctcaaccccgatgaggttcacgccatcctgagggctgccgagcgacccggtgaggaaggcgcagctgctgccgcagctgccgaggattcctttgggagttcccatgattgctctagcggtacctactttccagaacaatccgacctggagcctccactcctagagctgggatggccggcattctaccagggtgccggagaggggggaccctacggatgtaaagatgctctgcgccaacagctgcgcagcgccagagaggtgatcgccgtggtcatggacgtgttcacggacatcgatattttcagagacttgcaggagatctgccggaagcagggtgtcgccgtttacatcctacttgaccaggccctcctatcgcaatttctggacatgtgtatggacctcaaagtgcatcccgaacaggagaagctaatgacggtccgtacgattaccggcaacatttattatgcccgaagcggaacaaagatcattggcaaagtgcatgagaagtttactctcattgacggcatccgagtcgctactggatcctactcctttacatggactgacggcaaattaaacagtagcaatctggtaattttgtcagggcaagttgttgagcacttcgatctggagttccgtatcctgtatgctcagtccaaacccattagccctaaactgcttagccattttcagagttcgaataagtttgaccatttgacgaaccgcaaaccacaaagcaaggagcttactctgggcaatttactgcgcatgcgcctggccagactttctagcacgccaagaaaggccgatcttgatcctgagatgccagcagaaggaaaagctgaacggaagccacacgactgtgagtccagtactgtgtcggaggaagactacttctcgagtcaccgtgatgagctgcaatctcgaaaggcaatcgacgccgctacacagacagaacccggagaggaaatgccgggattgagtgtgagtgaagtcggtacccagacgtctattactacagcatgtgccggaacgcagacagctgtgataacccgaattgcctcgtctcaaacaaccatatggagtcggtctaccacgacacagaccgatatggacgagaatattttgttcccaaggggtacccagtcgacagaaggatctcctgtatccaagatgtccgtgagtagaagcagcagcctaaagagctcctccagcgtttcaagccaaggcagcgtcgcatcatccacaggctctccagcctccattcgtacaactgatttccacaacccgggatacccgaaataccttggaacaccacacctcgagctgtatctgagcgattcgctgagaaacctgaataaagagcgtcagtttcactttgctggaatacgatcgcgcctgaaccacatgctcgctatgttgagcaggagaactctgtttacagaaaaccaccttgggctgcattctggcaatttcagccgagttaatctcctcgctgtaagagacgtggccttatatcctagctatcagtag

SEQ ID NO: 220662 - DNA, 1848 bp, Artificial Sequence
  derived and/or modified sequence
atggcgcgagcgtgtctgattcaaaggctgcctatcaaaagagactgtacgcctgtcttcgtaagaggtctgtcatctccaagtgcagccatggcactgctgagtgaaggcctggatgaagtccctgccgcgtgcctgtcgccttgtggtcccccaaatccaacagaattattctcagagagcaggagactggctctggaggagctggttgccggtggacccgaggcatttgctgccttcctgcggcgggaacgacttgcccgttttttaaatcctgatgaggttcatgcaatattaagggcagcggagcggccaggtgaagagggagctgccgccgcagcggcagcagaagattctttcggtagttcccacgactgcagcagcgggacctatttccctgagcagtccgacttggaaccccctttgctggaactggggtggcctgcattttaccagggcgcttaccgtggagcgacaagagtcgagacccattttcagcctaggggtgcaggcgagggggggccatacggctgtaaagatgccctcagacaacagctccggagtgctagagaggttattgctgtcgtgatggatgtgtttaccgacattgatattttccgtgatctccaagaaatttgccgcaagcagggggttgccgtttatatactgctcgaccaagcgctgctctctcagtttcttgatatgtgtatggacctgaaggtacacccagagcaggaaaagttgatgaccgtgcgcactatcaccggaaacatctactacgcccgtagcgggaccaagatcattggcaaagtgcacgagaagtttaccctgattgacggcatccgggttgcgaccggatcatacagctttacatggacagatggcaagctcaactcctcaaatctggtaatcctgagcgggcaggtggtggagcactttgatctcgagtttaggatactgtacgctcagtcaaagccgatctccccaaaactcctttcccacttccaatcatctaataaatttgatcacctgactaacaggaaaccccagagcaaggaactgacacttggcaacctgctgcgcatgcgtctggctaggttaagctcaaccccccgaaaggctgacctagacccagagatgcccgcagaaggaaaggctgagaggaagccgcacgactgtgagagttccactgtgagcgaggaagactatttttcatcacacagggatgagttgcagtccaggaaggcaatcgacgcggcaacccagacggaacccggcgaggaaatgcctggcctcagcgtcagtgaagtcggcacacagacaagtatcaccaccgcatgtgctggcacacagaccgctgtgatcacccgcattgcctcaagtcagacaactatctggtctcgttccaccacaacacagaccgacatggacgagaacattctgtttcctcgaggcactcagtctaccgaggggagtccagtgagcaaaatgtcagtctctcggtcatctagcctgaagagcagcagctcggtgagttcgcaaggctctgttgcatcaagtaccggatcaccggctagcatccgtaccacagatttccataatcccggctatccaaagtacttaggaacaccccacctggagctctatctttctgacagcttgcggaacctaaataaagaaaggcagttccattttgcaggtattcggagccgacttaatcacatgttagcaatgctttctcgacggacattatttaccgaaaaccacctgggcctgcactccggcaatttttccagagtgaatctgttggcagtgagggatgtggccctgtatcccagctaccaatag

SEQ ID NO: 220663 - DNA, 1848 bp, Artificial Sequence
  derived and/or modified sequence
atggcccgggcctgcctgatccagaggctgcccatcaagagggactgcacccctgtgtttgtgcggggcctgagcagccccagcgctgccatggccctgctgtctgagggcctggatgaggtgcctgctgcctgcctgagcccctgtggcccccccaaccccacagagctgttcagcgagagccggcggctggccctggaggagctggtggccggcggccctgaggcctttgctgccttcctgcggcgggagcggctggcccgcttcctgaacccagatgaggtgcacgccatcctgcgggctgctgagaggcctggagaggagggcgctgctgctgctgctgctgctgaagattcttttggcagcagccatgactgcagcagcggcacctacttccctgagcagagcgacctggagccccccctgctggagctgggctggccagccttctaccagggcgcctacagaggagccaccagggtggagacccacttccagcccaggggggccggggagggcggcccctacggctgcaaggatgccctgcggcagcagctgcggagcgcccgggaggtgattgctgtggtgatggatgtgttcacagacatcgacatcttccgggacctgcaggagatctgcaggaagcagggcgtggccgtgtacatcctgctggaccaggccctgctgagccagttcctggacatgtgcatggacctgaaggtgcaccctgagcaggagaagctgatgacagtgaggaccatcactggaaacatctactatgcccggagcggcaccaagatcatcggcaaggtgcatgagaagttcaccctgattgatggcatccgggtggccaccggcagctacagcttcacctggacagatggcaagctgaacagcagcaacctggtgatcctgagcggccaggtggtggagcactttgacctggagttccgcatcctgtatgcccagagcaagcccatcagccccaagctgctgagccacttccagagcagcaacaagtttgaccacctgaccaacaggaagccccagagcaaggagctgaccctgggcaacctgctgaggatgaggctggcccggctgagcagcacccccaggaaggctgacctggaccctgagatgcctgctgagggcaaggccgagaggaagccccatgactgtgagagcagcacagtgtctgaggaggactacttcagcagccacagagatgagctgcagagcaggaaggccattgatgctgccacccagacagagcctggagaggagatgcctggcctgtctgtgtctgaggtgggcacccagaccagcatcaccacagcctgtgccggcacccagacagctgtgatcacccgcatcgccagcagccagaccaccatctggagccgcagcaccaccacccagacagacatggatgagaacatcctcttcccccggggcacccagagcacagagggcagccctgtgtccaagatgtctgtgagccgcagcagcagcctgaagagcagcagctctgtgagcagccagggctctgtggccagcagcacaggcagccctgccagcatccgcaccacagacttccacaaccctggctaccccaagtacctgggcaccccccacctggagctgtacctgagtgacagcctgaggaacctgaacaaggagcggcagttccactttgctggcatccgcagccggctgaaccacatgctggccatgctgagcaggaggaccctcttcacagagaaccacctgggcctgcacagcggcaacttcagccgggtgaacctgctggccgtgagagatgtggccctgtaccccagctaccagtag

SEQ ID NO: 220664 - DNA, 1848 bp, Artificial Sequence
  derived and/or modified sequence
atggcccgggcctgcctgatccagcggctgcccatcaagcgggactgtactcccgtttttgtgcgcggcttatccagcccgagtgctgccatggcactgttgagcgaggggctcgatgaagtgcctgctgcctgtctctccccttgcggcccccctaatcccaccgagctcttcagtgaaagccgacggttggctttggaggagctggttgcaggaggccccgaggccttcgccgcctttttacgaagagagaggctggccaggtttctcaaccctgacgaggttcacgctatccttcgcgcagcggaaaggccaggagaggaaggcgccgccgctgccgccgcagccgaagacagtttcgggagctcacatgactgctcttcgggcacctacttcccagagcagagcgacttagagcccccactcctcgaactcgggtggcccgcgttctaccagggtgcttacagaggagccactagggtagagacacattttcagccgaggggcgctggtgagggcggcccctatggttgtaaggatgccctgcggcagcagctgcgcagcgctcgcgaggttattgcagtggtgatggatgtttttaccgatattgacatatttcgggatttgcaggagatctgccgaaagcagggcgtggccgtgtatatccttttagaccaggccttactgagccagttccttgacatgtgtatggacctgaaagtgcaccctgaacaagaaaaactcatgactgtgagaaccatcactggaaatatctactacgcaagaagtggtacgaagatcattggcaaggtacacgaaaagttcactctaatcgacgggatcagggtggccacagggtcctacagcttcacgtggacggacggtaaacttaattcctctaatcttgttatcttgagtggacaggtggtcgagcactttgacctcgagttcagaatcctgtacgcacagtccaaaccaattagtcctaagcttttgagccactttcagtccagcaataaattcgaccacctaactaatcgaaagccccaaagtaaagagcttacgttaggcaatctccttaggatgaggctggcacgactgtccagcactcccaggaaagcagatctcgatcccgagatgccagctgaggggaaggccgagcggaaaccccacgattgtgagagctccaccgtctccgaagaggattacttcagttctcatagggacgagctgcaatccagaaaggcaattgatgctgccacacagactgagcccggagaagagatgcctggcctttctgtatctgaagttggtacacaaacttctattacaacagcctgtgccggcacccaaacagccgttatcacccgtattgcctcaagccagaccaccatctggagcagatcaacaactacccagaccgacatggacgaaaatattcttttccctcggggaacgcaaagcacggaggggtctccagtgagtaaaatgagcgtgtcccgaagttctagtctgaagtccagctcttccgtgtccagtcagggctctgtggcctcttcaactggaagtccagcttccattaggaccacggatttccataaccccggatacccaaagtacttaggaacacctcacctcgagctgtacttatctgactcccttcggaatctcaacaaagaaagacaatttcactttgcaggcattaggtctagacttaatcatatgctcgccatgctctcgcggcgcacacttttcactgaaaatcacctgggcctgcactctggaaatttctctcgggtgaacttactagctgtgcgagacgtggctttatatccttcatatcaatag

SEQ ID NO: 220665 - DNA, 1848 bp, Artificial Sequence
  derived and/or modified sequence
atggcaagagcctgcctgattcaacgtctccctattaaaagagactgcacacccgttttcgtgaggggcttgagctctccgtcggctgccatggccttgctgagtgaaggcctggacgaagttccagcagcctgtttatcgccctgtggccctcctaatcccactgagttgttcagtgagtcaagacgactcgcacttgaagagttagttgctggcggacctgaggccttcgccgcttttctccggagagagagactagcaaggtttctgaaccccgacgaggttcacgcaatactgcgtgccgcagagaggcctggcgaggagggggcagctgctgcagccgctgcagaagacagctttggcagctcgcatgattgtagtagcgggacatacttcccagagcaatccgacctcgagccacctttactcgagctgggttggccagctttttatcaaggggcataccggggagcaactcgggttgagacccactttcagccgcgaggagccggagaaggaggtccgtacggatgtaaggacgcgctccggcagcaacttagatctgccagagaggtaatcgccgtggtgatggatgtgtttacagatatcgatatttttagagatttgcaagaaatttgcaggaagcagggggtcgccgtgtacattctgctagatcaggctttactctcacagtttttagacatgtgtatggatcttaaggtgcatcccgagcaagagaagctgatgactgtgcggaccattacgggcaacatatactacgccagatctggtactaaaatcattggcaaagtgcacgagaaatttacccttatcgatggcatccgtgtggccaccgggtcgtattccttcacctggacagacgggaaattgaactcttcgaatctggtgatactctctgggcaggttgtcgagcacttcgaccttgaatttagaattctatacgcccagtctaaaccaatcagccctaaacttttaagtcatttccagagtagcaataaattcgatcatcttacaaatagaaaaccgcagtccaaggaactcactctcgggaatttgttgcgtatgaggctggcacggttgagctctactccaagaaaagccgacttggatccagaaatgcctgcagaaggaaaggcggaacggaaaccacatgactgcgagtcaagcacagtgtctgaggaagactacttctctagtcaccgggatgaattacagagtcgtaaagccatcgatgcagcaacccagaccgaaccaggagaagaaatgcccggtttgagcgtgtcagaggttggaactcagactagcatcacaactgcctgtgccggaactcaaactgccgtgatcacacggattgcatcctctcagactacaatctggtcacgcagcaccactactcagacagatatggacgagaacatattatttccacggggaacccaaagcacggaagggtccccagtctctaaaatgagtgtgagtcggagcagttctctgaagtcatcgtcatccgtcagctcgcagggatctgtcgcctcctccactggaagtccagcgagcatcaggacgaccgatttccataacccaggttaccctaagtacctcggtacgcctcacctcgagctttacctgtcagattccctgcgaaatctcaacaaagaacggcagttccacttcgctgggattaggagccgactgaatcacatgctggctatgctctctcgtcggactctgtttactgaaaatcatttagggctgcactccggcaacttctcccgagtgaacctgcttgccgtccgcgacgttgccttatacccgagctaccagtag

SEQ ID NO: 220666 - DNA, 1848 bp, Artificial Sequence
  derived and/or modified sequence
atggccagagcctgcctgatccagagactgcccatcaagagagactgcacccccgtgttcgtgagaggcctgagcagccccagcgccgccatggccctgctgagcgagggcctggacgaggtgcccgccgcctgcctgagcccctgcggcccccccaaccccaccgagctgttcagcgagagcagaagactggccctggaggagctggtggccggcggccccgaggccttcgccgccttcctgagaagagagagactggccagattcctgaaccccgacgaggtgcacgccatcctgagagccgccgagagacccggcgaggagggcgccgccgccgccgccgccgccgaggacagcttcggcagcagccacgactgcagcagcggcacctacttccccgagcagagcgacctggagccccccctgctggagctgggctggcccgccttctaccagggcgcctacagaggcgccaccagagtggagacccacttccagcccagaggcgccggcgagggcggcccctacggctgcaaggacgccctgagacagcagctgagaagcgccagagaggtgatcgccgtggtgatggacgtgttcaccgacatcgacatcttcagagacctgcaggagatctgcagaaagcagggcgtggccgtgtacatcctgctggaccaggccctgctgagccagttcctggacatgtgcatggacctgaaggtgcaccccgagcaggagaagctgatgaccgtgagaaccatcaccggcaacatctactacgccagaagcggcaccaagatcatcggcaaggtgcacgagaagttcaccctgatcgacggcatcagagtggccaccggcagctacagcttcacctggaccgacggcaagctgaacagcagcaacctggtgatcctgagcggccaggtggtggagcacttcgacctggagttcagaatcctgtacgcccagagcaagcccatcagccccaagctgctgagccacttccagagcagcaacaagttcgaccacctgaccaacagaaagccccagagcaaggagctgaccctgggcaacctgctgagaatgagactggccagactgagcagcacccccagaaaggccgacctggaccccgagatgcccgccgagggcaaggccgagagaaagccccacgactgcgagagcagcaccgtgagcgaggaggactacttcagcagccacagagacgagctgcagagcagaaaggccatcgacgccgccacccagaccgagcccggcgaggagatgcccggcctgagcgtgagcgaggtgggcacccagaccagcatcaccaccgcctgcgccggcacccagaccgccgtgatcaccagaatcgccagcagccagaccaccatctggagcagaagcaccaccacccagaccgacatggacgagaacatcctgttccccagaggcacccagagcaccgagggcagccccgtgagcaagatgagcgtgagcagaagcagcagcctgaagagcagcagcagcgtgagcagccagggcagcgtggccagcagcaccggcagccccgccagcatcagaaccaccgacttccacaaccccggctaccccaagtacctgggcaccccccacctggagctgtacctgagcgacagcctgagaaacctgaacaaggagagacagttccacttcgccggcatcagaagcagactgaaccacatgctggccatgctgagcagaagaaccctgttcaccgagaaccacctgggcctgcacagcggcaacttcagcagagtgaacctgctggccgtgagagacgtggccctgtaccccagctaccagtag

SEQ ID NO: 220667 - protein, 289 aa, Artificial Sequence
  derived and/or modified sequence
MEPAAGIQRRSSQGPTVPPPPRGHAPPAAAPGPAPLSSPVREPPQLEEERQVRISESGQFSDGLEDRGLLESSTRLKPHEAQNYRKKALWVSWFSIIVTLALAVAAFTVSVMRYSASAFGFAFDAILDVLSSAIVLWRYSNAAAVHSAHREYIACVILGVIFLLSSICIVVKAIHDLSTRLLPEVDDFLFSVSILSGILCSILAVLKFMLGKVLTSRALITDGFNSLVGGVMGFSILLSAEVFKHDSAVWYLDGSIGVLIGLTIFAYGVKLLIDMVPRVRQTRHYEMFE

SEQ ID NO: 220668 - protein, 92 aa, Artificial Sequence
  derived and/or modified sequence
CGMSRSGLLESSTRLKPHEAQNYRKKALWVSWFSIIVTLALAVAAFTVSVMRYSASAFGFAFDAILDVLSSAIVLWRYSNAAAVHSAHREYM

SEQ ID NO: 220669 - DNA, 870 bp, Artificial Sequence
  derived and/or modified sequence
atggagcccgccgccggcatccagagaagaagcagccagggccccaccgtgccccccccccccagaggccacgccccccccgccgccgcccccggccccgcccccctgagcagccccgtgagagagcccccccagctggaggaggagagacaggtgagaatcagcgagagcggccagttcagcgacggcctggaggacagaggcctgctggagagcagcaccagactgaagccccacgaggcccagaactacagaaagaaggccctgtgggtgagctggttcagcatcatcgtgaccctggccctggccgtggccgccttcaccgtgagcgtgatgagatacagcgccagcgccttcggcttcgccttcgacgccatcctggacgtgctgagcagcgccatcgtgctgtggagatacagcaacgccgccgccgtgcacagcgcccacagagagtacatcgcctgcgtgatcctgggcgtgatcttcctgctgagcagcatctgcatcgtggtgaaggccatccacgacctgagcaccagactgctgcccgaggtggacgacttcctgttcagcgtgagcatcctgagcggcatcctgtgcagcatcctggccgtgctgaagttcatgctgggcaaggtgctgaccagcagagccctgatcaccgacggcttcaacagcctggtgggcggcgtgatgggcttcagcatcctgctgagcgccgaggtgttcaagcacgacagcgccgtgtggtacctggacggcagcatcggcgtgctgatcggcctgaccatcttcgcctacggcgtgaagctgctgatcgacatggtgcccagagtgagacagaccagacactacgagatgttcgagtag

SEQ ID NO: 220670 - DNA, 870 bp, Artificial Sequence
  derived and/or modified sequence
atggagcccgcggcagggatccagaggcgatcctcacaaggcccgactgtacccccaccaccccgggggcatgcaccccctgccgccgcgcctgggcccgcgcctctgagtagcccggtaagggaaccgccgcagctcgaggaagaaaggcaggtgaggatctcagagtcgggtcagttctcagacggactcgaggataggggcttactggagtcgagtactaggctgaagcctcacgaggctcaaaactatcggaagaaagccctgtgggttagttggttctccattatcgttaccctggcactggcggtagctgcgttcaccgtgagtgtgatgaggtactccgccagtgcatttggcttcgcctttgacgccattctggacgttctgagctccgcaatcgtgctttggaggtatagtaacgctgctgctgttcacagtgcccaccgagaatacattgcttgtgttatactgggtgtgatctttctgctgtccagcatctgcatcgtagtgaaggccatacacgatctatcaactaggctgctccctgaggttgatgacttcctgtttagcgtgtcaatcctctctggcattttgtgctcgatcctcgccgtgctcaagtttatgctgggtaaggtgctaacaagcagggcacttatcacggacggctttaattcgttagtaggtggtgtgatgggtttttctattctcctgtcagctgaggtgttcaagcacgactccgccgtgtggtacctggatggatcaatcggcgtactgattggactaactattttcgcatatggtgtcaagctgctgattgacatggtcccccgcgtgcggcagacacgccactatgaaatgtttgagtag

SEQ ID NO: 220671 - DNA, 870 bp, Artificial Sequence
  derived and/or modified sequence
atggagcctgctgctggcatccagaggaggagcagccagggccccaccgtgcccccaccaccccggggccacgcccccccagctgctgcccctggccctgcccccctgagcagccctgtgcgggagcccccccagctggaggaggagcggcaggtgcgcatcagcgagagcggccagttcagtgatggcctggaggaccggggcctgctggagagcagcacccggctgaagccccatgaggcccagaactacaggaagaaggccctgtgggtgtcctggttcagcatcatcgtgaccctggccctggccgtggccgccttcaccgtgtctgtgatgagatacagcgccagcgcctttggatttgcctttgatgccatcctggatgtgctgagcagcgccatcgtgctgtggagatacagcaatgctgctgctgtgcacagcgcccaccgggagtacatcgcctgtgtgatcctgggcgtcatcttcctgctgagcagcatctgcatcgtggtgaaggccatccatgacctgagcacccggctgctgcctgaggtggatgacttcctgttctctgtgtccatcctgagcggcatcctgtgcagcatcctggccgtgctgaagttcatgctgggcaaggtgctgaccagccgggccctgatcacagatggcttcaacagcctggtgggcggcgtgatgggcttcagcatcctgctgtctgctgaggtgttcaagcatgattctgctgtgtggtacctggatggcagcattggagtgctgattggcctgaccatctttgcctatggagtgaagctgctgattgacatggtgccccgggtgcggcagaccaggcactatgagatgtttgaatag

SEQ ID NO: 220672 - DNA, 870 bp, Artificial Sequence
  derived and/or modified sequence
atggagcccgccgccggcatccagcggcggagcagccagggccccaccgtaccacccccacctagaggacatgctccgcccgcagcagcaccgggcccagccccgttgtcgtcacctgtgcgtgagcccccgcagctcgaggaggagcgtcaagttcgaatctctgagtctgggcaattcagtgatggattggaagaccggggtcttttggaaagtagtaccagactgaagccccacgaggcacagaactaccggaagaaggcactctgggtatcttggttctcaatcatcgttacactcgctctggccgtcgctgcatttactgtctctgtgatgcgctactctgcctctgcgttcggcttcgccttcgacgcgattcttgatgtgctctccagcgccatcgtgctatggagatactctaatgctgcggctgtccattcagcccaccgcgagtacatcgcctgtgtcatcctgggcgtgatatttcttctatcgagcatctgtattgtcgtgaaggccattcacgatctgtcaactaggctccttccggaggtggacgacttcctgtttagcgtatccatcctgagcgggatcctctgcagtatcttagcagtcctcaaattcatgttgggaaaggttttaacctctagggcacttatcaccgatggcttcaatagcctcgtaggcggggtgatggggttttctattctactcagtgccgaggtgtttaagcacgactcagccgtgtggtatctggatggaagcattggagtcttgatcggcttgaccatctttgcctatggagtcaaactgcttattgatatggttcccagggttaggcagacgaggcactacgaaatgttcgagtag

SEQ ID NO: 220673 - DNA, 870 bp, Artificial Sequence
  derived and/or modified sequence
atggagcccgcagccggaatccaaagaaggtcatcacaggggccaactgtcccccctcctcctagagggcatgcgccacccgctgcagcccctggcccagccccactgagctcacccgtgcgggaacccccacagctggaagaagagaggcaggtccgtatcagtgaatctggccaattctccgatggcttagaagatagaggcctgctggagagctcaactcggttgaagcctcacgaggctcagaattatagaaagaaagcactatgggtttcatggttctccataattgtcacgctggcattggccgtagccgcatttacagtgtctgtcatgcggtatagcgcttctgcatttggattcgcatttgacgctatactggatgtgctaagctccgcgattgtgctgtggcgctattctaatgccgctgcagttcacagcgcacatcgcgagtatattgcttgcgtgatcttgggggtgatattcctgctgtccagcatctgcatcgtggtgaaggcaatccacgatctatctaccagattgcttcccgaagtagacgactttctcttttcagtgtccatcctctctgggattctatgttctattctggctgtgctcaagtttatgctgggcaaggtcctgacaagtcgcgctctcatcactgacgggtttaacagtttagtgggcggagtgatgggtttttccattctcctcagtgctgaggtctttaaacatgatagcgcagtgtggtatctcgacgggagcataggggtgctaatcggtttgacaatatttgcctatggtgtgaaactcttgatcgacatggtaccgagggtgcggcaaacacgccattacgagatgtttgaatag

SEQ ID NO: 220674 - DNA, 1892 bp, Artificial Sequence
  derived and/or modified sequence
gcacttctgactcgagtccccgccgcgcttgtcgtcgccgccgccgggatccgcagccccgcgccatggagccggccgcgggcatccagcgccgcagctcccaggggcccaccgtcccgccgccgccccggggccacgcgccaccggctgccgcccccggcccggccccgctgagctccccggtgcgcgagccgccccagctggaggaggagcggcaggtgcggatcagcgagagcggccagttcagcgacgggctggaggaccgaggcttactagaaagcagcacccgcctgaaacctcacgaagcccagaactacaggaagaaggcattgtgggtgtcctggttctccatcattgtcaccctggccctcgcggtggctgcctttactgtctccgttatgaggtacagcgcctctgcttttgggtttgcatttgatgccatcctggacgtcctgtcatcggcgattgtcctgtggcgttacagcaacgcggccgctgtgcactctgcccatagggagtacatagcctgtgtcatcttgggggtgatattccttctgtcatccatatgtatagtggtcaaagccatccatgacctctcaactaggctgctcccagaagtggacgatttcctgttcagtgtctccattttaagtgggattctttgcagcatcctggccgtgttgaagttcatgctggggaaggttctgaccagtagagcactcataacagatgggtttaactccctcgtgggtggcgtgatgggcttctccattcttctgagcgcggaagtgttcaagcatgactcggcggtctggtacctggacggcagcataggcgttctgatcggcctcaccatatttgcctatggggtcaaactcctcatcgacatggtgccgagggtgaggcagacacgtcactacgagatgtttgagtgaagggggccagcatccgcatgagaccatcgagatgaggagtttccacataggcaaagggtgccaatatttaactgaacatctggtttctttttggaagttttctttcacatggtttgtcattacaagacaaggtctgcccagccaggtggatctaccttgcccccatcacctgccgcccccatcaaacatgttgggacaatgcccataggaatggacctccttccccgtctccagctgggactggcgttttttagtctctggagtatgatggttctcatgggtaggatgagatctttggcagaaaggtcttcggtggtgctctgagcctgcgctgcataggactgagcagacccacctcctccagcttgggtggccctgccactcctggttccaagtctctcctttcctggcaggtcttaagggaagattgtacccctcaccctttacatacccagaatcatcagtatgtcacttcctaatttctatcagtgtatctcattatttcatactgttttactaatcctaagtctaaacagatttgctcaaaaggagaccattctattttttaaagtacttagtgatacacgtataagctttgcatggacgaattaaataagcacattgaccttttcttgtacattcagaacctgaacatccatgtgaaaactgggtccatttttgagagatgtgaaactacagtttatttgtaataaataaatataatctatccgtatatgcatatatctatatgctgtgttaagtggtaatgggtacattacagtctgtgagagatggatcgctccctctgtaaggaacaagacgttctcagctgatgtcacggtaggtttagattctgtagagtgttccccaacccgcaccgttctgtacctctcacaccactgcttgcccgggcagtagtggctgaccaataaagacctttacctgttttgtatggca

SEQ ID NO: 220675 - protein, 213 aa, Artificial Sequence
  derived and/or modified sequence
MHYYRYSNAKVSCWYKYLLFSYNIIFWLAGVVFLGVGLWAWSEKGVLSDLTKVTRMHGIDPVVLVLMVGVVMFTLGFAGCVGALRENICLLNFNQCCGAYGPEDWDLNVYFNCSGASYSREKCGVPFSCCVPDPAQKVVNTQCGYDVRIQLKSKWDESIFTKGCIQALESWLPRNIYIVAGVFIAISLLQIFGIFLARTLISDIEAVKAGHHF

SEQ ID NO: 220676 - protein, 270 aa, Artificial Sequence
  derived and/or modified sequence
MHYYRYSNAKVSCWYKYLLFSYNIIFWLAGVVFLGVGLWAWSEKGVLSDLTKVTRMHGIDPVVLVLMVGVVMFTLGFAGCVGALRENICLLNFFCGTIVLIFFLELAVAVLAFLFQDWVRDRFREFFESNIKSYRDDIDLQNLIDSLQKANQCCGAYGPEDWDLNVYFNCSGASYSREKCGVPFSCCVPDPAQKVVNTQCGYDVRIQLKSKWDESIFTKGCIQALESWLPRNIYIVAGVFIAISLLQIFGIFLARTLISDIEAVKAGHHF

SEQ ID NO: 220677 - protein, 149 aa, Artificial Sequence
  derived and/or modified sequence
MHYYRYSNAKVSCWYKYLLFSYNIIFWLAGVVFLGVGLWAWSEKGVLSDLTKVTRMHGIDPVVLVHPLSGSCQRYFSCPVFLSLAFLSHPKNLPRPYGSLPFFPRQLLIWAVCTPSFAPPTMPHVAESCLSQLSTLAFFSLCSTRHCTS

SEQ ID NO: 220678 - protein, 253 aa, Artificial Sequence
  derived and/or modified sequence
MHYYRYSNAKVSCWYKYLLFSYNIIFWGVLSDLTKVTRMHGIDPVVLVLMVGVVMFTLGFAGCVGALRENICLLNFFCGTIVLIFFLELAVAVLAFLFQDWVRDRFREFFESNIKSYRDDIDLQNLIDSLQKANQCCGAYGPEDWDLNVYFNCSGASYSREKCGVPFSCCVPDPAQKVVNTQCGYDVRIQLKSKWDESIFTKGCIQALESWLPRNIYIVAGVFIAISLLQIFGIFLARTLISDIEAVKAGHHF

SEQ ID NO: 220679 - DNA, 642 bp, Artificial Sequence
  derived and/or modified sequence
atgcactactacagatacagcaacgccaaggtgagctgctggtacaagtacctgctgttcagctacaacatcatcttctggctggccggcgtggtgttcctgggcgtgggcctgtgggcctggagcgagaagggcgtgctgagcgacctgaccaaggtgaccagaatgcacggcatcgaccccgtggtgctggtgctgatggtgggcgtggtgatgttcaccctgggcttcgccggctgcgtgggcgccctgagagagaacatctgcctgctgaacttcaaccagtgctgcggcgcctacggccccgaggactgggacctgaacgtgtacttcaactgcagcggcgccagctacagcagagagaagtgcggcgtgcccttcagctgctgcgtgcccgaccccgcccagaaggtggtgaacacccagtgcggctacgacgtgagaatccagctgaagagcaagtgggacgagagcatcttcaccaagggctgcatccaggccctggagagctggctgcccagaaacatctacatcgtggccggcgtgttcatcgccatcagcctgctgcagatcttcggcatcttcctggccagaaccctgatcagcgacatcgaggccgtgaaggccggccaccacttctag

SEQ ID NO: 220680 - DNA, 813 bp, Artificial Sequence
  derived and/or modified sequence
atgcactactacagatacagcaacgccaaggtgagctgctggtacaagtacctgctgttcagctacaacatcatcttctggctggccggcgtggtgttcctgggcgtgggcctgtgggcctggagcgagaagggcgtgctgagcgacctgaccaaggtgaccagaatgcacggcatcgaccccgtggtgctggtgctgatggtgggcgtggtgatgttcaccctgggcttcgccggctgcgtgggcgccctgagagagaacatctgcctgctgaacttcttctgcggcaccatcgtgctgatcttcttcctggagctggccgtggccgtgctggccttcctgttccaggactgggtgagagacagattcagagagttcttcgagagcaacatcaagagctacagagacgacatcgacctgcagaacctgatcgacagcctgcagaaggccaaccagtgctgcggcgcctacggccccgaggactgggacctgaacgtgtacttcaactgcagcggcgccagctacagcagagagaagtgcggcgtgcccttcagctgctgcgtgcccgaccccgcccagaaggtggtgaacacccagtgcggctacgacgtgagaatccagctgaagagcaagtgggacgagagcatcttcaccaagggctgcatccaggccctggagagctggctgcccagaaacatctacatcgtggccggcgtgttcatcgccatcagcctgctgcagatcttcggcatcttcctggccagaaccctgatcagcgacatcgaggccgtgaaggccggccaccacttctag

SEQ ID NO: 220681 - DNA, 672 bp, Artificial Sequence
  derived and/or modified sequence
atggagagaaaggtgctgccctgcttcctgtgcctgttccagggcgtgctgagcgacctgaccaaggtgaccagaatgcacggcatcgaccccgtggtgctggtgctgatggtgggcgtggtgatgttcaccctgggcttcgccggctgcgtgggcgccctgagagagaacatctgcctgctgaacttcttctgcggcaccatcgtgctgatcttcttcctggagctggccgtggccgtgctggccttcctgttccaggactgggtgagagacagattcagagagttcttcgagagcaacatcaagagctacagagacgacatcgacctgcagaacctgatcgacagcctgcagaaggccaaccagtgctgcggcgcctacggccccgaggactgggacctgaacgtgtacttcaactgcagcggcgccagctacagcagagagaagtgcggcgtgcccttcagctgctgcgtgcccgaccccgcccagaaggtggtgaacacccagtgcggctacgacgtgagaatccagctgaagagcaagtgggacgagagcatcttcaccaagggctgcatccaggccctggagagctggctgcccagaaacatctacatcgtggccggcgtgttcatcgccatcagcctgctgcagatcttcggcatcttcctgtag

SEQ ID NO: 220682 - DNA, 450 bp, Artificial Sequence
  derived and/or modified sequence
atgcactactacagatacagcaacgccaaggtgagctgctggtacaagtacctgctgttcagctacaacatcatcttctggctggccggcgtggtgttcctgggcgtgggcctgtgggcctggagcgagaagggcgtgctgagcgacctgaccaaggtgaccagaatgcacggcatcgaccccgtggtgctggtgcaccccctgagcggcagctgccagagatacttcagctgccccgtgttcctgagcctggccttcctgagccaccccaagaacctgcccagaccctacggcagcctgcccttcttccccagacagctgctgatctgggccgtgtgcacccccagcttcgccccccccaccatgccccacgtggccgagagctgcctgagccagctgagcaccctggccttcttcagcctgtgcagcaccagacactgcaccagctag

SEQ ID NO: 220683 - DNA, 762 bp, Artificial Sequence
  derived and/or modified sequence
atgcactactacagatacagcaacgccaaggtgagctgctggtacaagtacctgctgttcagctacaacatcatcttctggggcgtgctgagcgacctgaccaaggtgaccagaatgcacggcatcgaccccgtggtgctggtgctgatggtgggcgtggtgatgttcaccctgggcttcgccggctgcgtgggcgccctgagagagaacatctgcctgctgaacttcttctgcggcaccatcgtgctgatcttcttcctggagctggccgtggccgtgctggccttcctgttccaggactgggtgagagacagattcagagagttcttcgagagcaacatcaagagctacagagacgacatcgacctgcagaacctgatcgacagcctgcagaaggccaaccagtgctgcggcgcctacggccccgaggactgggacctgaacgtgtacttcaactgcagcggcgccagctacagcagagagaagtgcggcgtgcccttcagctgctgcgtgcccgaccccgcccagaaggtggtgaacacccagtgcggctacgacgtgagaatccagctgaagagcaagtgggacgagagcatcttcaccaagggctgcatccaggccctggagagctggctgcccagaaacatctacatcgtggccggcgtgttcatcgccatcagcctgctgcagatcttcggcatcttcctggccagaaccctgatcagcgacatcgaggccgtgaaggccggccaccacttctag

SEQ ID NO: 220684 - DNA, 642 bp, Artificial Sequence
  derived and/or modified sequence
atgcactactataggtacagcaatgccaaggtgagttgctggtataagtacctgctgtttagctataatatcattttttggttggccggcgttgtgtttctcggggtggggctgtgggcttggtccgagaagggcgtactttcggatctcaccaaggtgacacgcatgcatgggatcgacccagtggtgctagtcctgatggtgggggtcgtcatgtttactttaggtttcgctggttgcgtaggtgcccttagagaaaacatctgcctcttgaactttaatcagtgttgtggcgcttatgggcccgaagactgggacctgaacgtctactttaactgttccggggcttcatactcgagagagaaatgcggcgtcccgttcagctgctgcgtgccagaccctgctcagaaggtggtgaacacgcagtgcgggtacgatgtacggattcagttgaaatccaagtgggacgaaagcatcttcaccaaagggtgcatccaggccctcgaatcatggttaccacggaatatatacattgtcgctggcgtgttcattgccatctcactcctgcaaatttttgggattttcctagcacggaccctcatctctgacattgaggccgtgaaagcaggacatcatttttag

SEQ ID NO: 220685 - DNA, 813 bp, Artificial Sequence
  derived and/or modified sequence
atgcattattacagatatagcaacgccaaagtatcctgttggtataagtatcttcttttcagctacaatatcattttttggctggccggagtggtttttttaggcgtgggactgtgggcttggtctgaaaagggggtgttgtcggacctaacgaaagtgaccagaatgcatggaatcgacccagtggtactcgtgttaatggtgggggtcgtgatgttcaccctgggattcgccggctgcgtcggggctcttcgggagaatatatgcctgctgaatttcttttgtggcacaatcgttctgatcttctttctggagctggcagttgcagtgttagcttttctgttccaggactgggtacgcgatcgttttagagaatttttcgagagcaatattaaaagctaccgcgacgacatcgacctgcagaatttgattgacagtttgcagaaggccaatcaatgttgcggcgcctatggccccgaggattgggatctgaatgtctattttaactgttctggagctagctactctagggaaaagtgcggagtcccttttagctgctgtgtccctgatcctgctcagaaggtggtgaatacccagtgcggttatgacgtgaggatccagcttaagtcaaagtgggatgagtccatcttcacaaaggggtgcatccaggcattggaatcatggttacccaggaacatatacatcgtggctggagtgtttatcgctattagccttttgcagattttcggtatctttctggctaggacattaatcagcgatatcgaagccgtcaaggcaggtcaccatttttag

SEQ ID NO: 220686 - DNA, 672 bp, Artificial Sequence
  derived and/or modified sequence
atggagcgcaaagtgctgccatgcttcttatgcctgttccagggcgtactgtctgacttgacaaaggtgactaggatgcatggcatcgatccagtggttcttgttcttatggttggcgttgtcatgttcaccctgggctttgcaggctgcgtgggcgctttgcgggaaaacatatgcctgctgaactttttctgcggaaccatagtgttgatcttcttccttgagctggccgtggcagtgctggcgttcctttttcaggactgggtgagggaccgctttcgcgagttctttgaaagcaacattaagtcgtatcgcgacgatatcgacctgcagaacttgatcgactctctgcaaaaagcaaatcaatgctgcggggcttatggaccagaagattgggacctcaatgtgtacttcaactgctcaggagcctcctattctcgcgaaaaatgtggagtacccttctcatgctgcgttcccgaccctgcacagaaagttgtgaacacccagtgcgggtacgacgtgaggatacagcttaaatcaaaatgggacgaatccatcttcactaagggctgcatccaggcattggagagttggcttccacggaatatttatatagtggcaggggtgttcattgcaatttcactccttcaaatctttgggatctttctgtag

SEQ ID NO: 220687 - DNA, 813 bp, Artificial Sequence
  derived and/or modified sequence
atgcactactaccgctatagcaatgctaaggtgtcttgttggtacaaataccttctcttctcctacaatattattttttggctggcaggagttgtgtttctgggcgttggcttatgggcctggtccgagaaaggtgtgctctctgacctgacaaaggtgaccaggatgcatgggattgaccccgtggtgcttgtgctgatggttggtgtagttatgtttacactcggcttcgccgggtgtgtcggggcactgcgagaaaacatatgtctgctgaactttttctgtggtacaatagtgctgattttctttctggaattagccgtggcggttctggctttcttgttccaggattgggttagagatcgcttccgggagttttttgaaagcaacatcaagtcttatcgcgacgacatcgatctacagaacttgattgatagtctgcagaaggctaatcagtgttgtggggcttatggccctgaggattgggaccttaacgtctatttcaattgctctggtgcatcttacagccgcgaaaaatgcggggtaccatttagctgctgcgtgcccgatcctgcacagaaagtcgttaacacgcaatgcggttacgacgtcaggatccagctgaaatctaaatgggacgagagcatttttaccaagggctgcattcaagctctggagagttggctacccagaaatatctacatagtcgctggcgtgttcattgctataagtctcctccagatatttggaatattcttagccagaaccttaatctccgacatcgaggccgtgaaagccggccaccacttttag

SEQ ID NO: 220688 - DNA, 450 bp, Artificial Sequence
  derived and/or modified sequence
atgcactactatagatactccaacgccaaagtctcgtgttggtacaagtatctgttgttctcctacaatatcatcttctggttggcgggggttgtgttccttggagtcggcctgtgggcctggagcgaaaagggagtcttgagtgatctgacgaaggtcaccaggatgcatgggatagaccctgtggttctggtgcacccactctcgggctcctgccagcggtactttagctgtcccgtgttcctgagcctcgcattcctgtcgcatcctaaaaacctgcctcggccgtatgggagcttgccgttcttcccacgacagcttctgatctgggccgtgtgtacaccctccttcgcacccccaactatgcctcacgtggctgagagttgcctgtcccaactgtctaccttagctttcttctccctctgctcaacccgccactgcacctcttag

SEQ ID NO: 220689 - DNA, 762 bp, Artificial Sequence
  derived and/or modified sequence
atgcattactatagatatagtaacgccaaggtcagctgctggtacaagtacctgctgttttcttacaatataattttttggggcgtcctgtctgacttaaccaaggtcacccgaatgcatggaatcgaccccgtagtacttgtcctgatggttggcgtggttatgttcaccctcggattcgccggatgcgtgggagcattgcgggaaaacatctgcctgctgaatttcttctgcggtaccatcgtactaatcttcttcctagagttggcagtcgcagtgctggcatttttgttccaagactgggtgcgcgaccgctttagggagttttttgagtccaatattaagtcttaccgggatgatatagatttgcaaaatttaatcgacagccttcagaaagccaatcagtgttgcggcgcttatggacctgaggactgggatttgaacgtctacttcaactgcagcggagcatcatattctagggagaaatgtggagtccccttctcttgttgtgtacccgaccctgctcagaaggtggtcaacacccagtgcggctacgacgtccgaattcagttaaaatctaaatgggatgaaagtatctttactaaagggtgcatacaagccttagaatcatggctaccccgtaacatatacatcgtcgctggagtgttcatcgcaataagcctgctgcaaatcttcgggatcttcctggccaggacgctgataagcgacatcgaagccgtgaaagcggggcatcacttttag

SEQ ID NO: 220690 - DNA, 813 bp, Artificial Sequence
  derived and/or modified sequence
atgcactactataggtattccaatgccaaggttagctgctggtacaaatatttattgttttcttataacattattttctggcttgccggagttgtgtttctgggtgtcggcctgtgggcctggagtgagaaaggtgtgcttagcgacttaaccaaggtaactcggatgcatggtatagatcctgtggttctagtgcttatggtgggcgtggtaatgttcactctcggctttgccggctgcgtcggcgcgcttcgtgaaaatatctgtctcttgaatttcttctgtggaaccatagtgctgatttttttcctggagctggctgttgctgttctggctttcctgtttcaagattgggttagggacaggttccgagagttctttgagtctaacattaagagttacagagacgatatcgacctgcagaatttgattgatagcctgcaaaaagctaatcagtgttgcggagcttatggccctgaagactgggatctgaacgtgtactttaattgttccggcgcatcttactctcgggaaaaatgtggcgtgcctttcagctgttgcgtgccagaccccgcacaaaaggtggtcaacactcagtgtgggtacgacgtgcgaattcagctgaaatccaagtgggacgagtcaatcttcacgaagggctgcatccaggccctggagtcctggctgccaaggaacatttacatagtggctggagtgtttatcgctatttcactcctgcagatcttcggtatttttctggctaggaccttgatttctgacattgaagccgtcaaggcagggcaccacttttag

SEQ ID NO: 220691 - DNA, 642 bp, Artificial Sequence
  derived and/or modified sequence
atgcactactaccgctacagcaatgccaaggtgtcctgctggtacaagtacctgctcttctcctacaacatcatcttctggctggccggcgtggtgttcctgggcgtgggcctgtgggcctggagcgagaagggcgtgctgagtgacctgaccaaggtgaccaggatgcatggaattgatcctgtggtgctggtgctgatggtgggcgtggtgatgttcaccctgggctttgctggctgtgtgggcgccctgcgggagaacatctgcctgctgaacttcaaccagtgctgcggggcctacggccctgaggactgggacctgaatgtgtacttcaactgcagcggggccagctacagccgggagaagtgtggggtgcccttcagctgctgcgtgcctgaccctgcccagaaggtggtgaacacccagtgtggctatgatgtgcgcatccagctgaagagcaagtgggatgagagcatcttcaccaagggctgcatccaggccctggagagctggctgcccaggaacatctacatcgtggccggggtcttcatcgccatcagcctgctgcagatcttcggcatcttcctggcccggaccctcatcagtgacatcgaggccgtgaaggccggccaccacttctag

SEQ ID NO: 220692 - DNA, 813 bp, Artificial Sequence
  derived and/or modified sequence
atgcactactaccgctacagcaatgccaaggtgtcctgctggtacaagtacctgctcttctcctacaacatcatcttctggctggccggcgtggtgttcctgggcgtgggcctgtgggcctggagcgagaagggcgtgctgagtgacctgaccaaggtgaccaggatgcatggaattgatcctgtggtgctggtgctgatggtgggcgtggtgatgttcaccctgggctttgctggctgtgtgggcgccctgcgggagaacatctgcctgctgaacttcttctgtggcaccatcgtgctgatcttcttcctggagctggccgtggccgtgctggccttcctgttccaggactgggtgcgggaccgcttccgggagttctttgagagcaacatcaagagctacagagatgacatcgacctgcagaacctgattgacagcctgcagaaggccaaccagtgctgcggggcctacggccctgaggactgggacctgaatgtgtacttcaactgcagcggggccagctacagccgggagaagtgtggggtgcccttcagctgctgcgtgcctgaccctgcccagaaggtggtgaacacccagtgtggctatgatgtgcgcatccagctgaagagcaagtgggatgagagcatcttcaccaagggctgcatccaggccctggagagctggctgcccaggaacatctacatcgtggccggggtcttcatcgccatcagcctgctgcagatcttcggcatcttcctggcccggaccctcatcagtgacattgaagctgtgaaggccggccaccacttctag

SEQ ID NO: 220693 - DNA, 672 bp, Artificial Sequence
  derived and/or modified sequence
atggagaggaaggtgctgccctgcttcctgtgcctcttccagggcgtgctgagtgacctgaccaaggtgaccaggatgcatggaattgatcctgtggtgctggtgctgatggtgggcgtggtgatgttcaccctgggctttgctggctgtgtgggcgccctgcgggagaacatctgcctgctgaacttcttctgtggcaccatcgtgctgatcttcttcctggagctggccgtggccgtgctggccttcctgttccaggactgggtgcgggaccgcttccgggagttctttgagagcaacatcaagagctacagagatgacatcgacctgcagaacctgattgacagcctgcagaaggccaaccagtgctgcggggcctacggccctgaggactgggacctgaatgtgtacttcaactgcagcggggccagctacagccgggagaagtgtggggtgcccttcagctgctgcgtgcctgaccctgcccagaaggtggtgaacacccagtgtggctatgatgtgcgcatccagctgaagagcaagtgggatgagagcatcttcaccaagggctgcatccaggccctggagagctggctgcccaggaacatctacatcgtggccggggtcttcatcgccatcagcctgctgcagatcttcggcatcttcctgtag

SEQ ID NO: 220694 - DNA, 450 bp, Artificial Sequence
  derived and/or modified sequence
atgcactactaccgctacagcaatgccaaggtgtcctgctggtacaagtacctgctcttctcctacaacatcatcttctggctggccggcgtggtgttcctgggcgtgggcctgtgggcctggagcgagaagggcgtgctgagtgacctgaccaaggtgaccaggatgcatggaattgatcctgtggtgctggtgcaccccctgagcggcagctgccagcgctacttcagctgccctgtgttcctgagcctggccttcctgagccaccccaagaacctgccccggccctacggcagcctgcccttcttcccccggcagctgctgatctgggccgtgtgcacccccagctttgccccacccaccatgccccacgtggccgagagctgcctgagccagctgagcaccctggccttcttcagcctgtgcagcaccaggcactgcaccagctag

SEQ ID NO: 220695 - DNA, 762 bp, Artificial Sequence
  derived and/or modified sequence
atgcactactaccgctacagcaatgccaaggtgtcctgctggtacaagtacctgctcttctcctacaacatcatcttctggggcgtgctgagtgacctgaccaaggtgaccaggatgcacggcatcgaccctgtggtgctggtgctgatggtgggcgtggtgatgttcaccctgggctttgctggctgtgtgggcgccctgcgggagaacatctgcctgctgaacttcttctgtggcaccatcgtgctgatcttcttcctggagctggccgtggccgtgctggccttcctgttccaggactgggtgcgggaccgcttccgggagttctttgagagcaacatcaagagctacagagatgacatcgacctgcagaacctgattgacagcctgcagaaggccaaccagtgctgcggggcctacggccctgaggactgggacctgaatgtgtacttcaactgcagcggggccagctacagccgggagaagtgtggggtgcccttcagctgctgcgtgcctgaccctgcccagaaggtggtgaacacccagtgtggctatgatgtgcgcatccagctgaagagcaagtgggatgagagcatcttcaccaagggctgcatccaggccctggagagctggctgcccaggaacatctacatcgtggccggggtcttcatcgccatcagcctgctgcagatcttcggcatcttcctggcccggaccctcatcagtgacatcgaggccgtgaaggccggccaccacttctag

SEQ ID NO: 220696 - DNA, 642 bp, Artificial Sequence
  derived and/or modified sequence
atgcactactaccggtacagcaacgccaaggtgagctgctggtacaaatatttgctgttttcatacaacatcattttttggttggccggcgtggtttttcttggagtcgggctgtgggcatggagtgagaagggcgtgctgagtgatctcactaaggtgacaaggatgcatgggatcgacccggtggtgctggtcctcatggtgggggtggtgatgtttaccttggggtttgccggatgtgttggggcccttagggaaaatatatgccttttaaacttcaaccagtgttgcggcgcctatggtcctgaggattgggatctcaatgtttacttcaactgctcaggcgcttcatattctagagaaaagtgcggcgtgcctttcagctgttgtgtgccagaccctgcacaaaaagttgtgaatacgcagtgtgggtacgatgtcagaatccagttaaaatctaaatgggatgaatccatcttcaccaaggggtgcatccaggctttggaatcttggctgccaagaaacatatacattgtcgctggggtgtttatcgcgatttcgttgctccagattttcggaatattcttagctaggacgctgataagtgacatcgaagctgtgaaggctgggcaccatttttag

SEQ ID NO: 220697 - DNA, 813 bp, Artificial Sequence
  derived and/or modified sequence
atgcactactaccggtacagcaacgccaaggtgagctgctggtacaaatatctgttattttcctacaatatcatcttctggctggccggagtcgtgttcctgggtgtgggactatgggcctggtccgagaagggcgtcttgtcagatctcaccaaggtgactagaatgcatgggattgaccccgtggtgctagtgttaatggttggagttgtaatgtttacattaggtttcgccggctgcgttggcgcgctcagggagaatatctgcctgctgaacttcttttgtggaacgattgtgctcatcttctttctggaactcgctgtggccgtgctcgcatttcttttccaagactgggtccgcgacagatttagagaatttttcgagtccaatatcaagtcctacagggatgatatagatttgcagaaccttattgactccctgcaaaaggccaatcagtgttgtggcgcttatggtcctgaagattgggacctaaacgtatactttaattgttccggtgcctcatattcacgagaaaaatgcggagtccccttttcatgctgcgttccggacccagctcagaaagttgtgaacacccagtgcggctatgacgtgagaattcagctaaaatccaaatgggacgagtctatcttcaccaaggggtgcatccaggccctggagtcatggctgccacgtaacatatatatagtcgccggcgtttttattgccattagcttactgcagattttcgggatctttctcgcgaggactcttattagcgacatagaagctgtcaaggccggtcaccacttttag

SEQ ID NO: 220698 - DNA, 672 bp, Artificial Sequence
  derived and/or modified sequence
atggagcggaaggtgctgccctgcttcctgtgcctgttccagggcgtgcttagtgatctgacaaaagtgactcgaatgcacggcatcgaccctgtcgttctggtactgatggtgggggtcgtcatgttcaccttgggttttgctggctgtgtcggagccttaagggaaaatatctgcctccttaacttcttttgcggcaccattgtcctaatcttctttttagagttagctgtcgcggtcctggccttcctgttccaggattgggtgagggaccgcttccgggagtttttcgaaagcaacatcaaatcttacagggacgacatcgacctgcagaatctaattgacagcctccagaaggcaaaccagtgctgcggggcatatggcccagaagattgggatctcaacgtctacttcaactgttcaggagctagttacagtagggagaagtgcggtgttccattttcttgttgtgtgccagatcccgcccagaaagtggttaacacccagtgtggctatgacgtccggattcagctgaaatctaagtgggacgagagcattttcacaaaggggtgtatccaggccttggagtcttggctaccacgcaatatctatatagtggccggtgtatttattgctatatctctgctgcaaattttcgggatcttcctatag

SEQ ID NO: 220699 - DNA, 813 bp, Artificial Sequence
  derived and/or modified sequence
atgcactactaccggtacagcaacgccaaggtgagctgctggtacaaatacctgctattctcctacaatataatcttttggcttgctggcgtcgtcttcctaggcgtcgggctgtgggcctggtcggagaagggagtgctttctgacctgaccaaagtgactagaatgcatgggatcgatcctgtggttctggtgctgatggtgggagtggttatgttcactctaggctttgccggctgcgttggcgcgctcagagagaacatttgcctgctcaacttcttctgtggtacaatcgtgctgatattcttccttgaactcgccgtagccgtgctggcattcctgttccaagactgggtgcgagataggtttcgggaattttttgaaagcaacataaaatcgtacagggatgatatagatctgcagaacctgatcgattcactccaaaaggccaatcagtgctgtggagcttacggtcccgaagattgggacctgaacgtctattttaactgcagcggcgcatcatactcacgcgagaagtgcggtgtgccctttagctgctgtgtgcctgaccccgcgcagaaggtggtcaatactcagtgtggctatgacgtgaggatccagttgaagtctaagtgggatgaatctatttttacgaaaggatgcatccaggctttagaatcatggttacctagaaatatttacatagtcgccggcgtcttcatcgcaattagtctgctccagatctttggaatctttctggctcgaacactcatatctgatatagaggcagttaaggcaggtcatcatttttag

SEQ ID NO: 220700 - DNA, 450 bp, Artificial Sequence
  derived and/or modified sequence
atgcactactaccggtacagcaacgccaaggtgagctgctggtacaagtacctgctcttctcttataacatcatcttctggttggcaggagtagtgtttctcggtgtagggctttgggcgtggagcgaaaaaggagtattgtcagacctgactaaagtcactcgaatgcacggcatcgatcctgtcgtgctggtccaccccctttccggaagctgtcaaaggtacttttcatgccctgtgttcctatctcttgccttcctgtcgcacccaaaaaacctcccacggccatatgggtcactcccttttttcccgaggcaattgctgatctgggccgtctgcactccctcttttgcacctccaactatgccccacgtggccgagtcctgccttagtcagctcagtacactggcatttttctctctgtgcagtactaggcattgtacatcttag

SEQ ID NO: 220701 - DNA, 762 bp, Artificial Sequence
  derived and/or modified sequence
atgcactactaccggtacagcaacgccaaggtgagctgctggtacaaatacttgttgttctcatacaacataatattttggggcgtgttatcagatctcacgaaggtgaccaggatgcacggtatagaccctgtcgtgctagtgctgatggtgggagttgtgatgtttaccctgggctttgccggctgtgtaggcgccttgagggaaaacatttgtcttctgaattttttctgtggcactatcgtcctaattttcttcctggaattggccgttgccgtattggccttcctctttcaagattgggttcgtgataggtttcgagagtttttcgagagtaacataaaaagctatcgcgacgatatcgacctgcagaacttaatcgactccttacaaaaggctaaccagtgctgtggcgcgtatggacctgaggattgggacttgaatgtgtactttaactgctctggagcctcttattccagggagaaatgcggagtgccattttcatgctgcgtccctgaccccgcgcagaaagtcgtaaacacccagtgcggctacgatgttaggatccagctcaaatctaagtgggatgagtctattttcacaaaaggctgcattcaagcactggagtcatggcttcctagaaacatttatatagtcgcgggcgtgttcattgcaatctcccttttgcagattttcggcattttcctggcacgaacactgattagcgatattgaggctgtgaaggctggccatcacttctag

SEQ ID NO: 220702 - DNA, 813 bp, Artificial Sequence
  derived and/or modified sequence
atgcactactaccggtacagcaacgccaaggtgagctgctggtacaagtacttacttttttcttacaatataatcttctggttggcaggggttgtatttctcggagtcggcttgtgggcctggtcagagaagggagttctgtctgatttgactaaagtgacacggatgcatggcatagatccggttgttttagtgcttatggtcggcgtggtaatgttcaccctcgggtttgctgggtgcgtcggtgctctccgtgagaatatctgtctactcaattttttttgcgggacgatagttctcattttcttcctggagctggcggtcgctgtgttggcattcctgtttcaggactgggtccgagacagattccgtgagtttttcgagtccaacattaagtcctaccgtgacgacattgatctgcagaatctcatcgattctttacagaaagctaaccagtgttgtggagcttatgggcccgaagattgggaccttaacgtgtactttaattgctcaggcgcgtcttattcacgggaaaagtgtggcgtcccttttagttgttgcgtccccgacccagcccagaaggtcgtgaacacacagtgcggctacgatgttagaattcagctgaaatccaagtgggacgaaagcatattcactaaaggctgcatacaagccctcgagtcgtggctcccccgaaacatatacatcgtggccggggtgttcatagctatctctttgctgcaaatattcgggatcttcctagcaaggacgctcatatccgatatcgaagctgttaaggccggccaccatttttag

SEQ ID NO: 220703 - DNA, 642 bp, Artificial Sequence
  derived and/or modified sequence
atgcattactacagatacagcaacgcgaaggtttcttgctggtacaaatatttattattttcatacaatatcatattttggctggccggagtcgtctttctgggggtgggcctgtgggcctggtccgaaaagggggtcctgtctgacctgacaaaagtcacaaggatgcacggcatagatcccgtggtactcgtgcttatggtaggcgtcgttatgttcaccctcggtttcgccggttgtgtcggcgcactccgggaaaatatctgcttgctgaatttcaaccagtgttgcggagcctatgggcctgaagactgggacctcaatgtctactttaactgcagcggagcttcctactcccgcgagaagtgtggggtaccgtttagttgctgtgtgcctgatcccgcacagaaagtggtgaacacacagtgtgggtatgatgtccgtatccaactcaaaagcaaatgggacgaaagcatcttcaccaaagggtgcatacaagccctggaatcctggttaccacgcaatatatatatcgtggccggtgtgttcatcgcgatcagcctgctgcagatctttggtatctttctggcgagaaccttgatctccgatatcgaggccgtgaaggctggacatcatttttag

SEQ ID NO: 220704 - DNA, 813 bp, Artificial Sequence
  derived and/or modified sequence
atgcactattacagatattcaaatgctaaggtgtcctgttggtacaaatacctgctgttctcatacaatattatcttctggctggctggggtcgttttcctgggagtcggcctgtgggcgtggtcagagaaaggggtgttaagtgacctgacaaaggtgaccagaatgcatggcatcgatcctgtcgtgctcgtcctgatggtcggtgtggtgatgttcactttgggcttcgccggatgcgtcggtgccctcagagaaaacatatgtctcttgaatttcttctgtggtaccattgtgctgattttttttttagagctagccgtcgccgtgcttgctttcctgtttcaagactgggtgcgcgaccgcttcagagaattcttcgagagcaatataaaatcctaccgagatgatatcgatttgcagaacctgatagactcgctgcaaaaggccaatcaatgctgtggcgcatatggaccagaggactgggacctgaatgtgtatttcaactgctcgggagcgtcctacagccgggagaaatgcggggtgccctttagctgctgtgtgcccgaccccgctcagaaagtcgtcaatactcagtgtggctatgatgttcgcattcagttgaaatccaaatgggacgaaagtatattcacaaagggctgcatccaggccctcgaaagctggttaccacggaatatatacatcgttgccggagtgttcattgcaatctccctcctgcagatatttgggatctttttggctcggacactgattagcgacattgaagcagttaaggcagggcatcatttttag

SEQ ID NO: 220705 - DNA, 672 bp, Artificial Sequence
  derived and/or modified sequence
atggaaaggaaggtcctcccgtgctttctgtgtctgttccagggagtcctgtctgatctcacaaaagtgacccgcatgcacggcattgaccccgtggtgcttgtcttgatggtgggtgtggttatgttcactctggggtttgctggctgtgtgggcgcattacgcgagaatatttgtctcttgaattttttttgtgggactattgtacttatcttctttctcgagcttgctgtggccgtgttggcatttttatttcaggactgggtgagagacagattccgcgagttcttcgaatcaaacatcaaatcatatagagacgatatagatcttcagaacctgatcgattcactgcaaaaagctaatcaatgttgcggcgcttacgggcctgaggactgggatctaaatgtctacttcaattgcagtggggcttcatattcacgagagaagtgcggggtgcccttttcatgctgcgtccctgatcccgctcaaaaagttgtgaacacacaatgtggttacgacgtgaggatccagctgaaaagtaagtgggatgaatccattttcacaaagggctgtatccaagctctggaaagttggttgcctagaaacatatacattgtggcaggcgtctttatagcaattagcctcttgcaaatcttcggaattttcttatag

SEQ ID NO: 220706 - DNA, 813 bp, Artificial Sequence
  derived and/or modified sequence
atgcactattacaggtacagcaatgcaaaggtgtcttgctggtataaatacctgttgtttagctataacattattttctggctggccggtgtggtgtttttaggtgtaggtctgtgggcgtggtccgagaaaggcgtgttgtctgacctcacaaaggtcactcggatgcatggcatagaccctgtggtgctggtccttatggttggagttgttatgtttacccttggttttgcaggctgtgtcggggctctgcgcgaaaatatttgcctactcaactttttctgtggaacaatagtactcatctttttcctggagctggctgtagcagtgctcgcattcctgttccaagattgggtgcgcgataggtttcgagaattctttgagtctaatatcaagagttatcgggacgacattgatttacagaacctgatcgacagcctgcagaaagccaatcagtgttgtggcgcttacggtccagaggactgggacttgaatgtctatttcaactgtagcggagcaagctactcacgtgagaagtgtggggtacccttttcttgttgtgtgcctgatcccgcacagaaggtggtgaatactcagtgcggatacgacgtgcgcatccagctgaagagtaaatgggacgaaagcatattcaccaagggctgtatacaggcactggagagctggctaccccgaaatatatatattgttgccggagtttttattgctatcagcttgctccagatctttggcatctttctcgcccgaaccctgatcagcgatatcgaggctgtaaaggctggccatcatttctag

SEQ ID NO: 220707 - DNA, 450 bp, Artificial Sequence
  derived and/or modified sequence
atgcattactacaggtacagtaacgcaaaggtttcttgctggtacaaataccttctattcagctacaacattattttctggctggctggcgttgttttcctgggggtcgggctctgggcatggtctgaaaaaggagtactttctgacctgacaaaggtgacccggatgcacgggattgacccagtggtgctcgtgcaccccttgtccggctcctgccagcgatatttttcatgtccagtctttctgtctctcgcattcttgagccacccaaaaaatttgccaaggccttatgggagcttaccattctttcccagacagctgctcatatgggccgtgtgtaccccaagcttcgcaccgccaaccatgccccacgttgccgagagctgtttaagccagctgtccaccctggccttcttcagtctgtgctccacacgtcactgtacgagctag

SEQ ID NO: 220708 - DNA, 762 bp, Artificial Sequence
  derived and/or modified sequence
atgcactactaccgatactcaaacgccaaagtgtcatgctggtacaagtatcttctttttagctataacatcattttttggggagttctaagcgatctgaccaaagtgactagaatgcacgggatcgaccccgtggttctggtgttgatggtgggagtggtgatgttcactctgggattcgccggatgcgttggcgctttgcgcgagaatatctgcttgttgaactttttctgtggcacaatcgtcctgattttttttctcgagctagcagtggccgttctggcattcttgtttcaggactgggtaagggaccggttcagagaattctttgagagcaacatcaaatcctatcgcgatgatatagatctgcagaatttgatcgactccctgcaaaaggccaatcagtgctgtggcgcttacggaccggaggattgggatttgaacgtgtacttcaactgcagtggtgctagttatagcagagagaagtgcggagttcctttcagttgttgcgtgcccgaccctgcccagaaggtcgtcaacacccaatgcggttatgacgtgcgaatccagctaaagtcaaagtgggatgagtccatcttcacaaagggatgtatccaggccctcgaaagttggcttccgagaaacatttacatcgtggccggagttttcattgcaatttccttgctacagattttcggtatcttcctggctaggactctgattagcgatatcgaggccgtgaaggcaggtcaccacttctag

SEQ ID NO: 220709 - DNA, 813 bp, Artificial Sequence
  derived and/or modified sequence
atgcattattacagatattcgaacgctaaggtctcctgttggtacaagtacttgttattttcctacaacattatcttttggctggccggagtggtttttctgggggtgggactgtgggcatggtccgagaagggcgtcctgtctgatctcactaaagtgacacggatgcacggcatagacccagtcgtcttggtcctgatggtcggagtcgtgatgttcacccttggcttcgctggatgcgtgggcgctttacgggagaacatttgcctgttgaactttttctgtggaactattgtactcatcttcttcttggaacttgccgtggcagtgcttgcgttcctgttccaggactgggtccgggaccgtttcagagaattctttgagagcaacattaaatcctaccgcgatgacatcgacctgcagaacctaattgacagtctccagaaggccaaccagtgctgtggagcttatggcccagaggactgggatctgaacgtgtattttaactgtagcggggcttcttatagtcgcgaaaaatgcggcgtgccattttcatgttgtgtgcccgatcccgcacagaaagttgttaacacacagtgtggatacgacgtccgaattcaactgaagtctaaatgggacgagtctattttcactaagggttgcatccaggctcttgagtcctggctgccgaggaacatttatatagtggcaggcgtattcatcgcaataagcctcctgcaaatttttggcatttttttggctcggactctaatctccgacattgaagctgttaaagctggtcatcatttttag

SEQ ID NO: 220710 - DNA, 1037 bp, Artificial Sequence
  derived and/or modified sequence
gccgccgccgcgcgcggattctgcttctcagaagatgcactattatagatactctaacgccaaggtcagctgctggtacaagtacctccttttcagctacaacatcatcttctggttggctggagttgtcttccttggagtcgggctgtgggcatggagcgaaaagggtgtgctgtccgacctcaccaaagtgacccggatgcatggaatcgaccctgtggtgctggtcctgatggtgggcgtggtgatgttcaccctggggttcgccggctgcgtgggggctctgcgggagaatatctgcttgctcaactttaaccagtgctgtggcgcatatggccctgaagactgggacctcaacgtctacttcaattgcagcggtgccagctacagccgagagaagtgcggggtccccttctcctgctgcgtgccagatcctgcgcaaaaagttgtgaacacacagtgtggatatgatgtcaggattcagctgaagagcaagtgggatgagtccatcttcacgaaaggctgcatccaggcgctggaaagctggctcccgcggaacatttacattgtggctggcgtcttcatcgccatctcgctgttgcagatatttggcatcttcctggcaaggacgctgatctcagacatcgaggcagtgaaggccggccatcacttctgaggagcagagttgagggagccgagctgagccacgctgggaggccagagcctttctctgccatcagccctacgtccagagggagaggagccgacacccccagagccagtgccccatcttaagcatcagcgtgacgtgacctctctgtttctgcttgctggtgctgaagaccaagggtcccccttgttacctgcccaaacttgtgactgcatccctctggagtctacccagagacagagaatgtgtctttatgtgggagtggtgactctgaaagacagagagggctcctgtggctgccaggagggcttgactcagaccccctgcagctcaagcatgtctgcaggacaccctggtcccctctcca

SEQ ID NO: 220711 - DNA, 1380 bp, Artificial Sequence
  derived and/or modified sequence
gggcaggctggggttgaaactcttcaccccttgcggtctgtactgcctcccaactgagcagccagggagaaggcctagagcctgtgcctttcagctagatagctggaggaactggctcctccctccttaggctgtgctggcctgagctgggagcctgagagctggggcagttgtctctaaagtggcttctgggattctggtaagaggacttggggtggagtcgaaagcagggagccctgtgagttgagacgaactcttgcaatgttgccttggctggtctcgaactcatcttctgggttcaagctgtccgtctgcctcggactcccaaagtgctaggattacagcgttacatccttactattcaaagtgccatccacagacctgctgatgggcagcatgagcatcacctgggagcttgctgcgctgtagaatcttgaggggtctccatccagatcagctgaatcagagtttgcattgttaacaagattctgcttctcagaagatgcactattatagatactctaacgccaaggtcagctgctggtacaagtacctccttttcagctacaacatcatcttctggttggctggagttgtcttccttggagtcgggctgtgggcatggagcgaaaagggtgtgctgtccgacctcaccaaagtgacccggatgcatggaatcgaccctgtggtgctggtcctgatggtgggcgtggtgatgttcaccctggggttcgccggctgcgtgggggctctgcgggagaatatctgcttgctcaactttttctgtggcaccatcgtgctcatcttcttcctggagctggctgtggccgtgctggccttcctgttccaggactgggtgagggaccggttccgggagttcttcgagagcaacatcaagtcctaccgggacgatatcgatctgcaaaacctcatcgactcccttcagaaagctaaccagtgctgtggcgcatatggccctgaagactgggacctcaacgtctacttcaattgcagcggtgccagctacagccgagagaagtgcggggtccccttctcctgctgcgtgccagatcctgcgcaaaaagttgtgaacacacagtgtggatatgatgtcaggattcagctgaagagcaagtgggatgagtccatcttcacgaaaggctgcatccaggcgctggaaagctggctcccgcggaacatttacattgtggctggcgtcttcatcgccatctcgctgttgcagatatttggcatcttcctggcaaggacgctgatctcagacatcgaggcagtgaaggccggccatcacttctgaggagcagagttgagggagccgagctgagccacgctgggaggccagagcctttctctgccatcagc

SEQ ID NO: 220712 - DNA, 855 bp, Artificial Sequence
  derived and/or modified sequence
acttcctcggccgagccgggccgcgccgccgctgccgccgccgcgcgcggattctgcttctcagaagatgcactattatagatactctaacgccaaggtcagctgctggtacaagtacctccttttcagctacaacatcatcttctggttggctggagttgtcttccttggagtcgggctgtgggcatggagcgaaaagtgctgccctgctttctctgtctctttcagggtgtgctgtccgacctcaccaaagtgacccggatgcatggaatcgaccctgtggtgctggtcctgatggtgggcgtggtgatgttcaccctggggttcgccggctgcgtgggggctctgcgggagaatatctgcttgctcaactttttctgtggcaccatcgtgctcatcttcttcctggagctggctgtggccgtgctggccttcctgttccaggactgggtgagggaccggttccgggagttcttcgagagcaacatcaagtcctaccgggacgatatcgatctgcaaaacctcatcgactcccttcagaaagctaaccagtgctgtggcgcatatggccctgaagactgggacctcaacgtctacttcaattgcagcggtgccagctacagccgagagaagtgcggggtccccttctcctgctgcgtgccagatcctgcgcaaaaagttgtgaacacacagtgtggatatgatgtcaggattcagctgaagagcaagtgggatgagtccatcttcacgaaaggctgcatccaggcgctggaaagctggctcccgcggaacatttacattgtggctggcgtcttcatcgccatctcgctgttgcagatatttggcatcttcctg

SEQ ID NO: 220713 - DNA, 1095 bp, Artificial Sequence
  derived and/or modified sequence
ctgccgccgccgcgcgcgggacttggggtggagtcgaaagcagggagccctgtgagttgcgttacatccttactattcaaagtgccatccacagacctgctgatgggcagcatgagcatcacctgggagcttgctgcgctgtagaatcttgaggggtctccatccagatcagctgaatcagagtttgcattgttaacaagattctgcttctcagaagatgcactattatagatactctaacgccaaggtcagctgctggtacaagtacctccttttcagctacaacatcatcttctggttggctggagttgtcttccttggagtcgggctgtgggcatggagcgaaaagggtgtgctgtccgacctcaccaaagtgacccggatgcatggaatcgaccctgtggtgctggtcctgatggtgggcgtggtgatgttcaccctggggttcgccggctgcgtgggggctctgcgggagaatatctgcttgctcaactttttctgtggcaccatcgtgctcatcttcttcctggagctggctgtggccgtgctggccttcctgttccaggactgggtgagggaccggttccgggagttcttcgagagcaacatcaagtcctaccgggacgatatcgatctgcaaaacctcatcgactcccttcagaaagctaaccagtgctgtggcgcatatggccctgaagactgggacctcaacgtctacttcaattgcagcggtgccagctacagccgagagaagtgcggggtccccttctcctgctgcgtgccagatcctgcgcaaaaagttgtgaacacacagtgtggatatgatgtcaggattcagctgaagagcaagtgggatgagtccatcttcacgaaaggctgcatccaggcgctggaaagctggctcccgcggaacatttacattgtggctggcgtcttcatcgccatctcgctgttgcagatatttggcatcttcctggcaaggacgctgatctcagacatcgaggcagtgaaggccggccatcacttctgaggagcagagttgagggagccgagctgagccacgctgggaggccagagcctttctctgccatcagc

SEQ ID NO: 220714 - DNA, 1439 bp, Artificial Sequence
  derived and/or modified sequence
aacttgctctaacttcctcggccgagccgggccgcgccgccgctgccgccgccgcgcgcggattctgcttctcagaagatgcactattatagatactctaacgccaaggtcagctgctggtacaagtacctccttttcagctacaacatcatcttctggttggctggagttgtcttccttggagtcgggctgtgggcatggagcgaaaagggtgtgctgtccgacctcaccaaagtgacccggatgcatggaatcgaccctgtggtgctggtccaccccctctcaggatcttgtcaacgttatttttcctgtcccgtcttcctatcgctggccttcctttcccatcctaaaaacttgccgaggccctatggctccctccctttctttcccaggcagcttcttatctgggctgtctgtaccccttcctttgcaccacccaccatgccccacgtagctgaaagctgcttatcccaattgtcaactctggccttcttcagcctctgtagcaccagacactgcacctcctgaatgtcctctgcttctctgcttcagaggcccaggctcgccagttctctgacctctcccatatgtctgcttaggactctgctgcagctgtcctcaccagcctccggggaatcccactacccacagggcagggctgtgggctgggctgaaaaaccatctgcatggtccacaagaagcctggcactgggtttccccatgaataacaatgaaaattaatggatgcacaaccttcctggaacgtggaatttctctgggagattccatgcagaggccactggggaggtggcaggcatgcatgtgactgtaggtggctgcagtgttggaaggctcccagcagagcagagagggtgtcagtctcatcagggaacccacctgatggcttctcagccagcagtctcagaggaacatagacgactgctgagaaaggagggaggcagcagtggtcccagcacctgaggcatcctgctgtcatgggaaggtctccgcccaaatgtcagatgcatcagcctgtcacccgctggtccagagctttcagctgtactggtagggggtgggtggtggagtgctgaatgaccttcacaggtgggcctttccagctctagggtcttacgggtgtcggtccacagaaccacggtttttaggttgtgtgtccggggctatgggaacctgtcccccatgatggatcttggtagagacacttccctctgtcatcgtgcccaggaggatgctgcaggtgactacctgcagccctgttctcattcatttggatgccctccagaaatctggggagccatacacctttagagccttttttgctccttatcaagttggcaaggcttggccaattcctgttcaaggctgcattaaaggcatgttcaccatcctggctaatacggtgaaaccccttctctact

SEQ ID NO: 220715 - DNA, 5476 bp, Artificial Sequence
  derived and/or modified sequence
ggccgagccgggccgcgccgccgctgccgccgccgcgcgcggattctgcttctcagaagatgcactattatagatactctaacgccaaggtcagctgctggtacaagtacctccttttcagctacaacatcatcttctggggtgtgctgtccgacctcaccaaagtgacccggatgcatggaatcgaccctgtggtgctggtcctgatggtgggcgtggtgatgttcaccctggggttcgccggctgcgtgggggctctgcgggagaatatctgcttgctcaactttttctgtggcaccatcgtgctcatcttcttcctggagctggctgtggccgtgctggccttcctgttccaggactgggtgagggaccggttccgggagttcttcgagagcaacatcaagtcctaccgggacgatatcgatctgcaaaacctcatcgactcccttcagaaagctaaccagtgctgtggcgcatatggccctgaagactgggacctcaacgtctacttcaattgcagcggtgccagctacagccgagagaagtgcggggtccccttctcctgctgcgtgccagatcctgcgcaaaaagttgtgaacacacagtgtggatatgatgtcaggattcagctgaagagcaagtgggatgagtccatcttcacgaaaggctgcatccaggcgctggaaagctggctcccgcggaacatttacattgtggctggcgtcttcatcgccatctcgctgttgcagatatttggcatcttcctggcaaggacgctgatctcagacatcgaggcagtgaaggccggccatcacttctgaggagcagagttgagggagccgagctgagccacgctgggaggccagagcctttctctgccatcagccctacgtccagagggagaggagccgacacccccagagccagtgccccatcttaagcatcagcgtgacgtgacctctctgtttctgcttgctggtgctgaagaccaagggtcccccttgttacctgcccaaacttgtgactgcatccctctggagtctacccagagacagagaatgtgtctttatgtgggagtggtgactctgaaagacagagagggctcctgtggctgccaggagggcttgactcagaccccctgcagctcaagcatgtctgcaggacaccctggtcccctctccactggcatccagacatctgctttgggtcatccacatctgtgggtgggccgtgggtagagggacccacaggcgtggacagggcatctctctccatcaagcaaagcagcatgggggcctgcccgtaacgggaggcggacgtggccccgctgggcctctgagtgccagcgcagtctgctgggacatgcacatatcaggggttgtttgcaggatcctcagccatgttcaagtgaagtaagcctgagccagtgcgtggactggtgccacgggagtgccttgtccactgtccccctgtgtccaccagctattctcctggcgccggaactgcctctggtcttgatagcattaagccctgatggcgccggtggcgcggtgggcatggttcttcactgagagccggctctccttttcttaaagtgtgtaaatagtttatttataggggtaagaatgttctcacaccatttcacttcctcttcctctcctccagcattctcctctgagcagccttagatagtgtccatggctggagccgaccctttgagtccccttgagtgtcttaagaaccagcccacaacagcctctctttctcctccacatactgcagcctccctccatgcatcccacatacaagcactcccccactccccagcgtggcctcactgtcttctggtcttggtgctactgaaattgtcacccagaatttgaatcctgaccctccccactgcaagcccagggagccccagcccaagatggccagcctgaaactgttggccagggctcctcttgtggccatgtacccagggctggctggcctgccatttgcctctccccggagacagccgttcttctgcaaccacaccccgtgcctagccacaaccccaggctgcagctgctcagaagctccaggcattttgtttctggtgaccgcccctaatgggatatcggtgatcactggtccacccttcctgtcagggcttttctggggctgctcttggaaatgaagtcttaagtactgaataactcccctggggatagctggggcatttgtctagctgggctactttctaacactttgccatagctcagaccacttctcatcgttcagggatggactgcaaccttaatttacttgccggagtgtacattctagtgtggtgtatactggtggctgttgatgatgatttttttttttttacacaattctctgtagactaggagaagaatgcttgtgtttttcggaagtgtgatgcttctctttgactgccaaactcttttatggaatatatctttatattaatgctgttttggtcatttttgtttggggtcactattgagatattgctaagcatctcagtggtaaacgcggctgccagaggaaccaagggatagggtatgtagaccttacagaaggatggatggtaaaggcagtccatcatcagcacaatctgacttacatttcattgagtaattttttttttttttaagattctgtatggcagcactttcagttgcccttgtgtgccggccacagccgcacaagttggcttgtggtttatcccccgctataagtgagagctggagaaacttcaactccataggtctagaggaaacattgttttaggttatttctgtccacccctgtgcgatactatttattgatccaagcagaagagcttggggacactgagtcgaagtggggacatgggattgaagcctgggcactgctgctgcatgagctgtgtgtcctgggtgtgccggcctttctgtgaagggggttggtggcagtgcccacctcactagatgcctctgacccagcctcccctgggggagtgggtggccacagaccctccctgccagagctcctggaaggctcctgcaggcctgacccatctattcctgtagacctggtttaggatgaagtctcggtgcgatttttgcagagttgggtttatctttcaactatagacccttctggctgttctcagccatatcatgtgactctgaatagttggatgaggaatggaaagaaagcaaggatgagagccggtcacgtggcagtctccgcccagcatcggctgtccgcacagaggcacagggcaggcctcctgtgcactccccacctagcactggcctgtcctgaatccccgccttccctggttggaggccagctgtggcatttgcaccctcttctcacctcaccatgcacatgctaactttaaagccttggggtctttcctgtaccccctcctcaaccctggtccaccccctctcaggatcttgtcaacgttatttttcctgtcccgtcttcctatcgctggccttcctttcccatcctaaaaacttgccgaggccctatggctccctccctttctttcccaggcagcttcttatctgggctgtctgtaccccttcctttgcaccacccaccatgccccacgtagctgaaagctgcttatcccaattgtcaactctggccttcttcagcctctgtagcaccagacactgcacctcctgaatgtcctctgcttctctgcttcagaggcccaggctcgccagttctctgacctctcccatatgtctgcttaggactctgctgcagctgtcctcaccagcctccggggaatcccactacccacagggcagggctgtgggctgggctgaaaaaccatctgcatggtccacaagaagcctggcactgggtttccccatgaataacaatgaaaattaatggatgcacaaccttcctggaacgtggaatttctctgggagattccatgcagaggccactggggaggtggcaggcatgcatgtgactgtaggtggctgcagtgttggaaggctcccagcagagcagagagggtgtcagtctcatcagggaacccacctgatggcttctcagccagcagtctcagaggaacatagacgactgctgagaaaggagggaggcagcagtggtcccagcacctgaggcatcctgctgtcatgggaaggtctccgcccaaatgtcagatgcatcagcctgtcacccgctggtccagagctttcagctgtactggtagggggtgggtggtggagtgctgaatgaccttcacaggtgggcctttccagctctagggtcttacgggtgtcggtccacagaaccacggtttttaggttgtgtgtccggggctatgggaacctgtcccccatgatggatcttggtagagacacttccctctgtcatcgtgcccaggaggatgctgcaggtgactacctgcagccctgttctcattcatttggatgccctccagaaatctggggagccatacacctttagagccttttttgctccttatcaagttggcaaggcttggccaattcctgttcaaggctgcattaaaggcatgttcaccatcctggctaatacggtgaaaccccttctctactaaaaatacaaaaaaattagccgggcttggtggcgggtgcctgtagtcccagctactccggaggctgaggcaggggaatggtgtgaacccaggaggcggagcttgcagtgagccgagatcacaccactgcactccagcctgggctcaaaaaagaaaaaaaaaaaaaaaaaaaggcccgttcattctcaaatgcttttggcgtctccagggtgcctcaggaaaacatgaagtgggcattgtagaacttggggctactgtgtaactttggaagaaaaagttaagggtacttttaagtggatactgttttgatgaaattgccaacttcagggagcccagcttggagaaggaggacgtgagtattccttacaaggctccgaaacaattctttcttcacttagttttctttctgtgctctgcatcttatattccagcagggtcttccaatgcatggtttaataactactagaactggccaggtgcagtggctcacgcctgtaatcccagaactttgggaggctaagacaggcagatcacttgaggccaggagttcgagaccagcctggacaacatggtgatacccagtttctactaaaaatacaaaaattagtcgggcatggtgatgtgcacctgtagtcccagctgctcgggaggctgaggcaggagaatcgcttgaacccgggagacagaggttgcaacgagccaagatcgagccactgcgctccggcctgggtgacaggagactccatctcaaaaaataaaattaaaaaaaaactactacaataaattatcaccttggactgtataaaacaacttttaaactagtctttttaaaaagtacacttaaataaaaatctaaacataagagaatgtaaa

SEQ ID NO: 220716 - DNA, 5691 bp, Artificial Sequence
  derived and/or modified sequence
ccgcaccgggcggcgcagggaagcggcgccccttcctcggcagacggcaggcgccgcgcctccggccccgcccctccgcgcccctccgcgccccgcccccgccgctcggacggcccgagtcgcgccctcccgccccgcgccgcggaacttgctctaacttcctcggccgagccgggccgcgccgccgctgccgccgccgcgcgcggattctgcttctcagaagatgcactattatagatactctaacgccaaggtcagctgctggtacaagtacctccttttcagctacaacatcatcttctggttggctggagttgtcttccttggagtcgggctgtgggcatggagcgaaaagggtgtgctgtccgacctcaccaaagtgacccggatgcatggaatcgaccctgtggtgctggtcctgatggtgggcgtggtgatgttcaccctggggttcgccggctgcgtgggggctctgcgggagaatatctgcttgctcaactttttctgtggcaccatcgtgctcatcttcttcctggagctggctgtggccgtgctggccttcctgttccaggactgggtgagggaccggttccgggagttcttcgagagcaacatcaagtcctaccgggacgatatcgatctgcaaaacctcatcgactcccttcagaaagctaaccagtgctgtggcgcatatggccctgaagactgggacctcaacgtctacttcaattgcagcggtgccagctacagccgagagaagtgcggggtccccttctcctgctgcgtgccagatcctgcgcaaaaagttgtgaacacacagtgtggatatgatgtcaggattcagctgaagagcaagtgggatgagtccatcttcacgaaaggctgcatccaggcgctggaaagctggctcccgcggaacatttacattgtggctggcgtcttcatcgccatctcgctgttgcagatatttggcatcttcctggcaaggacgctgatctcagacatcgaggcagtgaaggccggccatcacttctgaggagcagagttgagggagccgagctgagccacgctgggaggccagagcctttctctgccatcagccctacgtccagagggagaggagccgacacccccagagccagtgccccatcttaagcatcagcgtgacgtgacctctctgtttctgcttgctggtgctgaagaccaagggtcccccttgttacctgcccaaacttgtgactgcatccctctggagtctacccagagacagagaatgtgtctttatgtgggagtggtgactctgaaagacagagagggctcctgtggctgccaggagggcttgactcagaccccctgcagctcaagcatgtctgcaggacaccctggtcccctctccactggcatccagacatctgctttgggtcatccacatctgtgggtgggccgtgggtagagggacccacaggcgtggacagggcatctctctccatcaagcaaagcagcatgggggcctgcccgtaacgggaggcggacgtggccccgctgggcctctgagtgccagcgcagtctgctgggacatgcacatatcaggggttgtttgcaggatcctcagccatgttcaagtgaagtaagcctgagccagtgcgtggactggtgccacgggagtgccttgtccactgtccccctgtgtccaccagctattctcctggcgccggaactgcctctggtcttgatagcattaagccctgatggcgccggtggcgcggtgggcatggttcttcactgagagccggctctccttttcttaaagtgtgtaaatagtttatttataggggtaagaatgttctcacaccatttcacttcctcttcctctcctccagcattctcctctgagcagccttagatagtgtccatggctggagccgaccctttgagtccccttgagtgtcttaagaaccagcccacaacagcctctctttctcctccacatactgcagcctccctccatgcatcccacatacaagcactcccccactccccagcgtggcctcactgtcttctggtcttggtgctactgaaattgtcacccagaatttgaatcctgaccctccccactgcaagcccagggagccccagcccaagatggccagcctgaaactgttggccagggctcctcttgtggccatgtacccagggctggctggcctgccatttgcctctccccggagacagccgttcttctgcaaccacaccccgtgcctagccacaaccccaggctgcagctgctcagaagctccaggcattttgtttctggtgaccgcccctaatgggatatcggtgatcactggtccacccttcctgtcagggcttttctggggctgctcttggaaatgaagtcttaagtactgaataactcccctggggatagctggggcatttgtctagctgggctactttctaacactttgccatagctcagaccacttctcatcgttcagggatggactgcaaccttaatttacttgccggagtgtacattctagtgtggtgtatactggtggctgttgatgatgatttttttttttttacacaattctctgtagactaggagaagaatgcttgtgtttttcggaagtgtgatgcttctctttgactgccaaactcttttatggaatatatctttatattaatgctgttttggtcatttttgtttggggtcactattgagatattgctaagcatctcagtggtaaacgcggctgccagaggaaccaagggatagggtatgtagaccttacagaaggatggatggtaaaggcagtccatcatcagcacaatctgacttacatttcattgagtaattttttttttttttaagattctgtatggcagcactttcagttgcccttgtgtgccggccacagccgcacaagttggcttgtggtttatcccccgctataagtgagagctggagaaacttcaactccataggtctagaggaaacattgttttaggttatttctgtccacccctgtgcgatactatttattgatccaagcagaagagcttggggacactgagtcgaagtggggacatgggattgaagcctgggcactgctgctgcatgagctgtgtgtcctgggtgtgccggcctttctgtgaagggggttggtggcagtgcccacctcactagatgcctctgacccagcctcccctgggggagtgggtggccacagaccctccctgccagagctcctggaaggctcctgcaggcctgacccatctattcctgtagacctggtttaggatgaagtctcggtgcgatttttgcagagttgggtttatctttcaactatagacccttctggctgttctcagccatatcatgtgactctgaatagttggatgaggaatggaaagaaagcaaggatgagagccggtcacgtggcagtctccgcccagcatcggctgtccgcacagaggcacagggcaggcctcctgtgcactccccacctagcactggcctgtcctgaatccccgccttccctggttggaggccagctgtggcatttgcaccctcttctcacctcaccatgcacatgctaactttaaagccttggggtctttcctgtaccccctcctcaaccctggtccaccccctctcaggatcttgtcaacgttatttttcctgtcccgtcttcctatcgctggccttcctttcccatcctaaaaacttgccgaggccctatggctccctccctttctttcccaggcagcttcttatctgggctgtctgtaccccttcctttgcaccacccaccatgccccacgtagctgaaagctgcttatcccaattgtcaactctggccttcttcagcctctgtagcaccagacactgcacctcctgaatgtcctctgcttctctgcttcagaggcccaggctcgccagttctctgacctctcccatatgtctgcttaggactctgctgcagctgtcctcaccagcctccggggaatcccactacccacagggcagggctgtgggctgggctgaaaaaccatctgcatggtccacaagaagcctggcactgggtttccccatgaataacaatgaaaattaatggatgcacaaccttcctggaacgtggaatttctctgggagattccatgcagaggccactggggaggtggcaggcatgcatgtgactgtaggtggctgcagtgttggaaggctcccagcagagcagagagggtgtcagtctcatcagggaacccacctgatggcttctcagccagcagtctcagaggaacatagacgactgctgagaaaggagggaggcagcagtggtcccagcacctgaggcatcctgctgtcatgggaaggtctccgcccaaatgtcagatgcatcagcctgtcacccgctggtccagagctttcagctgtactggtagggggtgggtggtggagtgctgaatgaccttcacaggtgggcctttccagctctagggtcttacgggtgtcggtccacagaaccacggtttttaggttgtgtgtccggggctatgggaacctgtcccccatgatggatcttggtagagacacttccctctgtcatcgtgcccaggaggatgctgcaggtgactacctgcagccctgttctcattcatttggatgccctccagaaatctggggagccatacacctttagagccttttttgctccttatcaagttggcaaggcttggccaattcctgttcaaggctgcattaaaggcatgttcaccatcctggctaatacggtgaaaccccttctctactaaaaatacaaaaaaattagccgggcttggtggcgggtgcctgtagtcccagctactccggaggctgaggcaggggaatggtgtgaacccaggaggcggagcttgcagtgagccgagatcacaccactgcactccagcctgggctcaaaaaagaaaaaaaaaaaaaaaaaaaggcccgttcattctcaaatgcttttggcgtctccagggtgcctcaggaaaacatgaagtgggcattgtagaacttggggctactgtgtaactttggaagaaaaagttaagggtacttttaagtggatactgttttgatgaaattgccaacttcagggagcccagcttggagaaggaggacgtgagtattccttacaaggctccgaaacaattctttcttcacttagttttctttctgtgctctgcatcttatattccagcagggtcttccaatgcatggtttaataactactagaactggccaggtgcagtggctcacgcctgtaatcccagaactttgggaggctaagacaggcagatcacttgaggccaggagttcgagaccagcctggacaacatggtgatacccagtttctactaaaaatacaaaaattagtcgggcatggtgatgtgcacctgtagtcccagctgctcgggaggctgaggcaggagaatcgcttgaacccgggagacagaggttgcaacgagccaagatcgagccactgcgctccggcctgggtgacaggagactccatctcaaaaaataaaattaaaaaaaaactactacaataaattatcaccttggactgtataaaacaacttttaaactagtctttttaaaaagtacacttaaataaaaatctaaacataagagaatgtaaa

SEQ ID NO: 220717 - protein, 546 aa, Artificial Sequence
  derived and/or modified sequence
MEQRRVTDFFARRRPGPPRIAPPKLACRTPSPARPALRAPASATSGSRKRARPPAAPGRDQARPPARRRLRLSVDEVSSPSTPEAPDIPACPSPGQKIKKSTPAAGQPPHLTSAQDQDTISELASCLQRARELGARVRALKASAQDAGESCTPEAEGRPEEPCGEKAPAYQRFHALAQPGLPGLVLPYKYQVLAEMFRSMDTIVGMLHNRSETPTFAKVQRGVQDMMRRRFEECNVGQIKTVYPASYRFRQERSVPTFKDGTRRSDYQLTIEPLLEQEADGAAPQLTASRLLQRRQIFSQKLVEHVKEHHKAFLASLSPAMVVPEDQLTRWHPRFNVDEVPDIEPAALPQPPATEKLTTAQEVLARARNLISPRMEKALSQLALRSAAPSSPGSPRPALPATPPATPPAASPSALKGVSQDLLERIRAKEAQKQLAQMTRCPEQEQRLQRLERLPELARVLRSVFVSERKPALSMEVACARMVGSCCTIMSPGEMEKHLLLLSELLPDWLSLHRIRTDTYVKLDKAADLAHITARLAHQTRAEEGL

SEQ ID NO: 220718 - DNA, 1641 bp, Artificial Sequence
  derived and/or modified sequence
atggagcagcggcgggtgacagattttttcgctcggcgacgccctggtcctcctcgcatcgcgccaccgaaattggcctgcaggaccccatcacctgccagacctgcattgcgcgcccccgcaagcgctacgtccgggagcaggaagcgggcgaggccccctgccgctccgggacgggaccaggcacgcccacccgcccggcgaagacttcggctctcagtcgacgaagtctcttcgccgtctacccctgaagcccccgacattcctgcgtgcccatcccctggtcagaaaataaagaagtccaccccggctgctggccaaccgccacatcttaccagcgctcaggatcaggacaccatttccgagctggcctcctgcttgcagcgtgccagggaactgggcgcaagggtcagagcactaaaggcctccgctcaggatgctggcgaatcatgcacccccgaggccgagggccgtccggaggaaccctgcggagagaaggccccagcctatcagcggtttcacgcacttgcccaacctggactgcctggactcgtgctgccttataaataccaagtcctagctgagatgtttcggtctatggacaccatagttggaatgttacacaacaggtctgagacccccacttttgccaaagtgcagcgcggagttcaggatatgatgcgccggcgttttgaagaatgtaatgtgggacaaatcaagacggtgtaccccgcgtcttacaggtttcgtcaggagagatcagttccaacttttaaggacggcacacgacggtccgattaccagctgaccatagagccccttttagaacaggaggccgatggcgcagcaccccagctgaccgcctctagactgttgcaaaggcgccagatcttttcccaaaagctggtggagcacgttaaagagcatcataaagccttcctggccagcctgtccccagcaatggtcgttcctgaggaccagctgacacggtggcacccaagattcaatgtggatgaggtcccagatatcgagcctgcagccctgccccagccacccgctacggagaaactgacgacagcccaggaggtactggcacgcgcccgtaacttgatctcacctagaatggaaaaagctctgtctcagctggcactgaggagcgccgcacccagtagtcccggctccccccgacctgcactcccggccactcccccagccacaccccccgcagcatcaccctccgcactgaaaggtgtgagccaggacctcttggaacgtattcgcgccaaggaagcccagaaacaactggcccagatgacccggtgccccgaacaggaacagcgtctgcagcgcttagaacggctccctgaactcgctagagtgctgcggagtgtgtttgtatcggagcggaaaccagctctgtccatggaggtcgcctgcgcacgtatggtcggttcctgctgcaccattatgtcaccaggagaaatggaaaaacatcttctgctccttagcgaattgctccccgattggctcagcctgcataggatcagaaccgatacctatgttaagttggacaaagccgccgacctggcccatatcacggctcgattggcacatcaaacccgggcagaggaaggactgtag

SEQ ID NO: 220719 - DNA, 1641 bp, Artificial Sequence
  derived and/or modified sequence
atggagcagaggagagtgacagacttctttgccaggagaagacctggccccccacgcatcgccccacccaagctggcctgcaggacccccagccctgcccggcctgccctgcgggccccagccagcgccaccagcggcagcaggaagagggcccggcccccagctgcccctggccgggaccaggcccggcccccagcccggcggcggctgcggctgtctgtggatgaggtgagcagccccagcaccccagaggccccagacatcccagcctgccccagccctggccagaagatcaagaagagcaccccagctgctggccagcccccccacctgaccagcgcccaggaccaggacaccatcagcgagctggccagctgcctgcagagggcccgggagctgggcgcccgggtgcgggccctgaaggccagcgcccaggatgctggggagagctgcaccccagaggccgagggccggcctgaggagccctgtggggagaaggccccagcctaccagcgcttccacgccctggcccagcccggcctgcccggcctggtgctgccctacaagtaccaggtgctggccgagatgttccgctccatggacaccatcgtgggcatgctgcacaacagaagtgagacccccacctttgccaaggtgcagaggggcgtgcaggacatgatgagaagaagatttgaagaatgtaatgtgggccagatcaagacagtgtacccagccagctaccgcttccggcaggagaggtctgtgcccaccttcaaggatggcaccaggagaagtgactaccagctgaccatcgagcccctgctggagcaggaggctgatggagctgccccccagctgacagccagccggctgctgcagaggcggcagatcttcagccagaagctggtggagcacgtgaaggagcaccacaaggccttcctggccagcctgagccctgccatggtggtgcctgaggaccagctgacccgctggcacccccgcttcaacgtggatgaggtgcctgacatcgagcctgctgccctgccccagcccccagccacagagaagctgaccacagcccaggaggtgctggcccgggccaggaacctgatcagccccaggatggagaaggccctgagccagctggccctgcggtctgctgcccccagcagccctggcagccccaggcctgccctgcctgccaccccaccagccaccccacctgctgccagccccagcgccctgaagggcgtgtcccaggacctgctggagcgcatccgggccaaggaggcccagaagcagctggcccagatgacccgctgcccagagcaggagcagaggctgcagaggctggagcggctgcctgagctggcccgggtgctgcggtctgtgtttgtgtctgagaggaagccagccctgtccatggaggtggcctgtgccaggatggtgggcagctgctgcaccatcatgagccctggagagatggagaagcacctgctgctgctgtctgagctgctgcctgactggctgagcctgcaccgcatcagaacagacacctacgtgaagctggacaaggctgctgacctggcccacatcacagcccggctggcccaccagaccagggctgaggagggcctgtag

SEQ ID NO: 220720 - DNA, 1641 bp, Artificial Sequence
  derived and/or modified sequence
atggagcagcggcgggtgaccgacttcttcgcccggcggcggcccgggccccccaggatcgcgccccccaaactcgcatgccggacaccatccccggcccgcccggcgcttagggctcctgcctcagcgacaagtggcagccggaagcgcgcccggcctccagctgctcctgggcgggaccaagcccgcccgcctgccagacgccggctgaggctgtccgtagacgaggtgagctctccctctactcccgaggcccccgacatccctgcatgtcccagtcctgggcagaaaattaaaaaaagtaccccggcggcaggtcagcccccacacttaacatcagcccaagatcaagacacgatctccgagctggcctcctgcctgcagcgcgctcgggaactgggagctcgcgtcagagccctgaaagcatccgcacaggacgcaggcgagtcatgtacccccgaggctgagggacggccggaggagccctgcggcgagaaggctccagcataccagcggttccacgctctcgcccagccaggccttcccggcctggtgctgccatataagtaccaagtgctcgccgagatgtttagaagcatggatacaattgtagggatgttacacaatcgcagtgagacacccacattcgccaaggtccagagaggtgtccaggacatgatgcgccgcagattcgaagaatgtaacgtcgggcagattaaaacggtgtatcccgcttcctatcgttttcgccaggaacgatccgttcccactttcaaggacggcacccgtagatctgactatcagcttacgattgaacctcttctggaacaggaggcagatggggctgcgccacaactgactgcaagtcgcctgcttcaacgccgacagatcttctcgcagaagttagtcgagcatgtcaaagagcatcacaaagctttcttagcgtccctgtcaccagccatggtggtgcctgaagatcagctgaccagatggcatcccagattcaacgtcgatgaggtccccgacattgaacccgccgctctcccgcagcccccggccacagagaaattgaccacggctcaggaggttctcgcgcgagcgcgtaatctcatcagtcccaggatggagaaagcactgagtcagctcgcactgcggagcgctgccccaagctccccaggaagtccccggcctgccctgcctgctacaccaccagctaccccccccgcagcttccccaagtgctctaaagggggtttctcaggacctgcttgagagaattcgggccaaggaggcccagaagcagctggcccaaatgacacgctgtccagagcaggaacagcggttgcaaagactggaaaggcttccagaactagccagagtactgaggtccgtcttcgtgtccgagcgcaaaccagcattgtccatggaagtagcatgtgccagaatggtaggatcctgttgtaccatcatgtctcccggcgagatggagaagcatctgctgctcctgagcgaattgctccctgactggctgtctctgcaccgcatccgtactgacacttatgtcaagttggataaggccgccgatctcgcccacattactgcgcggcttgctcaccaaacccgagcagaggagggtctgtag

SEQ ID NO: 220721 - DNA, 1641 bp, Artificial Sequence
  derived and/or modified sequence
atggagcagcgtcgagtgaccgacttcttcgccaggcggaggcctggaccaccacgcatcgctcccccaaagctagcctgccggacaccaagccctgcgaggcctgctctgcgcgcaccagcttcagccacctccggaagccgtaagcgggcaagaccacctgctgcacccggtagagatcaggccagacctccggctcgaagacggctgcgactgagtgtggatgaggtttcgtcaccgtccacgccagaggcccctgatataccagcttgcccgagcccgggacaaaagatcaagaaatctacaccggctgccggacagccgcctcacctaactagcgcccaagaccaggacaccatttccgagctggcctcttgtctgcaacgggctcgcgagctgggcgctcgcgttcgagctcttaaggcgtctgcacaggacgcgggagaatcatgcacccccgaagctgaagggagacctgaagagccctgcggggagaaggcacccgcatatcaacgttttcatgcactagctcagcccggtttgccaggtctcgtgctgccatataagtatcaggtgcttgcagagatgtttaggtccatggacacaatagtgggaatgctccacaaccgcagtgagactccgaccttcgcaaaggtgcagcgcggtgttcaagatatgatgagacgtagatttgaagaatgcaacgtgggccagattaagacagtgtaccccgctagctatcggttccggcaggaacgcagtgtgcccacattcaaggatggaactcgacggtccgactatcagctcaccatcgagccactgctcgagcaggaggcagacggcgctgcaccgcagcttaccgctagtaggctgctgcagcgcagacagattttttcccagaaattggtcgagcatgtcaaagaacaccacaaggcgttcctcgccagcttatctccggctatggtagtacccgaggaccagctgacccgttggcatcccaggttcaatgtggacgaggtgcccgacatcgaaccagctgctctgccgcaaccgcctgcgaccgagaaactgacgactgctcaggaggtactcgccagagctcgcaatttaatttcccccaggatggagaaggctctaagccagctggccctcaggagtgctgctccaagttcacccggaagcccacgcccagcgctgcctgccactccaccagccacacctcccgctgccagtccgtctgccctgaaaggtgtaagtcaggacctcctcgaacggattagagccaaagaggcacagaaacaactcgctcagatgacaaggtgccccgaacaggaacagcgccttcagcggcttgagcgtctgcctgaactcgcacgggtgcttcgctctgttttcgtgagcgagcgaaaacctgccctctcaatggaggtggcgtgtgccagaatggttggttcttgttgtaccattatgagcccaggcgagatggagaagcatttgctgctgctgagtgagctgcttcccgattggctctctcttcacaggatccggaccgatacctatgtaaagctggataaagctgctgacttagcccatattaccgctcggttggcccaccagactagggccgaagaagggctttag

SEQ ID NO: 220722 - DNA, 2674 bp, Artificial Sequence
  derived and/or modified sequence
cccgcctcttcctcccttccttctttccttgctttcgccgcgcactccgccgccatggagcagcgccgcgtcaccgacttcttcgcgcgccgccgccccgggcccccccgcatcgcgccgcccaagctggcctgccgcacccccagccccgccaggcccgcactccgcgccccggcctccgctaccagtggcagccgcaagcgcgcccgcccgcccgccgcccccggacgcgaccaggccaggccaccggcccgcaggagactgcggctgtcggtggacgaggtttccagccccagtacccccgaggccccagacatcccagcctgcccttctccgggccagaagataaagaaatccaccccggcagcaggtcagccgccccacctgacatccgcgcaggaccaggacaccatctctgagcttgcgtcatgcctgcaacgggcccgggagctgggggcaagagtccgggcgctgaaggccagtgcccaggatgctggggagtcctgcaccccagaggccgagggccgccctgaggagccatgtggcgagaaggcgcccgcctaccagcgcttccatgccctggcccagcccggcctgccgggactcgtgctgccctacaagtaccaggtgctggcggagatgttccgcagcatggacaccatcgtgggcatgctccacaaccgctccgagacgcccacctttgccaaggtccagcggggcgtccaggacatgatgcgtaggcgttttgaggagtgcaatgttggccagatcaaaaccgtgtacccggcctcctaccgcttccgccaggagcgcagtgtccccaccttcaaggatggcaccaggaggtcagattaccagctcaccatcgagccactgctggagcaggaggctgacggagcagccccccagctcacggcctcgcgcctcctgcagcgacggcagatcttcagccagaagctggtggagcatgtcaaggagcaccacaaggccttcctggcctccctgagccccgccatggtggtgccggaggaccagctgacccgctggcacccgcgcttcaacgtggatgaagtacccgacatcgagccggccgcgctgccccagccacccgccacggagaagctcaccactgctcaggaggtgctggcccgggcccgcaacctgatttcacccaggatggagaaggccttgagtcaattggccctgcgctctgctgcgcccagcagccccgggtctcccaggccagcactgccggctaccccaccagccaccccgcctgcagcctctcccagtgctctgaagggggtgtcccaggatctgctggagcggatccgagccaaggaggcacagaagcagctggcacagatgacgcggtgcccggagcaggagcagcggctgcagcgcttagaacggctgcctgagctggcccgcgtgctgcggagcgtctttgtgtccgaacgcaagcctgcgctcagcatggaggtggcctgtgccaggatggtgggcagctgttgtactatcatgagccctggggaaatggagaagcacctgctgctcctctccgagctgctgccggactggctcagcctccaccgcatccgcaccgacacctacgtcaagctggacaaggccgcggacctcgcccacatcactgcacgcctggcccaccagacacgtgctgaggaggggctgtgagcctgggggccactgtggacagacgtgggcttcagaagctcgctggcctgggcccaccagcattttcttttatgaacatgatacactttggccttcctttccccagcgcccctgagggccagaggcagatgtgggctgcaggctgcacagcccgagggtctctggctgcgggcggtgggccccttcatggggctcacctggtggattcacattaaaccggtttctgtgggcacctctgtccttgctgctggtggggaagggaagccagatccagcaccccctggggggccatcgggagtgtggctgggggtgaagggggctctgtggcaatatggggttgggtagtgtgggtggcaggccatcccctctaatcttggaacctctgaatatgggacctcccacagcaaagggtgacttttgtcattaagaaagactggggtgggtgtggtggctcacgcctgtaaccccagcactttgggaggccaaggtgggcagatcacgaggtcaagagatcgagaccatcctggcgaacatggtgaaaccccatctctactaaaaatacaaaaaattagccgggtgtggtggtgggcacctgtcgtcccagctactagggaggctgaggcaggagaatggtgtgaacccaggaggcacagcttgcagtgagcgaagatcgcaccactgcacgcactccagcctgggtgacagagcgagactccgtctcaaaaaaaaaaatttcaagactggagaggtgatcctgaattgtccagctacgccccatgtcatcacagggccttcatgacagggccagagccagccagctttgaagacgcggccctgccccgacacaggcagcctggagaagctgggcaggacaagtaggacatccctggagcctccagaagggactggcctctgcccacaccttgacttcagtatttctgacctcctaaactctaataaagtcatgcttacagccact

SEQ ID NO: 220723 - DNA, 1641 bp, Artificial Sequence
  derived and/or modified sequence
atggagcagagaagagtgaccgacttcttcgccagaagaagacccggcccccccagaatcgccccccccaagctggcctgcagaacccccagccccgccagacccgccctgagagcccccgccagcgccaccagcggcagcagaaagagagccagaccccccgccgcccccggcagagaccaggccagaccccccgccagaagaagactgagactgagcgtggacgaggtgagcagccccagcacccccgaggcccccgacatccccgcctgccccagccccggccagaagatcaagaagagcacccccgccgccggccagcccccccacctgaccagcgcccaggaccaggacaccatcagcgagctggccagctgcctgcagagagccagagagctgggcgccagagtgagagccctgaaggccagcgcccaggacgccggcgagagctgcacccccgaggccgagggcagacccgaggagccctgcggcgagaaggcccccgcctaccagagattccacgccctggcccagcccggcctgcccggcctggtgctgccctacaagtaccaggtgctggccgagatgttcagaagcatggacaccatcgtgggcatgctgcacaacagaagcgagacccccaccttcgccaaggtgcagagaggcgtgcaggacatgatgagaagaagattcgaggagtgcaacgtgggccagatcaagaccgtgtaccccgccagctacagattcagacaggagagaagcgtgcccaccttcaaggacggcaccagaagaagcgactaccagctgaccatcgagcccctgctggagcaggaggccgacggcgccgccccccagctgaccgccagcagactgctgcagagaagacagatcttcagccagaagctggtggagcacgtgaaggagcaccacaaggccttcctggccagcctgagccccgccatggtggtgcccgaggaccagctgaccagatggcaccccagattcaacgtggacgaggtgcccgacatcgagcccgccgccctgccccagccccccgccaccgagaagctgaccaccgcccaggaggtgctggccagagccagaaacctgatcagccccagaatggagaaggccctgagccagctggccctgagaagcgccgcccccagcagccccggcagccccagacccgccctgcccgccaccccccccgccaccccccccgccgccagccccagcgccctgaagggcgtgagccaggacctgctggagagaatcagagccaaggaggcccagaagcagctggcccagatgaccagatgccccgagcaggagcagagactgcagagactggagagactgcccgagctggccagagtgctgagaagcgtgttcgtgagcgagagaaagcccgccctgagcatggaggtggcctgcgccagaatggtgggcagctgctgcaccatcatgagccccggcgagatggagaagcacctgctgctgctgagcgagctgctgcccgactggctgagcctgcacagaatcagaaccgacacctacgtgaagctggacaaggccgccgacctggcccacatcaccgccagactggcccaccagaccagagccgaggagggcctgtag

SEQ ID NO: 220724 - protein, 596 aa, Artificial Sequence
  derived and/or modified sequence
MEAEPPLYPMAGAAGPQGDEDLLGVPDGPEAPLDELVGAYPNYNEEEEERRYYRRKRLGVLKNVLAASAGGMLTYGVYLGLLQMQLILHYDETYREVKYGNMGLPDIDSKMLMGINVTPIAALLYTPVLIRFFGTKWMMFLAVGIYALFVSTNYWERYYTLVPSAVALGMAIVPLWASMGNYITRMAQKYHEYSHYKEQDGQGMKQRPPRGSHAPYLLVFQAIFYSFFHLSFACAQLPMIYFLNHYLYDLNHTLYNVQSCGTNSHGILSGFNKTVLRTLPRSGNLIVVESVLMAVFLAMLLVLGLCGAAYRPTEEIDLRSVGWGNIFQLPFKHVRDYRLRHLVPFFIYSGFEVLFACTGIALGYGVCSVGLERLAYLLVAYSLGASAASLLGLLGLWLPRPVPLVAGAGVHLLLTFILFFWAPVPRVLQHSWILYVAAALWGVGSALNKTGLSTLLGILYEDKERQDFIFTIYHWWQAVAIFTVYLGSSLHMKAKLAVLLVTLVAAAVSYLRMEQKLRRGVAPRQPRIPRPQHKVRGYRYLEEDNSDESDAEGEHGDGAEEEAPPAGPRPGPEPAGLGRRPCPYEQAQGGDGPEEQ

SEQ ID NO: 220725 - DNA, 1791 bp, Artificial Sequence
  derived and/or modified sequence
atggaggcagagccccccctgtaccccatggccggcgctgcggggccgcaaggagacgaggatctcttaggggtgcccgatggccctgaggcccccttggatgaacttgtgggagcctacccaaattacaacgaggaagaagaggaaaggaggtattaccggaggaaacggttgggagttctgaagaacgtgttagcagcgtccgcgggtgggatgctaacatatggggtctacctcgggctgttgcagatgcaactcatactccactacgacgagacttacagggaagtcaagtatgggaatatggggcttcctgacattgattccaaaatgttaatgggcatcaacgtgacaccaatagctgctctcctctatacccctgttctgattaggttctttggaactaagtggatgatgttcctcgcggtgggtatttacgctctctttgtatcaaccaattactgggaacgttactatacccttgtcccttctgctgtggctctgggtatggcaattgtccccctatgggcgtcaatggggaattatatcactcgtatggctcagaagtatcacgagtattcccattacaaggagcaagacggacagggcatgaaacagcgcccaccaagagggtctcacgctccctatctgctggtgtttcaggccatattttattcattctttcacctttcatttgcttgcgctcagttgcccatgatctactttttgaaccattatctttacgatctgaatcacactttgtacaatgtgcaatcctgcgggacaaacagtcacggaattctgagtggattcaacaaaacagtgttgcggactctgccacgctctggcaacctgatagtagtcgagagtgtcctaatggccgtatttctggcaatgctgctggtactgggactgtgtggagctgcttaccggcctacagaggagattgacctgcgctcagtagggtggggaaatatcttccagctgccctttaagcatgtcagggactataggctgcgacacctggttcccttctttatctattccggattcgaggtccttttcgcttgtacaggaatcgcgctggggtatggggtgtgtagcgtgggcttggagcgcttagcatatctgttggtggcttactccctaggtgctagtgccgcatcacttttaggactactggggctttggctccctcgccccgtccccctggtggccggggcaggcgtgcatctgctccttacctttattttgttcttctgggcacccgttccgagagtcctccagcattcttggattctctatgtggctgctgcgctctggggagttgggagcgcacttaacaagacaggcctatccacgttactgggaatcctatatgaagataaagaacggcaggatttcatcttcacgatataccactggtggcaagccgtggcaatcttcactgtgtacctcggctcaagtctgcacatgaaagctaaactggcagtgctgttagtgacattggtggcggctgcggtgagctatctaaggatggagcagaaactcagaagaggggtggctccacggcagccccggatcccgaggccacagcataaggtgcggggataccgctatctggaagaagataactccgacgaatctgatgccgagggggaacatggggacggcgccgaggaggaagctccccccgctgggcccaggccaggacccgaaccagctgggctgggcaggagaccatgcccttatgagcaggcccagggaggggatgggccagaggagcaatag

SEQ ID NO: 220726 - DNA, 1791 bp, Artificial Sequence
  derived and/or modified sequence
atggaggccgagccccccctgtaccccatggccggggccgccggcccccagggagatgaggacctgctgggcgtgcctgatggccctgaggcccccctggatgagctggtgggcgcctaccccaactacaatgaggaggaggaggagcggcgctactacagaaggaagaggctgggcgtgctgaagaatgtgctggccgccagcgctgggggcatgctgacctatggagtgtacctgggcctgctgcagatgcagctgatcctgcactatgatgagacctaccgggaggtgaagtatggcaacatgggcctgcctgacatcgacagcaagatgctgatgggcatcaacgtgacccccatcgccgccctgctgtacacccctgtgctgatccgcttcttcggcaccaagtggatgatgttcctggccgtgggcatctatgccctgtttgtgtccaccaactactgggagcgctactacaccctggtgcccagcgctgtggccctgggcatggccatcgtgcccctgtgggcctccatgggcaactacatcaccaggatggcccagaagtaccacgagtacagccactacaaggagcaggacggccagggcatgaagcagaggcctccccggggcagccacgccccctacctgctggtgttccaggccatcttctacagcttcttccacctgagctttgcctgtgcccagctgcccatgatctacttcctgaaccactacctgtatgacctgaaccacaccctgtacaacgtgcagagctgtggcaccaacagccacggcatcctgagcggcttcaacaagacagtgctgcggaccctgcccaggagcggcaacctgattgtggtggagagcgtgctgatggctgtgttcctggccatgctgctggtgctgggcctgtgtggggccgcctaccggcccacagaggagattgacctgcggtctgtgggctggggcaacatcttccagctgcccttcaagcacgtgcgggactaccgcctgcggcacctggtgcccttcttcatctacagcggctttgaggtgctgtttgcctgcaccggcatcgccctgggctacggcgtgtgcagcgtgggcctggagcggctggcctacctgctggtggcctacagcctgggcgccagcgctgccagcctgctgggcctgctgggcctgtggctgcccaggcctgtgcccctggtggccggggccggcgtgcacctgctgctgaccttcatcctcttcttctgggcccctgtgccccgggtgctgcagcacagctggatcctgtatgtggccgccgccctgtggggcgtgggcagcgccctgaacaagacaggcctgagcaccctgctgggcatcctgtatgaggacaaggagcggcaggacttcatcttcaccatctaccactggtggcaggccgtggccatcttcaccgtgtacctgggcagcagcctgcacatgaaggccaagctggccgtgctgctggtgaccctggtggccgctgctgtgtcctacctgaggatggagcagaagctgcggcggggcgtggccccccggcagccccgcatcccccggccccagcacaaggtgcggggctaccgctacctggaggaggacaacagtgatgaaagtgatgctgagggggagcacggagatggagctgaggaggaggcccccccagctggcccccggcccggccctgagcctgctggcctgggcagaagaccctgcccctatgagcaggcccagggcggagatggccctgaggagcagtag

SEQ ID NO: 220727 - DNA, 1791 bp, Artificial Sequence
  derived and/or modified sequence
atggaggccgagccccccctgtaccccatggccggcgccgccggcccacagggagatgaagacctgctcggagtgcccgacgggcctgaggcaccactggatgagctggtgggcgcttatccgaattataacgaggaggaagaagaacggcggtactatcggaggaaacggctcggcgtcctgaagaatgtgctcgccgcatccgctggtggaatgctcacttatggagtttatctcggccttttgcaaatgcagctcatcctgcactacgatgagacgtaccgggaggtcaagtacggcaacatgggtctaccggacattgacagtaaaatgctgatggggattaacgtgaccccaatcgccgctttgctctatacgccagtgctgatacgatttttcggcactaagtggatgatgtttttggccgtgggtatatatgccctgtttgtatctacaaattactgggaacgttattacacccttgtgccctcggccgtggcacttgggatggctatagtccctttgtgggccagcatggggaattacatcactaggatggcccaaaagtaccacgagtattcgcactacaaggagcaggacggacaagggatgaagcagagaccacctcggggatctcacgccccttatctccttgtgttccaggctattttctatagtttcttccacctgagtttcgcctgcgcacaactccctatgatctacttcttgaatcactacctttacgatctgaaccatacgctatacaatgtacagtcatgtgggacaaattcacatggtatcctctcagggtttaataagacagtgcttcggaccctcccaagaagcggaaacctgattgtggtcgaatctgtgctcatggctgttttcctcgctatgctcttagtgctggggctttgcggggcagcctatagaccaactgaggaaatcgacctgaggtctgtcggctggggaaacatcttccagctcccttttaaacatgtgcgggattatcgcctccggcaccttgttcccttcttcatttattctggattcgaagtccttttcgcttgcacagggatcgcactcggatacggagtgtgctccgtgggcttggaacgtctcgcgtacctgctggtggcctactctctcggagcatctgctgctagcctgctcggactgcttgggttatggctgccccggcccgtgcccctggtggccggcgccggcgttcacctcctgttgaccttcattttatttttctgggctcctgttcctcgtgtccttcagcattcgtggattctctacgtggcggctgctctctggggtgtgggttccgccctcaataaaactgggctgtccacacttctgggcatcctttacgaggataaggagcggcaggactttattttcacaatctatcattggtggcaggccgtggctattttcaccgtttatctgggcagttccttgcatatgaaagcaaaattggctgtgttactggtgaccctggtggcagccgctgttagctatctgcgcatggagcagaagttaagaaggggcgtagcccctaggcagccccgcattcccaggcctcagcacaaggtgaggggataccgatacctcgaagaggataactccgacgaatcagatgctgaaggagaacatggagacggcgccgaagaagaggcgccccccgctggaccacgacctggtccagaacctgcgggccttggcagacgaccctgcccatacgagcaggcccagggcggagatggccccgaggaacagtag

SEQ ID NO: 220728 - DNA, 1791 bp, Artificial Sequence
  derived and/or modified sequence
atggaagcagaaccaccattatatcccatggcaggcgctgctggccctcagggtgatgaagacctgttaggagtacccgacggtcctgaggctcccctcgacgaactggtgggagcttacccgaactacaacgaagaggaggaggaaaggcgttattatcggaggaagcggcttggcgtgctgaagaatgtgttagctgctagcgcaggcggaatgctgacatacggtgtgtacctaggactgctgcagatgcagctgatcttacattatgatgagacatacagggaagtgaagtatggcaatatggggctgccagacatcgatagcaaaatgttgatggggatcaatgtgactccgattgctgccctgctctacacccccgtcctcataagatttttcggaactaagtggatgatgttccttgctgtgggtatttatgccctctttgttagcaccaactactgggaacgctactacacgctggtgcccagcgcagtagccctgggcatggcaatcgttcctctgtgggcctcaatgggtaattatataactaggatggcccagaagtatcacgagtattcccattataaggaacaggatgggcagggcatgaagcagcgaccccctcgcggatcccatgccccttatcttctggtgtttcaagctatcttttattctttcttccatctgtctttcgcctgcgcccagctgcctatgatttattttctgaaccactatttgtatgaccttaaccacacactgtataatgtccaatcatgtggaaccaactctcacggaatccttagtggttttaataaaacagtactgaggactcttcccagaagcgggaacctgatcgtggttgaatccgtgctgatggctgtgttcttggccatgttactggttcttggactgtgtggcgctgcctatcgaccaacagaggaaattgacctgcggtctgtcgggtggggaaacatcttccagcttcctttcaaacacgtgagagactaccgactcagacacctggtcccgtttttcatctactcaggatttgaggtgctcttcgcttgtacgggaattgccctagggtatggagtatgtagtgttggattggagagactggcttaccttctggtcgcctattctctgggcgcttccgcagcttcattgttaggtttactggggttatggctgccccgacctgttccgctcgtggccggtgccggagtccatctactgttaacatttattctattcttttgggctcccgtgcccagagttcttcaacatagctggatcctgtacgtcgcagctgccttatggggcgttggaagcgcactaaacaaaactggtctctccacactgctggggattctttacgaggataaggagagacaagactttatttttaccatctaccactggtggcaggcagtcgcaatctttaccgtgtacttgggatctagtcttcacatgaaagctaagctggccgtcctgttggtcactctcgtcgccgctgccgtctcttaccttaggatggaacagaaactgcgacgaggtgtcgctcctagacagccacggattccaagacctcaacacaaggtgagggggtatcgatacctcgaagaagacaactctgacgaatcggatgctgaaggcgaacacggcgacggtgctgaggaggaggcaccgcctgcagggcctaggcctggcccagaacctgctgggttagggagaaggccctgcccttatgagcaagctcagggtggagatggcccagaggagcaatag

SEQ ID NO: 220729 - DNA, 1791 bp, Artificial Sequence
  derived and/or modified sequence
atggaggccgagccccccctgtaccccatggccggcgccgccggcccccagggcgacgaggacctgctgggcgtgcccgacggccccgaggcccccctggacgagctggtgggcgcctaccccaactacaacgaggaggaggaggagagaagatactacagaagaaagagactgggcgtgctgaagaacgtgctggccgccagcgccggcggcatgctgacctacggcgtgtacctgggcctgctgcagatgcagctgatcctgcactacgacgagacctacagagaggtgaagtacggcaacatgggcctgcccgacatcgacagcaagatgctgatgggcatcaacgtgacccccatcgccgccctgctgtacacccccgtgctgatcagattcttcggcaccaagtggatgatgttcctggccgtgggcatctacgccctgttcgtgagcaccaactactgggagagatactacaccctggtgcccagcgccgtggccctgggcatggccatcgtgcccctgtgggccagcatgggcaactacatcaccagaatggcccagaagtaccacgagtacagccactacaaggagcaggacggccagggcatgaagcagagaccccccagaggcagccacgccccctacctgctggtgttccaggccatcttctacagcttcttccacctgagcttcgcctgcgcccagctgcccatgatctacttcctgaaccactacctgtacgacctgaaccacaccctgtacaacgtgcagagctgcggcaccaacagccacggcatcctgagcggcttcaacaagaccgtgctgagaaccctgcccagaagcggcaacctgatcgtggtggagagcgtgctgatggccgtgttcctggccatgctgctggtgctgggcctgtgcggcgccgcctacagacccaccgaggagatcgacctgagaagcgtgggctggggcaacatcttccagctgcccttcaagcacgtgagagactacagactgagacacctggtgcccttcttcatctacagcggcttcgaggtgctgttcgcctgcaccggcatcgccctgggctacggcgtgtgcagcgtgggcctggagagactggcctacctgctggtggcctacagcctgggcgccagcgccgccagcctgctgggcctgctgggcctgtggctgcccagacccgtgcccctggtggccggcgccggcgtgcacctgctgctgaccttcatcctgttcttctgggcccccgtgcccagagtgctgcagcacagctggatcctgtacgtggccgccgccctgtggggcgtgggcagcgccctgaacaagaccggcctgagcaccctgctgggcatcctgtacgaggacaaggagagacaggacttcatcttcaccatctaccactggtggcaggccgtggccatcttcaccgtgtacctgggcagcagcctgcacatgaaggccaagctggccgtgctgctggtgaccctggtggccgccgccgtgagctacctgagaatggagcagaagctgagaagaggcgtggcccccagacagcccagaatccccagaccccagcacaaggtgagaggctacagatacctggaggaggacaacagcgacgagagcgacgccgagggcgagcacggcgacggcgccgaggaggaggccccccccgccggccccagacccggccccgagcccgccggcctgggcagaagaccctgcccctacgagcaggcccagggcggcgacggccccgaggagcagtag

SEQ ID NO: 220730 - DNA, 2313 bp, Artificial Sequence
  derived and/or modified sequence
gtcccggccgccgggaggaagtggccgggcggtcgcagggactccggggcgaccgccgcgagtccgcagtagttcgggccatggaggcggagccgccgctctacccgatggcgggggctgcggggccgcagggcgacgaggacctgctcggggtcccggacgggcccgaggccccgctggacgagctggtgggcgcgtaccccaactacaacgaggaggaggaggagcgccgctactaccgccgcaagcgcctgggcgtgctcaagaacgtgctggctgccagcgccgggggcatgctcacctacggcgtctacctgggcctcctgcagatgcagctgatcctgcactacgacgagacctaccgcgaggtgaagtatggcaacatggggctgcccgacatcgacagcaaaatgctgatgggcatcaacgtgactcccatcgccgccctgctctacacacctgtgctcatcaggttttttggaacgaagtggatgatgttcctcgctgtgggcatctacgccctctttgtctccaccaactactgggagcgctactacacgcttgtgccctcggctgtggccctgggcatggccatcgtgcctctttgggcttccatgggcaactacatcaccaggatggcgcagaagtaccatgagtactcccactacaaggagcaggatgggcaggggatgaagcagcggcctccgcggggctcccacgcgccctatctcctggtcttccaagccatcttctacagcttcttccatctgagcttcgcctgcgcccagctgcccatgatttatttcctgaaccactacctgtatgacctgaaccacacgctgtacaatgtgcagagctgcggcaccaacagccacgggatcctcagcggcttcaacaagacggttctgcggacgctcccgcggagcggaaacctcattgtggtggagagcgtgctcatggcagtgttcctggccatgctgctggtgctgggtttgtgcggagccgcttaccggcccacggaggagatcgatctgcgcagcgtgggctggggcaacatcttccagctgcccttcaagcacgtgcgtgactaccgcctgcgccacctcgtgcctttctttatctacagcggcttcgaggtgctctttgcctgcactggtatcgccttgggctatggcgtgtgctcggtggggctggagcggctggcttacctcctcgtggcttacagcctgggcgcctcagccgcctcactcctgggcctgctgggcctgtggctgccacgcccggtgcccctggtggccggagcaggggtgcacctgctgctcaccttcatcctctttttctgggcccctgtgcctcgggtcctgcaacacagctggatcctctatgtggcagctgccctttggggtgtgggcagtgccctgaacaagactggactcagcacactcctgggaatcttgtacgaagacaaggagagacaggacttcatcttcaccatctaccactggtggcaggctgtggccatcttcaccgtgtacctgggctcgagcctgcacatgaaggctaagctggcggtgctgctggtgacgctggtggcggccgcggtctcctacctgcggatggagcagaagctgcgccggggcgtggccccgcgccagccccgcatcccgcggccccagcacaaggtgcgcggttaccgctacttggaggaggacaactcggacgagagcgacgcggagggcgagcatggggacggcgcggaggaggaggcgccgcccgcagggcccaggcctggccccgagcccgctggactcggccgccggccctgcccgtacgaacaggcgcaggggggagacgggccggaggagcagtgaggggccgcctggtccccggactcagcctccctcctcgccggcctcagtttaccacgtctgaggtcggggggaccccctccgagtcccgcgctgtcttcaaaggcccctgtctcccctcccccacgttggggacgcccctcccagagcccaggtcacctccgggcttccgcagccccctccaaggcggagtggagccttgggaacccctcggccaagcacaggggttcgaaaatacagctgaaaccccgcgggcccttagcacgcgccccagcgccggagcacggtcagggtcttcttgcgacccggcccgctccagatccccacagctctcggccgcggacccgggccgcgtgtgagcgcactttgcacctcctatccccagggtccgccgagagccacgattttttacagaaaatgagcaataaagagattttgtactgtc

SEQ ID NO: 220731 - protein, 43 aa, Artificial Sequence
  derived and/or modified sequence
NLYVKRCLNDIGICKKTCKPEEVRSEHGWVMCGKRKACCVPAD

SEQ ID NO: 220732 - protein, 43 aa, Artificial Sequence
  derived and/or modified sequence
NWYVKKCLNDVGICKKKCKPEELHVKNGRAMCGKQRDCCVPAD

SEQ ID NO: 220733 - protein, 43 aa, Artificial Sequence
  derived and/or modified sequence
NWYVKKCLNDVGICKKKCKPEEMHVKNGWAMCGKQRDCCVPAD

SEQ ID NO: 220734 - protein, 43 aa, Artificial Sequence
  derived and/or modified sequence
SWYVKKCLNDVGICKKKCKPEELHVKNGWAMCGKQRDCCVPAD

SEQ ID NO: 220735 - protein, 43 aa, Artificial Sequence
  derived and/or modified sequence
NWYVKKCLNDVGICKKKCKPGEMHIKNGWATCGKQRDCCVPAD

SEQ ID NO: 220736 - protein, 111 aa, Artificial Sequence
  derived and/or modified sequence
MKSLLFTLAVFMLLAQLVSGNWYVKKCLNDVGICKKKCKPEEMHVKNGWAMCGKQRDCCVPADRRANYPVFCVQTKTTRISTVTATTATTTLMMTTASMSSMAPTPVSPTG

SEQ ID NO: 220737 - DNA, 336 bp, Artificial Sequence
  derived and/or modified sequence
atgaaaagcctgctatttacactagcagtttttatgctgttggcacagctggtgtcaggtaactggtacgttaaaaaatgcctgaacgatgtgggaatttgtaaaaagaaatgcaagcccgaagaaatgcatgtcaagaatgggtgggctatgtgcggcaagcagcgcgattgttgtgtgcctgccgaccggagggcgaattaccccgtattttgtgtccaaactaagaccacacgcatctccacagttacagctactactgctacgacaaccctcatgatgactacagcctctatgtcatccatggcccctaccccggtatcccccaccggatag

SEQ ID NO: 220738 - DNA, 336 bp, Artificial Sequence
  derived and/or modified sequence
atgaagtctctgttatttaccctcgcggtgttcatgctcctggctcagctagtctccggcaactggtacgtaaaaaagtgtctgaatgacgttggtatatgtaaaaagaaatgtaagccagaggaaatgcatgtcaaaaacggctgggctatgtgcggtaaacagagagattgctgcgtgccggccgaccgacgtgccaattatcccgtattctgtgtccagaccaagaccacccgaatctcaaccgtaaccgctaccaccgctaccactaccctgatgatgactacagctagtatgtcttccatggccccaactccagtatcaccaactggatag

SEQ ID NO: 220739 - DNA, 336 bp, Artificial Sequence
  derived and/or modified sequence
atgaagtctctgttatttaccctcgcggtgttcatgctcctggctcagctagtctccggcaactggtacgtaaaaaagtgtctgaatgacgttggtatatgtaaaaagaaatgtaagccagaggaaatgcatgtcaaaaacggctgggctatgtgcggtaaacagagagattgctgcgtgccggccgaccgacgtgccaattatcccgtattctgtgtccagaccaagaccacccgaatctcaaccgtaaccgctaccaccgctaccactaccctgatgatgactacagctagtatgtcttccatggctccaactcccgtctcccctacaggatag

SEQ ID NO: 220740 - DNA, 336 bp, Artificial Sequence
  derived and/or modified sequence
atgaagagcctgctgttcaccctggccgtgttcatgctgctggcccagctggtgagcggcaactggtacgtgaagaagtgcctgaacgacgtgggcatctgcaagaagaagtgcaagcccgaggagatgcacgtgaagaacggctgggccatgtgcggcaagcagagagactgctgcgtgcccgccgacagaagagccaactaccccgtgttctgcgtgcagaccaagaccaccagaatcagcaccgtgaccgccaccaccgccaccaccaccctgatgatgaccaccgccagcatgagcagcatggcccccacccccgtgagccccaccggctag

SEQ ID NO: 220741 - DNA, 336 bp, Artificial Sequence
  derived and/or modified sequence
atgaagagcctgctttttacgctagccgtctttatgcttctggcgcagctggtatcaggcaactggtacgtgaaaaagtgcttaaacgatgtgggaatctgcaaaaagaagtgtaagcccgaggagatgcatgtcaagaatgggtgggccatgtgcggcaagcagcgggactgctgcgtgccggcagataggcgggctaattacccggtgttttgtgttcagacaaaaaccacccgaatcagtaccgtcacagcgacaactgccacaaccaccttgatgatgacaacagcctcaatgtcaagcatggcccctacccctgtttcccccacagggtag

SEQ ID NO: 220742 - DNA, 336 bp, Artificial Sequence
  derived and/or modified sequence
atgaagagcctgctcttcaccctggccgtgttcatgctgctggcccagctggtgtctggcaactggtacgtgaagaagtgcctgaatgatgtgggcatctgcaagaagaagtgcaagccagaggagatgcacgtgaagaatggctgggccatgtgtgggaagcagagggactgctgcgtgcctgctgaccggcgggccaactaccctgtgttctgtgtgcagaccaagaccacccgcatcagcacagtgacagccaccacagccaccaccaccctgatgatgaccacagcctccatgagctccatggcccccacccctgtgagccccaccggctag

SEQ ID NO: 220743 - DNA, 655 bp, Artificial Sequence
  derived and/or modified sequence
gccatacacttcagcagagtttgcaacttctcttctaagtctttatccttcccccaaggcatgcctagcacaggactcttgaacagtgatgcctcaattagagttgctagccaatagattgaagctatgttggcacaatatcctacatcctcccgatctactggctgagcccaaccccacctaagaaggacaataaagatctgtgttcagagtcatactgaatagagacttctggactctatagaacccactgcctcctgatgaagtccctactgttcacccttgcagtttttatgctcctggcccaattggtctcaggtaattggtatgtgaaaaagtgtctaaacgacgttggaatttgcaagaagaagtgcaaacctgaagagatgcatgtaaagaatggttgggcaatgtgcggcaaacaaagggactgctgtgttccagctgacagacgtgctaattatcctgttttctgtgtccagacaaagactacaagaatttcaacagtaacagcaacaacagcaacaacaactttgatgatgactactgcttcgatgtcttcgatggctcctacccccgtttctcccactggttgaacattccagcctctgtctcctgctctaggatccccgactcattaaagcaaagaggctta

SEQ ID NO: 220744 - DNA, 336 bp, Artificial Sequence
  derived and/or modified sequence
atgaagagcctgctgttcaccctggccgtgttcatgctgctggcccagctggtaagtgggaactggtatgttaaaaagtgtttgaacgatgttggcatctgtaaaaagaagtgcaagccggaggagatgcacgtgaagaacgggtgggctatgtgtggtaagcagagagattgctgtgttccagccgataggagagctaactaccccgtattttgtgtacagaccaaaacaactaggatatctacagttacagcaacgaccgcaacaacaactctgatgatgacgactgcctccatgagctcgatggcaccaacccccgtctcacctacaggttag

SEQ ID NO: 220745 - RNA, 336 nt, Artificial Sequence
  derived and/or modified sequence
augaagucucuguuauuuacccucgcgguguucaugcuccuggcucagcuagucuccggcaacugguacguaaaaaagugucugaaugacguugguauauguaaaaagaaauguaagccagaggaaaugcaugucaaaaacggcugggcuaugugcgguaaacagagagauugcugcgugccggccgaccgacgugccaauuaucccguauucuguguccagaccaagaccacccgaaucucaaccguaaccgcuaccaccgcuaccacuacccugaugaugacuacagcuaguaugucuuccauggccccaacuccaguaucaccaacuggauag

SEQ ID NO: 220746 - RNA, 336 nt, Artificial Sequence
  derived and/or modified sequence
augaagucucuguuauuuacccucgcgguguucaugcuccuggcucagcuagucuccggcaacugguacguaaaaaagugucugaaugacguugguauauguaaaaagaaauguaagccagaggaaaugcaugucaaaaacggcugggcuaugugcgguaaacagagagauugcugcgugccggccgaccgacgugccaauuaucccguauucuguguccagaccaagaccacccgaaucucaaccguaaccgcuaccaccgcuaccacuacccugaugaugacuacagcuaguaugucuuccauggcuccaacucccgucuccccuacaggauag

SEQ ID NO: 220747 - protein, 406 aa, Artificial Sequence
  derived and/or modified sequence
MAENGKNCDQRRVAMNKEHHNGNFTDPSSVNEKKRREREERQNIVLWRQPLITLQYFSLEILVILKEWTSKLWHRQSIVVSFLLLLAVLIATYYVEGVHQQYVQRIEKQFLLYAYWIGLGILSSVGLGTGLHTFLLYLGPHIASVTLAAYECNSVNFPEPPYPDQIICPDEEGTEGTISLWSIISKVRIEACMWGIGTAIGELPPYFMARAARLSGAEPDDEEYQEFEEMLEHAESAQDFASRAKLAVQKLVQKVGFFGILACASIPNPLFDLAGITCGHFLVPFWTFFGATLIGKAIIKMHIQKIFVIITFSKHIVEQMVAFIGAVPGIGPSLQKPFQEYLEAQRQKLHHKSEMGTPQGENWLSWMFEKLVVVMVCYFILSIINSMAQSYAKRIQQRLNSEEKTK

SEQ ID NO: 220748 - protein, 309 aa, Artificial Sequence
  derived and/or modified sequence
MDLKYVQRIEKQFLLYAYWIGLGILSSVGLGTGLHTFLLYLGPHIASVTLAAYECNSVNFPEPPYPDQIICPDEEGTEGTISLWSIISKVRIEACMWGIGTAIGELPPYFMARAARLSGAEPDDEEYQEFEEMLEHAESAQDFASRAKLAVQKLVQKVGFFGILACASIPNPLFDLAGITCGHFLVPFWTFFGATLIGKAIIKMHIQKIFVIITFSKHIVEQMVAFIGAVPGIGPSLQKPFQEYLEAQRQKLHHKSEMGTPQGENWLSWMFEKLVVVMVCYFILSIINSMAQSYAKRIQQRLNSEEKTK

SEQ ID NO: 220749 - protein, 272 aa, Artificial Sequence
  derived and/or modified sequence
MDLKGPHIASVTLAAYECNSVNFPEPPYPDQIICPDEEGTEGTISLWSIISKVRIEACMWGIGTAIGELPPYFMARAARLSGAEPDDEEYQEFEEMLEHAESAQDFASRAKLAVQKLVQKVGFFGILACASIPNPLFDLAGITCGHFLVPFWTFFGATLIGKAIIKMHIQKIFVIITFSKHIVEQMVAFIGAVPGIGPSLQKPFQEYLEAQRQKLHHKSEMGTPQGENWLSWMFEKLVVVMVCYFILSIINSMAQSYAKRIQQRLNSEEKTK

SEQ ID NO: 220750 - protein, 214 aa, Artificial Sequence
  derived and/or modified sequence
MWGIGTAIGELPPYFMARAARLSGAEPDDEEYQEFEEMLEHAESAQDFASRAKLAVQKLVQKVGFFGILACASIPNPLFDLAGITCGHFLVPFWTFFGATLIGKAIIKMHIQKIFVIITFSKHIVEQMVAFIGAVPGIGPSLQKPFQEYLEAQRQKLHHKSEMGTPQGENWLSWMFEKLVVVMVCYFILSIINSMAQSYAKRIQQRLNSEEKTK

SEQ ID NO: 220751 - protein, 350 aa, Artificial Sequence
  derived and/or modified sequence
MAENGKNCDQRRVAMNKEHHNGNFTDPSSVNEKKRREREERQNIVLWRQPLITLQYFSLEILVILKEWTSKLWHRQSIVVSFLLLLAVLIATYYVEGVHQQYVQRIEKQFLLYAYWIGLGILSSVGLGTGLHTFLLYLGIGTAIGELPPYFMARAARLSGAEPDDEEYQEFEEMLEHAESAQDFASRAKLAVQKLVQKVGFFGILACASIPNPLFDLAGITCGHFLVPFWTFFGATLIGKAIIKMHIQKIFVIITFSKHIVEQMVAFIGAVPGIGPSLQKPFQEYLEAQRQKLHHKSEMGTPQGENWLSWMFEKLVVVMVCYFILSIINSMAQSYAKRIQQRLNSEEKTK

SEQ ID NO: 220752 - DNA, 1221 bp, Artificial Sequence
  derived and/or modified sequence
atggccgagaacggcaagaactgcgaccagagaagagtggccatgaacaaggagcaccacaacggcaacttcaccgaccccagcagcgtgaacgagaagaagagaagagagagagaggagagacagaacatcgtgctgtggagacagcccctgatcaccctgcagtacttcagcctggagatcctggtgatcctgaaggagtggaccagcaagctgtggcacagacagagcatcgtggtgagcttcctgctgctgctggccgtgctgatcgccacctactacgtggagggcgtgcaccagcagtacgtgcagagaatcgagaagcagttcctgctgtacgcctactggatcggcctgggcatcctgagcagcgtgggcctgggcaccggcctgcacaccttcctgctgtacctgggcccccacatcgccagcgtgaccctggccgcctacgagtgcaacagcgtgaacttccccgagcccccctaccccgaccagatcatctgccccgacgaggagggcaccgagggcaccatcagcctgtggagcatcatcagcaaggtgagaatcgaggcctgcatgtggggcatcggcaccgccatcggcgagctgcccccctacttcatggccagagccgccagactgagcggcgccgagcccgacgacgaggagtaccaggagttcgaggagatgctggagcacgccgagagcgcccaggacttcgccagcagagccaagctggccgtgcagaagctggtgcagaaggtgggcttcttcggcatcctggcctgcgccagcatccccaaccccctgttcgacctggccggcatcacctgcggccacttcctggtgcccttctggaccttcttcggcgccaccctgatcggcaaggccatcatcaagatgcacatccagaagatcttcgtgatcatcaccttcagcaagcacatcgtggagcagatggtggccttcatcggcgccgtgcccggcatcggccccagcctgcagaagcccttccaggagtacctggaggcccagagacagaagctgcaccacaagagcgagatgggcaccccccagggcgagaactggctgagctggatgttcgagaagctggtggtggtgatggtgtgctacttcatcctgagcatcatcaacagcatggcccagagctacgccaagagaatccagcagagactgaacagcgaggagaagaccaagtag

SEQ ID NO: 220753 - DNA, 930 bp, Artificial Sequence
  derived and/or modified sequence
atggacctgaagtacgtgcagagaatcgagaagcagttcctgctgtacgcctactggatcggcctgggcatcctgagcagcgtgggcctgggcaccggcctgcacaccttcctgctgtacctgggcccccacatcgccagcgtgaccctggccgcctacgagtgcaacagcgtgaacttccccgagcccccctaccccgaccagatcatctgccccgacgaggagggcaccgagggcaccatcagcctgtggagcatcatcagcaaggtgagaatcgaggcctgcatgtggggcatcggcaccgccatcggcgagctgcccccctacttcatggccagagccgccagactgagcggcgccgagcccgacgacgaggagtaccaggagttcgaggagatgctggagcacgccgagagcgcccaggacttcgccagcagagccaagctggccgtgcagaagctggtgcagaaggtgggcttcttcggcatcctggcctgcgccagcatccccaaccccctgttcgacctggccggcatcacctgcggccacttcctggtgcccttctggaccttcttcggcgccaccctgatcggcaaggccatcatcaagatgcacatccagaagatcttcgtgatcatcaccttcagcaagcacatcgtggagcagatggtggccttcatcggcgccgtgcccggcatcggccccagcctgcagaagcccttccaggagtacctggaggcccagagacagaagctgcaccacaagagcgagatgggcaccccccagggcgagaactggctgagctggatgttcgagaagctggtggtggtgatggtgtgctacttcatcctgagcatcatcaacagcatggcccagagctacgccaagagaatccagcagagactgaacagcgaggagaagaccaagtag

SEQ ID NO: 220754 - DNA, 819 bp, Artificial Sequence
  derived and/or modified sequence
atggacctgaagggcccccacatcgccagcgtgaccctggccgcctacgagtgcaacagcgtgaacttccccgagcccccctaccccgaccagatcatctgccccgacgaggagggcaccgagggcaccatcagcctgtggagcatcatcagcaaggtgagaatcgaggcctgcatgtggggcatcggcaccgccatcggcgagctgcccccctacttcatggccagagccgccagactgagcggcgccgagcccgacgacgaggagtaccaggagttcgaggagatgctggagcacgccgagagcgcccaggacttcgccagcagagccaagctggccgtgcagaagctggtgcagaaggtgggcttcttcggcatcctggcctgcgccagcatccccaaccccctgttcgacctggccggcatcacctgcggccacttcctggtgcccttctggaccttcttcggcgccaccctgatcggcaaggccatcatcaagatgcacatccagaagatcttcgtgatcatcaccttcagcaagcacatcgtggagcagatggtggccttcatcggcgccgtgcccggcatcggccccagcctgcagaagcccttccaggagtacctggaggcccagagacagaagctgcaccacaagagcgagatgggcaccccccagggcgagaactggctgagctggatgttcgagaagctggtggtggtgatggtgtgctacttcatcctgagcatcatcaacagcatggcccagagctacgccaagagaatccagcagagactgaacagcgaggagaagaccaagtag

SEQ ID NO: 220755 - DNA, 645 bp, Artificial Sequence
  derived and/or modified sequence
atgtggggcatcggcaccgccatcggcgagctgcccccctacttcatggccagagccgccagactgagcggcgccgagcccgacgacgaggagtaccaggagttcgaggagatgctggagcacgccgagagcgcccaggacttcgccagcagagccaagctggccgtgcagaagctggtgcagaaggtgggcttcttcggcatcctggcctgcgccagcatccccaaccccctgttcgacctggccggcatcacctgcggccacttcctggtgcccttctggaccttcttcggcgccaccctgatcggcaaggccatcatcaagatgcacatccagaagatcttcgtgatcatcaccttcagcaagcacatcgtggagcagatggtggccttcatcggcgccgtgcccggcatcggccccagcctgcagaagcccttccaggagtacctggaggcccagagacagaagctgcaccacaagagcgagatgggcaccccccagggcgagaactggctgagctggatgttcgagaagctggtggtggtgatggtgtgctacttcatcctgagcatcatcaacagcatggcccagagctacgccaagagaatccagcagagactgaacagcgaggagaagaccaagtag

SEQ ID NO: 220756 - DNA, 1053 bp, Artificial Sequence
  derived and/or modified sequence
atggccgagaacggcaagaactgcgaccagagaagagtggccatgaacaaggagcaccacaacggcaacttcaccgaccccagcagcgtgaacgagaagaagagaagagagagagaggagagacagaacatcgtgctgtggagacagcccctgatcaccctgcagtacttcagcctggagatcctggtgatcctgaaggagtggaccagcaagctgtggcacagacagagcatcgtggtgagcttcctgctgctgctggccgtgctgatcgccacctactacgtggagggcgtgcaccagcagtacgtgcagagaatcgagaagcagttcctgctgtacgcctactggatcggcctgggcatcctgagcagcgtgggcctgggcaccggcctgcacaccttcctgctgtacctgggcatcggcaccgccatcggcgagctgcccccctacttcatggccagagccgccagactgagcggcgccgagcccgacgacgaggagtaccaggagttcgaggagatgctggagcacgccgagagcgcccaggacttcgccagcagagccaagctggccgtgcagaagctggtgcagaaggtgggcttcttcggcatcctggcctgcgccagcatccccaaccccctgttcgacctggccggcatcacctgcggccacttcctggtgcccttctggaccttcttcggcgccaccctgatcggcaaggccatcatcaagatgcacatccagaagatcttcgtgatcatcaccttcagcaagcacatcgtggagcagatggtggccttcatcggcgccgtgcccggcatcggccccagcctgcagaagcccttccaggagtacctggaggcccagagacagaagctgcaccacaagagcgagatgggcaccccccagggcgagaactggctgagctggatgttcgagaagctggtggtggtgatggtgtgctacttcatcctgagcatcatcaacagcatggcccagagctacgccaagagaatccagcagagactgaacagcgaggagaagaccaagtag

SEQ ID NO: 220757 - DNA, 1221 bp, Artificial Sequence
  derived and/or modified sequence
atggccgaaaatggaaaaaactgcgatcagcgaagagtggccatgaataaggagcaccacaatggaaattttaccgaccccagtagcgtgaacgagaaaaaaagaagagaacgcgaggaacgccagaacatcgttctgtggcgccagccattaattactctccaatatttctctctggagatcctggtgatcctgaaagagtggacttccaaactctggcaccgccagagtatcgtggtcagctttctgctcctgctagctgtgttaatcgctacttattacgtcgagggggttcaccaacagtacgtgcagcggattgaaaagcaattcttgctgtatgcctactggatcggactggggatcctctcaagtgtaggactaggaacgggactgcatacattcctgctttatctggggccccacatagcttcagtcacacttgcagcctacgagtgtaatagcgtaaacttccccgagcccccctatccagatcagatcatatgtcccgatgaagagggcacagaggggacaatttccctgtggtctattatttccaaggtgcggatagaggcgtgcatgtggggcatcgggaccgcgattggtgagctgcctccctactttatggcaagagccgcccgactgagcggggctgaaccagatgatgaggagtatcaggaattcgaggagatgctggaacatgcagaaagtgcccaagacttcgcctcccgggccaaactggccgttcaaaagttggtacagaaagttgggttcttcggcattctggcctgtgcctccatcccaaatcccctctttgaccttgcaggcatcacttgtgggcattttctggttccattttggaccttttttggcgccacactgatcggcaaggccataattaaaatgcatatccagaagatatttgtgattattacgttttccaaacacatcgttgagcaaatggtcgcattcatcggcgccgtgccaggcatcggcccttcccttcagaaaccattccaggagtacctggaagcccagcggcagaagctgcaccataaatctgagatgggaactcctcagggtgagaattggctgtcatggatgtttgaaaaactggtagttgtgatggtgtgttacttcattttatcaatcatcaactcaatggcccagagctatgcaaaacgaattcagcagagacttaacagcgaggagaaaactaagtag

SEQ ID NO: 220758 - DNA, 930 bp, Artificial Sequence
  derived and/or modified sequence
atggatctgaagtatgtgcagagaatcgagaagcagtttctcctctacgcttactggattggcctcggaatcctctcgagtgtcgggctcggcacaggccttcacacgtttctgctgtatctcggaccacacatcgccagtgtgactctcgccgcctatgagtgcaattccgtgaactttcccgagcctccctatcctgatcagatcatttgccctgatgaggaagggactgagggcactatttcgctgtggagcatcatttccaaagttcgcatcgaagcatgtatgtgggggatcggaacagctattggggagctacccccttattttatggctcgggccgcgcggctctcgggtgctgagccagacgatgaagagtaccaggagttcgaagaaatgctggagcacgccgagtctgctcaagactttgcgtcccgagctaagctggcagtccagaagctcgtacagaaggtggggtttttcggtatcttggcttgcgcatcaatcccaaatcctctgtttgacctggccggtatcacttgtgggcacttcctggtccccttttggacttttttcggggccaccctcatagggaaggctattattaagatgcatatccagaaaatattcgttataatcacattctccaaacacattgtagaacagatggttgcattcatcggcgccgttccgggtatcggaccgagcttacaaaagccgtttcaggaatatcttgaggcacagcggcaaaaattgcatcacaagtctgagatgggcactccccagggggagaactggctgagttggatgttcgaaaagctcgtggtggtcatggtgtgctatttcattctgtctattatcaacagcatggcgcagtcttacgctaagcgcatccagcagcgtctgaattctgaggaaaaaactaagtag

SEQ ID NO: 220759 - DNA, 819 bp, Artificial Sequence
  derived and/or modified sequence
atggatctgaagggacctcatatcgccagtgtgaccctcgctgcctacgagtgcaactcagtgaacttccctgaacctccttatcctgatcagataatttgccctgacgaagaggggactgaaggtaccatctcattatggagcattatctcaaaggtgcgtattgaggcttgcatgtggggaatagggacagctattggcgagttgccaccctatttcatggcgcgagccgccagactgtctggggcggagccagacgacgaagaatatcaggagtttgaggaaatgttggaacatgctgagtccgctcaagattttgcttcccgcgcaaagcttgccgtccagaagctggtgcagaaggtgggcttctttggaatcttagcatgtgctagcatcccaaaccctctgttcgatctggctggaataacgtgcggacacttcctggtgccgttttggacgttcttcggggccacgctgatcggcaaggccataattaaaatgcatatccagaaaatcttcgtcattatcacctttagcaaacatatcgtcgagcagatggtagcatttataggggccgtacccgggataggaccctctctgcagaaaccattccaggaatacctagaggcccaacgccagaaacttcatcataaatccgagatgggcaccccgcaaggggagaattggctgagctggatgtttgaaaagttggtcgtggtaatggtctgctacttcattttgagcataatcaatagcatggcccagtcatacgctaagcggatccagcagcgactgaactctgaagaaaaaacaaaatag

SEQ ID NO: 220760 - DNA, 645 bp, Artificial Sequence
  derived and/or modified sequence
atgtggggtatcggaacagcgattggcgagctacctccatattttatggcacgcgccgcccgccttagcggtgctgagcctgatgacgaagaataccaggagttcgaagagatgctcgaacacgccgagtcagctcaggactttgcaagcagggccaagctggccgtgcagaaactcgtccagaaagtaggcttttttgggatactggcatgcgcttccattcccaatccattgtttgatttagcaggaataacctgtggtcattttctggtgcccttttggactttcttcggagccacactgatcggcaaggccattatcaagatgcacatccaaaagattttcgtgattatcactttttccaagcacattgtcgaacaaatggtggcctttataggtgctgtacctggaatcggtccctccctgcagaaacctttccaggagtacctggaggcacagaggcagaagctgcaccacaagtccgagatggggacaccacaaggcgaaaactggttgtcttggatgtttgagaagcttgtcgttgtcatggtttgctacttcatcttgtccatcattaactccatggcccaatcctatgctaaacggatacagcaaagactaaattctgaggaaaagactaagtag

SEQ ID NO: 220761 - DNA, 1053 bp, Artificial Sequence
  derived and/or modified sequence
atggctgaaaacggaaaaaattgcgatcagcgccgcgttgctatgaacaaggaacatcacaatggaaattttactgatccatcatctgtgaacgaaaaaaagaggcgcgagcgcgaggaacggcaaaacattgttctgtggcggcagccactgataaccctccagtactttagccttgagatccttgttatactgaaggagtggacatccaagctgtggcacagacagagcatcgtggtctcttttctcctcctgcttgccgttttgatcgcgacctattacgtggagggtgtgcaccaacagtatgtccagagaattgagaagcagttcttattgtacgcatactggatcggcctcggcattttgtcttccgttggactgggcaccggactccacacattcctgctatacctcggaatcggcaccgctattggagaactaccaccatactttatggcccgcgcagcaaggctgtctggagccgagccggacgatgaggaatatcaggaatttgaggaaatgctagaacatgccgagtcagctcaggactttgcttcaagggcaaaactcgccgtccagaaactggtgcagaaagtaggcttcttcgggattctagcttgcgctagtatcccaaatcccctcttcgatctggcgggaattacttgcggacattttctggtgccattctggaccttctttggagctactttaatcggaaaagctataatcaagatgcacatacaaaaaatttttgtcattataaccttctctaagcacatagtcgaacagatggtggccttcatcggagccgtgccgggcatcggcccttcactgcagaagccttttcaggaatacctcgaggctcagcgacagaaactgcaccataagtctgagatgggcaccccacagggtgagaactggttaagctggatgttcgaaaagctggtcgtcgtaatggtgtgttacttcatactgtctataatcaatagcatggcgcagtcgtacgctaagagaatccagcagcgtttaaattcagaggagaagaccaagtag

SEQ ID NO: 220762 - DNA, 1221 bp, Artificial Sequence
  derived and/or modified sequence
atggctgaaaatggcaagaactgtgaccagaggagagtggccatgaacaaggagcaccacaatggaaacttcacagaccccagctctgtgaatgagaagaagagaagagagcgggaggagcggcagaacatcgtgctgtggaggcagcccctcatcaccctgcagtacttcagcctggagatcctggtgatcctgaaggagtggaccagcaagctgtggcaccggcagagcatcgtggtgtccttcctgctgctgctggccgtgctgattgccacctactacgtggagggcgtgcaccagcagtatgtgcagagaattgagaagcagttcctgctgtatgcctactggattggcctgggcatcctgagctctgtgggcctgggcaccggcctgcacaccttcctgctgtacctgggcccccacatcgcctctgtgaccctggccgcctatgagtgcaacagcgtgaacttccctgagcccccctacccagaccagatcatctgcccagatgaggagggcacagagggcaccatcagcctgtggagcatcatcagcaaggtgagaattgaggcctgcatgtggggcatcggcacagccatcggggagctgcccccctacttcatggcccgggccgcccggctgtctggagctgagccagatgatgaggagtaccaggagtttgaggagatgctggagcacgccgagagcgcccaggactttgccagccgggccaagctggccgtgcagaagctggtgcagaaggtgggcttcttcggcatcctggcctgtgccagcatccccaaccccctgtttgacctggccggcatcacctgtggccacttcctggtgcccttctggaccttctttggagccaccctcatcggcaaggccatcatcaagatgcacatccagaagatctttgtgatcatcaccttcagcaagcacatcgtggagcagatggtggccttcatcggggctgtgcccggcatcggccccagcctgcagaagcccttccaggagtacctggaggcccagaggcagaagctgcaccacaagtctgagatgggcaccccccagggcgagaactggctgtcctggatgtttgagaagctggtggtggtgatggtgtgctacttcatcctgagcatcatcaacagcatggcccagagctatgccaagaggatccagcagaggctgaacagcgaggagaagaccaagtag

SEQ ID NO: 220763 - DNA, 930 bp, Artificial Sequence
  derived and/or modified sequence
atggacctgaagtatgtgcagagaattgagaagcagttcctgctgtatgcctactggattggcctgggcatcctgagctctgtgggcctgggcaccggcctgcacaccttcctgctgtacctgggcccccacatcgcctctgtgaccctggccgcctatgagtgcaacagcgtgaacttccctgagcccccctacccagaccagatcatctgcccagatgaggagggcacagagggcaccatcagcctgtggagcatcatcagcaaggtgcgcatcgaggcctgcatgtggggcattggaacagccatcggggagctgcccccctacttcatggcccgggccgcccggctgagcggggctgagccagatgatgaggagtaccaggagtttgaggagatgctggagcacgccgagagcgcccaggactttgccagccgggccaagctggccgtgcagaagctggtgcagaaggtgggcttcttcggcatcctggcctgtgccagcatccccaaccccctgtttgacctggccggcatcacctgtggccacttcctggtgcccttctggaccttcttcggggccaccctgattggcaaggccatcatcaagatgcacatccagaagatcttcgtcatcatcaccttcagcaagcacatcgtggagcagatggtggccttcatcggggctgtgcccggcatcggccccagcctgcagaagcccttccaggagtacctggaggcccagaggcagaagctgcaccacaagtctgagatgggcaccccccagggcgagaactggctgtcctggatgtttgagaagctggtggtggtgatggtgtgctacttcatcctgagcatcatcaacagcatggcccagagctatgccaagaggatccagcagaggctgaacagcgaggagaagaccaagtag

SEQ ID NO: 220764 - DNA, 819 bp, Artificial Sequence
  derived and/or modified sequence
atggacctgaagggcccccacatcgcctctgtgaccctggccgcctatgagtgcaacagcgtgaacttccctgagcccccctacccagaccagatcatctgcccagatgaggagggcacagagggcaccatcagcctgtggagcatcatcagcaaggtgagaattgaggcctgcatgtggggcatcggcacagccatcggggagctgcccccctacttcatggcccgggccgcccggctgtctggagctgagccagatgatgaggagtaccaggagtttgaggagatgctggagcacgccgagagcgcccaggactttgccagccgggccaagctggccgtgcagaagctggtgcagaaggtgggcttcttcggcatcctggcctgtgccagcatccccaaccccctgtttgacctggccggcatcacctgtggccacttcctggtgcccttctggaccttctttggagccaccctcatcggcaaggccatcatcaagatgcacatccagaagatctttgtgatcatcaccttcagcaagcacatcgtggagcagatggtggccttcatcggggctgtgcccggcatcggccccagcctgcagaagcccttccaggagtacctggaggcccagaggcagaagctgcaccacaagtctgagatgggcaccccccagggcgagaactggctgtcctggatgtttgagaagctggtggtggtgatggtgtgctacttcatcctgagcatcatcaacagcatggcccagagctatgccaagaggatccagcagaggctgaacagcgaggagaagaccaagtag

SEQ ID NO: 220765 - DNA, 645 bp, Artificial Sequence
  derived and/or modified sequence
atgtggggcatcggcacagccatcggggagctgcccccctacttcatggcccgggccgcccggctgtctggagctgagccagatgatgaggagtaccaggagtttgaggagatgctggagcacgccgagagcgcccaggactttgccagccgggccaagctggccgtgcagaagctggtgcagaaggtgggcttcttcggcatcctggcctgtgccagcatccccaaccccctgtttgacctggccggcatcacctgtggccacttcctggtgcccttctggaccttctttggagccaccctcatcggcaaggccatcatcaagatgcacatccagaagatctttgtgatcatcaccttcagcaagcacatcgtggagcagatggtggccttcatcggggctgtgcccggcatcggccccagcctgcagaagcccttccaggagtacctggaggcccagaggcagaagctgcaccacaagtctgagatgggcaccccccagggcgagaactggctgtcctggatgtttgagaagctggtggtggtgatggtgtgctacttcatcctgagcatcatcaacagcatggcccagagctatgccaagaggatccagcagaggctgaacagcgaggagaagaccaagtag

SEQ ID NO: 220766 - DNA, 1053 bp, Artificial Sequence
  derived and/or modified sequence
atggctgaaaatggcaagaactgtgaccagaggagagtggccatgaacaaggagcaccacaatggaaacttcacagaccccagctctgtgaatgagaagaagagaagagagcgggaggagcggcagaacatcgtgctgtggaggcagcccctcatcaccctgcagtacttcagcctggagatcctggtgatcctgaaggagtggaccagcaagctgtggcaccggcagagcatcgtggtgtccttcctgctgctgctggccgtgctgattgccacctactacgtggagggcgtgcaccagcagtatgtgcagagaattgagaagcagttcctgctgtatgcctactggattggcctgggcatcctgagctctgtgggcctgggcaccggcctgcacaccttcctgctgtacctgggcatcggcacagccatcggggagctgcccccctacttcatggcccgggccgcccggctgtctggagctgagccagatgatgaggagtaccaggagtttgaggagatgctggagcacgccgagagcgcccaggactttgccagccgggccaagctggccgtgcagaagctggtgcagaaggtgggcttcttcggcatcctggcctgtgccagcatccccaaccccctgtttgacctggccggcatcacctgtggccacttcctggtgcccttctggaccttctttggagccaccctcatcggcaaggccatcatcaagatgcacatccagaagatctttgtgatcatcaccttcagcaagcacatcgtggagcagatggtggccttcatcggggctgtgcccggcatcggccccagcctgcagaagcccttccaggagtacctggaggcccagaggcagaagctgcaccacaagtctgagatgggcaccccccagggcgagaactggctgtcctggatgtttgagaagctggtggtggtgatggtgtgctacttcatcctgagcatcatcaacagcatggcccagagctatgccaagaggatccagcagaggctgaacagcgaggagaagaccaagtag

SEQ ID NO: 220767 - DNA, 1221 bp, Artificial Sequence
  derived and/or modified sequence
atggccgagaacggcaagaactgcgaccagcggcgggtggccatgaacaaagaacaccacaatggcaactttacagatccgtccagcgtgaacgaaaaaaaacgccgcgagcgtgaggaacggcaaaatatcgtgctctggcgccaacctctaatcacgctgcagtatttctccctggaaattttagtgatcctgaaggaatggacgagcaagctgtggcatcggcagtcgattgtggtctccttcctgcttctgctcgcagtcctgatcgcgacatactacgtcgagggggttcaccagcagtacgtgcagagaattgaaaagcaatttctgttgtacgcttattggatcggactgggaattctaagcagcgtgggacttggtaccggacttcacacctttctgctctacctgggcccccacatcgcatccgttactctggccgcatacgagtgtaacagcgttaactttcccgagccaccctaccctgaccaaattatttgtcccgatgaggaggggactgaaggaaccatctcgctctggtcaattatatccaaagtaaggatcgaagcgtgtatgtggggaattgggaccgcaatcggtgagctccccccttacttcatggcccgcgcagcgcgcctgtccggcgccgagcccgacgatgaagagtaccaagagttcgaagagatgttggagcacgcagaatcagcccaggacttcgcatcacgcgctaagcttgccgtccaaaaacttgtgcagaaggtagggttctttggcatccttgcttgcgcaagcatacccaacccactgtttgatctggctggcattacgtgcggccattttttggtgccgttttggaccttcttcggcgccaccctgatcggtaaggccatcatcaagatgcatatacagaaaatctttgtaatcataaccttttcaaaacacatcgtcgaacaaatggtcgcctttatcggtgctgtgcctggtattggaccctccctccagaagcctttccaagagtacttagaagcgcagaggcaaaagttacaccataaaagcgagatgggaacccctcagggcgaaaactggctttcctggatgtttgagaagctggtggtcgtaatggtgtgctatttcattctgagtatcattaactccatggcccagagttacgccaaaagaattcagcagcgtctgaatagcgaagaaaaaacaaagtag

SEQ ID NO: 220768 - DNA, 930 bp, Artificial Sequence
  derived and/or modified sequence
atggacctgaagtacgtgcagcggatcgagaagcagttcctgctgtacgcttactggatagggctcgggattctgagttctgtgggactggggaccgggctgcacactttcctgttatatctgggccctcacatcgcctcagtgacactagctgcctacgaatgcaattcggtcaattttcccgagcccccttaccccgaccagattatctgcccagatgaggagggcactgagggaacgatttccctgtggagtatcatcagcaaagtgcggattgaggcttgtatgtggggaatcgggaccgccattggggaactaccgccatatttcatggccagagccgctagactgagcggggccgaaccagacgatgaggaatatcaggagttcgaggagatgctggaacacgccgagtcagcgcaggatttcgcctcccgggcaaaattggcggttcagaagcttgtacaaaaggttggcttcttcggaatcctggcctgtgctagcattccaaacccgctctttgatttggccggcatcacctgtggccatttcttagtgcccttttggactttcttcggcgctactctaattggtaaggctatcataaaaatgcatatccaaaagatttttgtgatcattacgttcagtaagcacatcgtggagcaaatggtcgcctttattggggccgtccctggaatcgggccaagcctccaaaaaccctttcaggaatacctcgaagcacaaaggcagaagctgcaccataaaagcgagatgggaacgccgcagggcgagaattggctgtcttggatgttcgaaaaattggtggtagttatggtgtgctattttatactgtccatcattaactccatggcccagtcttacgctaaacggatacagcagagactgaatagtgaagagaagacaaagtag

SEQ ID NO: 220769 - DNA, 819 bp, Artificial Sequence
  derived and/or modified sequence
atggacctgaagggcccccacatcgccagcgtgaccctggccgcctatgagtgtaactcagtgaatttcccagagccgccctatccggaccagataatatgtcctgacgaggaaggcacagaaggtactatttccctgtggagcattatctctaaggtcaggatcgaggcctgtatgtggggtatcggaacagcaatcggcgaacttcccccctatttcatggcccgcgccgctcgattatccggagcggagccagatgacgaagaatatcaagaatttgaggagatgctggagcatgccgagtccgcacaggactttgcttctagggcgaagctcgcagtgcagaaactggtccaaaaagtgggcttcttcggcattttggcgtgtgcctccatccccaatcccctttttgacctggctggaattacttgtggccacttcttagtacccttttggacttttttcggggccacgttaatcggcaaagccattattaaaatgcacattcagaagatcttcgttatcataactttctccaagcacattgtggagcagatggttgccttcattggcgccgtccccggcatcgggcctagcttgcagaaacctttccaagagtacctcgaggctcaacgacagaagctgcaccataaaagcgagatgggtacaccgcagggcgagaattggctgagctggatgttcgagaaactggtggtggtgatggtttgctacttcatcctgtccatcattaacagtatggcacagagctatgctaagcggattcagcagaggctgaactccgaggagaagacaaaatag

SEQ ID NO: 220770 - DNA, 645 bp, Artificial Sequence
  derived and/or modified sequence
atgtggggcatcggcaccgccatcggcgagctgcccccctacttcatggcgcgggcagctaggctcagcggagcagaacccgacgatgaagaataccaggagtttgaggagatgcttgagcatgctgaatctgcacaggattttgcgagccgcgcgaagctggcagttcagaagttagtacagaaagtgggcttttttgggattctggcgtgtgcttcgatcccaaacccacttttcgaccttgccggaattacctgcggacattttctcgttccattctggacattctttggagctacactgattggaaaggccattataaaaatgcacattcagaaaattttcgttatcatcactttctctaagcatattgtggagcagatggtcgcatttatcggcgccgtgcccggcattggaccttccttgcaaaaacccttccaggaatacttagaggcccaacggcagaagctgcatcataaatcagagatgggtactccccagggtgagaattggctaagctggatgttcgaaaagctggtagttgttatggtctgttactttatcctgtctattatcaattctatggctcagagctatgcaaagagaatacagcaaaggctgaactcagaagagaaaacgaaatag

SEQ ID NO: 220771 - DNA, 1053 bp, Artificial Sequence
  derived and/or modified sequence
atggccgagaacggcaagaactgcgaccagcggcgggtggccatgaacaaggagcatcataacggtaattttactgacccttcctccgtgaatgagaagaagaggcgcgagcgcgaagaacgacagaacatcgtattatggcggcagcccttaattaccttgcagtacttctccttggagattcttgtaatcttgaaggagtggacatcgaagctgtggcaccgacagagcattgtcgtgagcttcctgctgctgctggctgtgctgatcgccacttattatgtcgagggggtgcaccagcaatacgtgcagcgcattgaaaagcagtttcttctttacgcttactggatcggcctcggaatcctatcttccgtggggctgggaactgggttgcacacctttttgctgtatttaggcattggtaccgccatcggcgagctgcctccctattttatggctagagccgccagactgagcggcgccgagcctgatgatgaagaataccaggagtttgaggaaatgctggaacacgctgagtcggcacaagactttgcctcccgagccaaactggccgtccaaaagctagtccagaaggtgggattttttgggatcctggcttgcgcgagtattcctaatccattatttgatctcgcggggattacttgcgggcactttctggttcctttttggacattttttggcgccacgctcatcggcaaggccatcatcaagatgcacatacagaagatatttgtgattattacttttagtaagcatatcgtagagcagatggtggccttcattggagccgttcccggaatcggtccatctctgcaaaagccttttcaggagtaccttgaagcacagaggcagaaactacaccacaagtccgaaatgggcacccctcagggtgaaaattggctctcctggatgttcgagaagttagtggtagtgatggtgtgctatttcattttaagcataatcaacagcatggcacaatcttatgcaaaacgcatacagcagcgactgaacagcgaggagaaaacgaagtag

SEQ ID NO: 220772 - DNA, 1221 bp, Artificial Sequence
  derived and/or modified sequence
atggcggagaacggcaagaattgtgaccaaaggcgggtcgccatgaataaagaacatcataatggcaactttacagacccatcatccgtgaatgagaagaagagacgagagagggaggagcgacagaatattgtgctgtggcgccaacctctgatcaccctacagtatttcagcttagagatcttagttattctgaaagagtggacaagcaaattgtggcataggcagtctatagtcgtctcatttctccttttgctcgcagtccttatagccacatactacgtagaaggcgtccatcagcaatacgtgcagagaatcgagaagcagtttctgctgtatgcgtactggattgggcttggcattttgtctagcgttggattgggcactggcttgcatacctttctgctttacctggggcctcacatcgcatcagtcaccctggctgcttacgaatgtaattctgtgaactttcccgagcccccatacccagatcagatcatctgccctgacgaggaagggacagaaggcacaatttcactgtggtcgatcatttcaaaggtgagaatcgaggcctgtatgtgggggatcggtaccgctattggcgagctccctccctactttatggccagggccgctcgattatccggagcagaacccgacgacgaggagtaccaggagttcgaagagatgcttgaacatgctgaatccgcacaggatttcgcttcgcgagctaagttggccgtacagaagcttgtgcagaaagtgggcttctttgggattttagcctgcgctagtattccaaatccattgtttgacctggcaggaatcacatgtggacattttctggtacctttctggacattcttcggcgcaacactgattggaaaggcgattatcaaaatgcacattcaaaagatatttgtcatcattactttctccaagcacattgtagagcaaatggtggcctttatcggagctgtccctgggattgggcctagtctgcagaagccattccaggaatacttggaggctcagcgtcagaagctgcaccacaaaagtgaaatgggcacaccccagggagagaactggctgtcttggatgttcgagaaattggtggttgtcatggtgtgttactttattctcagtatcatcaactccatggctcagtcatatgccaagcggatccagcagcgtctgaacagcgaggagaagactaagtag

SEQ ID NO: 220773 - DNA, 930 bp, Artificial Sequence
  derived and/or modified sequence
atggatttaaaatatgttcaaagaattgagaagcaattcttgctgtatgcctactggataggactcggtatcctctcctcagtcggactggggacaggcctgcacaccttcctgctgtacctgggcccacacatcgcgtctgtgacacttgctgcttatgagtgtaattctgtaaattttcccgaacctccatatcccgaccagattatctgcccggatgaggagggaacagaaggtacaatctctctgtggagcattatctctaaagtgcggattgaagcatgtatgtggggtatcggtacagccataggagaattacccccatactttatggcacgcgctgcacgactctccggcgcagaaccagacgacgaggagtaccaggagtttgaagagatgctcgagcacgcggaaagcgcgcaggactttgccagcagagccaagttggcggtacagaaactggttcaaaaggtgggtttctttggaatcctggcatgcgcttccattcccaaccccctgttcgacctggccggtattacatgcgggcactttctcgttcctttttggacattttttggcgctacacttattgggaaggccataattaagatgcacatccagaagatcttcgttattatcacatttagcaaacacattgtggaacagatggtggctttcatcggcgctgtccctggcattgggccttcccttcagaaaccgtttcaggagtatctggaggcccagcgccagaagttacaccacaaatccgaaatggggactcctcagggcgaaaattggcttagttggatgttcgaaaaacttgtagtcgttatggtctgttactttatcctgagcatcataaattcgatggcgcaaagctacgccaagcgaattcagcagcgactgaacagtgaagaaaagaccaaatag

SEQ ID NO: 220774 - DNA, 819 bp, Artificial Sequence
  derived and/or modified sequence
atggacctgaagggaccccatatcgccagcgttaccctggctgcttacgaatgtaattctgtgaacttccctgaaccgccttatcctgaccagataatctgtcccgatgaggagggcacagaaggcacaatttccctgtggagcataatatcgaaagtcaggatcgaagcatgtatgtggggaatcgggaccgctatcggagaactgcctccctattttatggctagggctgccagactctcaggggcagaacccgatgacgaagaataccaggagttcgaggagatgctggagcatgctgaatccgctcaggatttcgcgagtcgtgctaagctggccgtccagaagctcgtgcagaaagttggttttttcggaatccttgcttgcgcctcaatccccaatccccttttcgacctggccggtatcacatgtggccacttccttgtcccgttctggacgttctttggcgctactctgataggaaaagccatcatcaagatgcacattcagaaaatctttgttatcataaccttttcaaaacatatcgtggagcagatggtggccttcattggcgctgtgccaggtattggacctagcctgcagaagccatttcaagagtacctggaagctcaacgccagaagctgcatcacaaaagcgaaatgggaacaccccagggcgagaattggctcagttggatgtttgagaagctcgtggtggtcatggtgtgttacttcatattgtctatcatcaattcgatggcccagagctacgctaaacgcatccagcagcgattaaattccgaggagaaaacaaagtag

SEQ ID NO: 220775 - DNA, 645 bp, Artificial Sequence
  derived and/or modified sequence
atgtggggcattgggaccgccatcggggaactacctccctacttcatggctcgagctgccaggctgtcaggtgccgagccagacgacgaagagtatcaagaattcgaagaaatgttggaacacgcagaatccgctcaggacttcgcatcacgggcaaaactcgccgtgcagaagctcgttcagaaagtgggatttttcgggatactggcctgtgcatccatccccaaccctctgtttgatctagcgggtatcacttgcgggcatttcctggttcccttttggaccttcttcggggcaacactgatcggcaaagcaatcatcaagatgcacattcaaaagatcttcgtcatcataacgttttcaaaacatattgtggagcaaatggtcgccttcattggggcagtaccgggtataggtccttcgctacagaagccatttcaggagtatctggaagcacagcgacagaaactgcaccacaaatctgagatgggcactccacagggcgaaaactggttgagttggatgttcgagaagctcgttgtggtaatggtttgttatttcatcctctcaattatcaacagcatggcgcagagctatgcgaaacgtatccaacagaggctgaacagcgaggaaaaaacaaaatag

SEQ ID NO: 220776 - DNA, 1053 bp, Artificial Sequence
  derived and/or modified sequence
atggctgagaatggcaaaaattgtgaccagagacgtgtcgccatgaataaggagcatcataatgggaacttcacagatccatcttccgtgaatgaaaagaagcggagagaacgggaggaacgtcagaacatagtgctgtggcggcaaccattgatcactctgcagtatttctctctcgaaattctggtgatcctcaaagaatggacttctaagctctggcacagacaaagcattgtggtttctttcttactgctgctagcagttctgattgcgacttattatgtcgagggcgtgcatcagcagtatgtccaacgtattgaaaagcagttcctgctctacgcctactggatcggcctcggcatactgagcagcgtgggcttggggaccgggctccatacctttttactttacctggggatcggcaccgcaatcggcgaattgccaccatacttcatggccagggccgctcgcttaagtggcgctgaaccagatgatgaggagtaccaggaattcgaggagatgctggaacacgctgagtccgcacaggacttcgcaagcagagccaagctggcagtgcagaagctcgtgcaaaaagtgggctttttcgggattctcgcatgtgcatccattcccaatcccctgtttgacctggccggaatcacctgtggtcactttctcgtgcccttctggaccttctttggggcaacactgattggcaaagctataattaagatgcatattcagaaaatcttcgttatcatcaccttctccaagcatatcgttgagcagatggtagcatttatcggcgcagtaccaggcatcggaccgtctctgcagaagcctttccaggagtatttagaggctcaacggcagaagttgcaccataagtccgaaatgggtacaccacaaggggaaaactggctgagctggatgttcgagaaactggtcgtagtgatggtgtgttatttcatcttaagcattattaactccatggcccagagctacgctaagcggatccagcagcgtcttaactccgaggagaagacaaaatag

SEQ ID NO: 220777 - DNA, 2172 bp, Artificial Sequence
  derived and/or modified sequence
attcttcctcttgccacacccacagggcccgcactaagagcctaactgaaatcccgcgaggatcaaccgagctcgccgaaaggagggaggaacgtatcccttctggaggctgtctcagggggcagagggaccggaccggaagtgacgtgagcgggttccggttgtctggagcccagcggcgggtgtgagagtccgtaaggagcagcttccaggatcctgagatccggagcagccggggtcggagcggctcctcaagagttactgatctatgaaatggcagagaatggaaaaaattgtgaccagagacgtgtagcaatgaacaaggaacatcataatggaaatttcacagacccctcttcagtgaatgaaaagaagaggagggagcgggaagaaaggcagaatattgtcctgtggagacagccgctcattaccttgcagtatttttctctggaaatccttgtaatcttgaaggaatggacctcaaaattatggcatcgtcaaagcattgtggtgtcttttttactgctgcttgctgtgcttatagctacgtattatgttgaaggagtgcatcaacagtatgtgcaacgtatagagaaacagtttcttttgtatgcctactggataggcttaggaattttgtcttctgttgggcttggaacagggctgcacacctttctgctttatctgggtccacatatagcctcagttacattagctgcttatgaatgcaattcagttaattttcccgaaccaccctatcctgatcagattatttgtccagatgaagagggcactgaaggaaccatttctttgtggagtatcatctcaaaagttaggattgaagcctgcatgtggggtatcggtacagcaatcggagagctgcctccatatttcatggccagagcagctcgcctctcaggtgctgaaccagatgatgaagagtatcaggaatttgaagagatgctggaacatgcagagtctgcacaagactttgcctcccgggccaaactggcagttcaaaaactagtacagaaagttggattttttggaattttggcctgtgcttcaattccaaatcctttatttgatctggctggaataacgtgtggacactttctggtacctttttggaccttctttggtgcaaccctaattggaaaagcaataataaaaatgcatatccagaaaatttttgttataataacattcagcaagcacatagtggagcaaatggtggctttcattggtgctgtccccggcataggtccatctctgcagaagccatttcaggagtacctggaggctcaacggcagaagcttcaccacaaaagcgaaatgggcacaccacagggagaaaactggttgtcctggatgtttgaaaagttggtcgttgtcatggtgtgttacttcatcctatctatcattaactccatggcacaaagttatgccaaacgaatccagcagcggttgaactcagaggagaaaactaaataagtagagaaagttttaaactgcagaaattggagtggatgggttctgccttaaattgggaggactccaagccgggaaggaaaattcccttttccaacctgtatcaatttttacaacttttttcctgaaagcagtttagtccatactttgcactgacatactttttccttctgtgctaaggtaaggtatccaccctcgatgcaatccaccttgtgttttcttagggtggaatgtgatgttcagcagcaaacttgcaacagactggccttctgtttgttactttcaaaaggcccacatgatacaattagagaattcccaccgcacaaaaaaagttcctaagtatgttaaatatgtcaagctttttaggcttgtcacaaatgattgctttgttttcctaagtcatcaaaatgtatataaattatctagattggataacagtcttgcatgtttatcatgttacaatttaatattccatcctgcccaacccttcctctcccatcctcaaaaaagggccattttatgatgcattgcacaccctctggggaaattgatctttaaattttgagacagtataaggaaaatctggttggtgtcttacaagtgagctgacaccattttttattctgtgtatttagaatgaagtcttgaaaaaaactttataaagacatctttaatcattcc

SEQ ID NO: 220778 - DNA, 1332 bp, Artificial Sequence
  derived and/or modified sequence
gtctggagcccagcggcgggtgtgagagtccgtaaggagcagcttccaggatcctgagatccggagcagccggggtcggagcggctcctcaagagttactgatctatgaaatggcagagaatggaaaaaattgtgaccagagacgtgtagcaatgaacaaggaacatcataatggaaatttcacagacccctcttcagtgaatgaaaagaagaggagggagcgggaagaaaggcagaatattgtcctgtggagacagccgctcattaccttgcagtatttttctctggaaatccttgtaatcttgaaggaatggacctcaaatatgtgcaacgtatagagaaacagtttcttttgtatgcctactggataggcttaggaattttgtcttctgttgggcttggaacagggctgcacacctttctgctttatctgggtccacatatagcctcagttacattagctgcttatgaatgcaattcagttaattttcccgaaccaccctatcctgatcagattatttgtccagatgaagagggcactgaaggaaccatttctttgtggagtatcatctcaaaagttaggattgaagcctgcatgtggggtatcggtacagcaatcggagagctgcctccatatttcatggccagagcagctcgcctctcaggtgctgaaccagatgatgaagagtatcaggaatttgaagagatgctggaacatgcagagtctgcacaagactttgcctcccgggccaaactggcagttcaaaaactagtacagaaagttggattttttggaattttggcctgtgcttcaattccaaatcctttatttgatctggctggaataacgtgtggacactttctggtacctttttggaccttctttggtgcaaccctaattggaaaagcaataataaaaatgcatatccagaaaatttttgttataataacattcagcaagcacatagtggagcaaatggtggctttcattggtgctgtccccggcataggtccatctctgcagaagccatttcaggagtacctggaggctcaacggcagaagcttcaccacaaaagcgaaatgggcacaccacagggagaaaactggttgtcctggatgtttgaaaagttggtcgttgtcatggtgtgttacttcatcctatctatcattaactccatggcacaaagttatgccaaacgaatccagcagcggttgaactcagaggagaaaactaaataagtagagaaagttttaaactgcagaaattggagtggatgggttctgccttaaattgggaggactccaagccgggaaggaaaattcccttttcc

SEQ ID NO: 220779 - DNA, 1406 bp, Artificial Sequence
  derived and/or modified sequence
gtgagcgggttccggttgtctggagcccagcggcgggtgtgagagtccgtaaggagcagcttccaggatcctgagatccggagcagccggggtcggagcggctcctcaagagttactgatctatgaaatggcagagaatggaaaaaattgtgaccagagacgtgtagcaatgaacaaggaacatcataatggaaatttcacagacccctcttcagtgaatgaaaagaagaggagggagcgggaagaaaggcagaatattgtcctgtggagacagccgctcattaccttgcagtatttttctctggaaatccttgtaatcttgaaggaatggacctcaaaggtccacatatagcctcagttacattagctgcttatgaatgcaattcagttaattttcccgaaccaccctatcctgatcagattatttgtccagatgaagagggcactgaaggaaccatttctttgtggagtatcatctcaaaagttaggattgaagcctgcatgtggggtatcggtacagcaatcggagagctgcctccatatttcatggccagagcagctcgcctctcaggtgctgaaccagatgatgaagagtatcaggaatttgaagagatgctggaacatgcagagtctgcacaagactttgcctcccgggccaaactggcagttcaaaaactagtacagaaagttggattttttggaattttggcctgtgcttcaattccaaatcctttatttgatctggctggaataacgtgtggacactttctggtacctttttggaccttctttggtgcaaccctaattggaaaagcaataataaaaatgcatatccagaaaatttttgttataataacattcagcaagcacatagtggagcaaatggtggctttcattggtgctgtccccggcataggtccatctctgcagaagccatttcaggagtacctggaggctcaacggcagaagcttcaccacaaaagcgaaatgggcacaccacagggagaaaactggttgtcctggatgtttgaaaagttggtcgttgtcatggtgtgttacttcatcctatctatcattaactccatggcacaaagttatgccaaacgaatccagcagcggttgaactcagaggagaaaactaaataagtagagaaagttttaaactgcagaaattggagtggatgggttctgccttaaattgggaggactccaagccgggaaggaaaattcccttttccaacctgtatcaatttttacaacttttttcctgaaagcagtttagtccatactttgcactgacatactttttccttctgtgctaaggtaaggtatccaccctcgatgcaatccaccttgtgttttcttagggtggaatgtgatgttcagcagcaaacttgcaacagact

SEQ ID NO: 220780 - DNA, 1430 bp, Artificial Sequence
  derived and/or modified sequence
gagcgggttccggttgtctggagcccagcggcgggtgtgagagtccgtaaggagcagcttccaggatcctgagatccggagcagccggggtcggagcggctcctcaagagttactgatctatgaaatggcagagaatggaaaaaattgtgaccagagacgtgtagcaatgaacaaggaacatcataatggaaatttcacagattatggcatcgtcaaagcattgtggtgtcttttttactgctgcttgctgtgcttatagctacgtattatgttgaaggagtgcatcaacagtatgtgcaacgtatagagaaacagtttcttttgtatgcctactggataggcttaggaattttgtcttctgttgggcttggaacagggctgcacacctttctgctttatctgggtccacatatagcctcagttacattagctgcttatgaatgcaattcagttaattttcccgaaccaccctatcctgatcagattatttgtccagatgaagagggcactgaaggaaccatttctttgtggagtatcatctcaaaagttaggattgaagcctgcatgtggggtatcggtacagcaatcggagagctgcctccatatttcatggccagagcagctcgcctctcaggtgctgaaccagatgatgaagagtatcaggaatttgaagagatgctggaacatgcagagtctgcacaagactttgcctcccgggccaaactggcagttcaaaaactagtacagaaagttggattttttggaattttggcctgtgcttcaattccaaatcctttatttgatctggctggaataacgtgtggacactttctggtacctttttggaccttctttggtgcaaccctaattggaaaagcaataataaaaatgcatatccagaaaatttttgttataataacattcagcaagcacatagtggagcaaatggtggctttcattggtgctgtccccggcataggtccatctctgcagaagccatttcaggagtacctggaggctcaacggcagaagcttcaccacaaaagcgaaatgggcacaccacagggagaaaactggttgtcctggatgtttgaaaagttggtcgttgtcatggtgtgttacttcatcctatctatcattaactccatggcacaaagttatgccaaacgaatccagcagcggttgaactcagaggagaaaactaaataagtagagaaagttttaaactgcagaaattggagtggatgggttctgccttaaattgggaggactccaagccgggaaggaaaattcccttttccaacctgtatcaatttttacaacttttttcctgaaagcagtttagtccatactttgcactgacatactttttccttctgtgctaaggtaaggtatccaccctcgatgcaatccaccttgtgttttctta

SEQ ID NO: 220781 - DNA, 1358 bp, Artificial Sequence
  derived and/or modified sequence
gatccggagcagccggggtcggagcggctcctcaagagttactgatctatgaaatggcagagaatggaaaaaattgtgaccagagacgtgtagcaatgaacaaggaacatcataatggaaatttcacagacccctcttcagtgaatgaaaagaagaggagggagcgggaagaaaggcagaatattgtcctgtggagacagccgctcattaccttgcagtatttttctctggaaatccttgtaatcttgaaggaatggacctcaaaattatggcatcgtcaaagcattgtggtgtcttttttactgctgcttgctgtgcttatagctacgtattatgttgaaggagtgcatcaacagtatgtgcaacgtatagagaaacagtttcttttgtatgcctactggataggcttaggaattttgtcttctgttgggcttggaacagggctgcacacctttctgctttatctgggtatcggtacagcaatcggagagctgcctccatatttcatggccagagcagctcgcctctcaggtgctgaaccagatgatgaagagtatcaggaatttgaagagatgctggaacatgcagagtctgcacaagactttgcctcccgggccaaactggcagttcaaaaactagtacagaaagttggattttttggaattttggcctgtgcttcaattccaaatcctttatttgatctggctggaataacgtgtggacactttctggtacctttttggaccttctttggtgcaaccctaattggaaaagcaataataaaaatgcatatccagaaaatttttgttataataacattcagcaagcacatagtggagcaaatggtggctttcattggtgctgtccccggcataggtccatctctgcagaagccatttcaggagtacctggaggctcaacggcagaagcttcaccacaaaagcgaaatgggcacaccacagggagaaaactggttgtcctggatgtttgaaaagttggtcgttgtcatggtgtgttacttcatcctatctatcattaactccatggcacaaagttatgccaaacgaatccagcagcggttgaactcagaggagaaaactaaataagtagagaaagttttaaactgcagaaattggagtggatgggttctgccttaaattgggaggactccaagccgggaaggaaaattcccttttccaacctgtatcaatttttacaacttttttcctgaaagcagtttagtccatactttgcactgacatactttttccttctgtgctaaggtaaggtatccaccctcgatgcaatccaccttgtgttttcttagggtggaatgtgatgttcagcagcaaacttgc

SEQ ID NO: 220782 - protein, 453 aa, Artificial Sequence
  derived and/or modified sequence
MGVLGRVLLWLQLCALTQAVSKLWVPNTDFDVAANWSQNRTPCAGGAVEFPADKMVSVLVQEGHAVSDMLLPLDGELVLASGAGFGVSDVGSHLDCGAGEPAVFRDSDRFSWHDPHLWRSGDEAPGLFFVDAERVPCRHDDVFFPPSASFRVGLGPGASPVRVRSISALGRTFTRDEDLAVFLASRAGRLRFHGPGALSVGPEDCADPSGCVCGNAEAQPWICAALLQPLGGRCPQAACHSALRPQGQCCDLCGAVVLLTHGPAFDLERYRARILDTFLGLPQYHGLQVAVSKVPRSSRLREADTEIQVVLVENGPETGGAGRLARALLADVAENGEALGVLEATMRESGAHVWGSSAAGLAGGVAAAVLLALLVLLVAPPLLRRAGRLRWRRHEAAAPAGAPLGFRNPVFDVTASEELPLPRRLSLVPKAAADSTSHSYFVNPLFAGAEAEA

SEQ ID NO: 220783 - DNA, 1362 bp, Artificial Sequence
  derived and/or modified sequence
atgggtgtgctggggcgggtgctgttgtggctgcagctctgtgccctgacgcaagccgtatccaaattgtgggtgcccaacacagatttcgatgttgctgccaactggtcacagaatcgaacaccatgtgcgggaggagccgtggagtttcctgcggataaaatggtttctgtgctggtgcaggaaggacacgcggtcagtgatatgctgctccccctagacggggaactggtgctggcgagcggagccggattcggcgtttccgatgtgggcagccatttggactgtggcgccggagagccagccgtctttcgtgactctgataggttttcctggcatgatccacatctgtggaggtctggggatgaggctccgggactctttttcgtggacgcagagcgggtgccgtgtcgccatgatgacgtgttttttcctccatctgcgagctttagagtcgggttgggccccggagcctctccagtgagagtgagatctatatccgccctcggccgaactttcacccgcgacgaggatttggcagtcttcctcgcttcgcgcgcaggtcgcttgaggtttcacgggcccggcgccctgagcgtggggcccgaggactgcgcagacccctctggctgcgtgtgtggcaatgccgaggctcagccatggatatgcgccgccttgctgcagccgttgggaggtaggtgcccccaagcagcctgccactctgccctgagacctcaaggacagtgctgcgacctctgtggggctgtggtcctgctgacacatggccccgcctttgacctcgaaagataccgggcaagaattctggatacatttctaggtttaccccagtatcatgggctgcaggtcgctgtttctaaagtgcctcggagttctagactgcgcgaggccgacacagagattcaggttgtgctggtcgagaatggtcccgaaaccgggggtgcaggccgtctggccagggccctgctggccgacgttgcagagaacggcgaggcgctcggagtgttagaagccactatgcgggagagtggggcccacgtctgggggtcctcagccgctggcctggcaggcggcgtggcggcggctgtgctgctcgcgctgctcgtgttgctcgttgcaccacccttgttgagacgagccgggaggcttaggtggagacgccacgaggctgccgccccagctggcgccccactgggttttcgcaacccagtttttgacgtgaccgcgtcagaagagcttcctttgccaaggaggctgtctctcgtccccaaagcagccgccgactctacctcacactcctatttcgtcaaccctctgtttgccggagcagaggctgaagcatag

SEQ ID NO: 220784 - DNA, 1362 bp, Artificial Sequence
  derived and/or modified sequence
atgggcgtgctgggccgggtgctgctgtggctgcagctgtgtgccctgacccaggccgtgtccaagctgtgggtgcccaacacagactttgatgtggccgccaactggagccagaacagaacaccctgtgccggcggcgctgtggagttccctgctgacaagatggtgtctgtgctggtgcaggagggccatgctgtgtctgacatgctgctgcccctggatggagagctggtgctggccagcggggccggctttggagtgtctgatgtgggcagccacctggactgtggggccggggagcctgctgtgttccgggacagcgaccgcttctcctggcatgacccccacctgtggaggtctggagatgaggcccctggcctcttctttgtggatgctgagcgggtgccctgcagacatgatgatgtgttcttccccccatctgccagcttccgggtgggcctgggccctggggccagccctgtgcgggtgcgcagcatcagcgccctgggccgcaccttcaccagagatgaggacctggccgtgttcctggccagcagagctggccgcctgcgcttccacggccctggggccctgtctgtgggccctgaggactgtgccgaccccagcggctgtgtgtgtggaaatgctgaggcccagccctggatctgtgccgccctgctgcagcccctgggcggccgctgcccccaggccgcctgccacagcgccctgcggccccagggccagtgctgtgacctgtgtggggctgtggtgctgctgacccacggccctgcctttgacctggagcgctaccgggcccgcatcctggacaccttcctgggcctgccccagtaccacggcctgcaggtggccgtgtccaaggtgcccaggagcagccggctgcgggaggccgacacagagatccaggtggtgctggtggagaatggacctgagaccggcggggccggccgcctggcccgggccctgctggctgatgtggccgagaatggagaggccctgggcgtgctggaggccaccatgagggagagcggggcccacgtgtggggcagcagcgctgctggcctggccggcggcgtggccgctgctgtgctgctggccctgctggtgctgctggtggccccacccctgctgcggcgggccggccgcctgcgctggaggagacatgaggccgccgccccagctggggcccccctgggcttcagaaatcctgtgtttgatgtgacagccagcgaggagctgcccctgccccggcggctgagcctggtgcccaaggctgctgctgacagcaccagccacagctactttgtgaaccccctgtttgctggagctgaggccgaggcctag

SEQ ID NO: 220785 - DNA, 1362 bp, Artificial Sequence
  derived and/or modified sequence
atgggcgtgctgggccgggtgctgctgtggctgcagctgtgcgccctgacccaggccgtcagcaaattgtgggttcccaatacagatttcgatgtagctgcaaactggagccagaaccggactccctgcgccggaggagccgtcgaattccctgccgacaaaatggtgtcagttctcgtgcaggaaggccacgccgtcagcgatatgctattacccctcgatggggaattggtccttgccagtggagcgggtttcggggtaagcgatgttggaagccatctggattgcggtgctggagagcctgcagtgtttcgggatagtgacaggttttcctggcacgaccctcacctatggcgatctggcgatgaggcgccgggcctgttctttgtggacgccgaacgggtaccttgtaggcacgatgacgtcttttttcccccatccgcgtcttttcgagtgggcctggggccgggcgctagcccggtgcgggtgcggagcatctctgccctgggccgtacattcaccagagacgaagacctggccgtgtttctggcgtcaagagccggacggcttaggttccacggccctggagccctctcagttgggcctgaggactgtgctgatcccagcggctgcgtctgcggcaatgccgaggcccaaccctggatttgtgccgctctgcttcagcctctcggcggacgctgtccacaggccgcctgtcacagtgctctgcgtccccaaggacagtgttgtgatctgtgcggggcggttgttcttctcactcatggcccagcgttcgatctggaacgctatcgcgctaggattttagacaccttcttagggctgccccagtaccacggactgcaggttgctgtgtctaaggtaccccgtagttcacggctgagagaagccgacaccgaaattcaagtcgtcctggtggagaatggtcctgagacaggcggagcaggccgcctggcaagggccctgcttgctgatgtcgcagagaatggtgaggccctaggagtcctcgaggcaacgatgcgggaatcgggtgcgcatgtgtggggctcctcagctgcagggcttgctgggggcgtggccgcagccgtgcttttggctttattagtgcttttggtcgctccacctctgctgaggagagcaggacggctccgatggcgcaggcatgaggctgccgccccggccggggcacctttgggcttccgaaatccagttttcgatgtgacagcctccgaggaactgcctctgccacgtcggttaagcctggttcctaaggcagctgcagattcaacatcccacagctatttcgtcaacccactgtttgctggcgctgaggcagaggcctag

SEQ ID NO: 220786 - DNA, 1907 bp, Artificial Sequence
  derived and/or modified sequence
gtctcctggtggggtgcaaggagccgaggcgagatgggcgtcctgggccgggtcctgctgtggctgcagctctgcgcactgacccaggcggtctccaaactctgggtccccaacacggacttcgacgtcgcagccaactggagccagaaccggaccccgtgcgccggcggcgccgttgagttcccggcggacaagatggtgtcagtcctggtgcaagaaggtcacgccgtctcagacatgctcctgccgctggatggggaactcgtcctggcttcaggagccggattcggcgtctcagacgtgggctcgcacctggactgtggcgcgggcgaacctgccgtcttccgcgactctgaccgcttctcctggcatgacccgcacctgtggcgctctggggacgaggcacctggcctcttcttcgtggacgccgagcgcgtgccctgccgccacgacgacgtcttctttccgcctagtgcctccttccgcgtggggctcggccctggcgctagccccgtgcgtgtccgcagcatctcggctctgggccggacgttcacgcgcgacgaggacctggctgttttcctggcgtcccgcgcgggccgcctacgcttccacgggccgggcgcgctgagcgtgggccccgaggactgcgcggacccgtcgggctgcgtctgcggcaacgcggaggcgcagccgtggatctgcgcggccctgctccagcccctgggcggccgctgcccccaggccgcctgccacagcgccctccggccccaggggcagtgctgtgacctctgtggagccgttgtgttgctgacccacggccccgcatttgacctggagcggtaccgggcgcggatactggacaccttcctgggtctgcctcagtaccacgggctgcaggtggccgtgtccaaggtgccacgctcgtcccggctccgtgaggccgatacggagatccaggtggtgctggtggagaatgggcccgagacaggcggagcggggcggctggcccgggccctcctggcggacgtcgccgagaacggcgaggccctcggcgtcctggaggcgaccatgcgggagtcgggcgcacacgtctggggcagctccgcggctgggctggcgggcggcgtggcggctgccgtgctgctggcgctgctggtcctgctggtggcgccgccgctgctgcgccgcgcggggaggctcaggtggaggaggcacgaggcggcggccccggctggagcgcccctcggcttccgcaacccggtgttcgacgtgacggcctccgaggagctgcccctgccgcggcggctcagcctggttccgaaggcggccgcagacagcaccagccacagttacttcgtcaaccctctgttcgccggggccgaggccgaggcctgagcggccgcctgaccgtcgaccttggggctctccacccgctctggccccagtcgaactgggggctagccacctcctcgtccagcccccaaacctccccttcctttccccctcctccgggggccaaggacagggtggccttactcagtaaaggtgtttcctgcacctgctgtcagcctggctatgccgccaccggccccgcccatgaggactaggagcccagccttgcgccgcattcgcactgggggacatgggaggggtctagctggccactgctggaggcagcgctggtcgtcacctgggcggccagaggctgggatctgcgaagttgaacccagaactaggagtggggcttcccccgccttccggtgaggggagggtgaggagctggagggaggggcgggagagaggcaaggggtggacggagccaaaggccgtgcctggtggggcggacggaaaaggggtgggcatccctcctggtaccaagctgctgggtgcgaaggcagatcatatgg

SEQ ID NO: 220787 - DNA, 1362 bp, Artificial Sequence
  derived and/or modified sequence
atgggggtcctgggcagggtgcttctgtggttgcaactgtgcgcactgacacaggctgtttcaaaactgtgggtgccaaacacagattttgatgtggctgcgaattggagccagaataggacaccttgtgccggaggcgcagtggaatttccagcagacaagatggtgagcgtgctcgttcaggaggggcatgccgtcagcgatatgcttttaccgcttgacggcgaattggttctagcatccggcgctggttttggggtgagcgatgttggctcacacctcgattgtggagcgggagaacccgcagtgttcagggactcagaccgtttttcttggcatgatccacacctgtggagaagcggcgacgaggccccagggctttttttcgtggacgctgaacgggttccgtgcaggcacgacgacgtgttcttccctccttctgcttcatttcgcgtagggctgggacctggcgcatcgcctgtgcgagtgagatctatttccgccctcggcaggacttttactcgggatgaggatctggccgtttttctggcctccagagccggaagactcagatttcatggcccaggcgctctatctgtggggccagaggactgtgctgatccatccgggtgtgtctgcggaaatgctgaagctcaaccatggatctgcgcagccctcctccaacctctgggagggaggtgtcctcaggcggcatgtcatagcgccctcaggcctcagggccaatgctgtgacctgtgtggggcagtagtgttactgacgcacggcccagcattcgaccttgagagataccgtgccaggatcctcgataccttcctggggctgcctcagtaccatggcctgcaagtcgcagtgtccaaagttccacgatccagcaggctcagggaggccgatacagagattcaggtcgtgcttgtagagaatggtcccgagaccggcggtgctggacgcctcgccagggctcttcttgcggatgtggctgaaaacggggaggccttgggtgtactggaggccacaatgagggaatccggagctcatgtgtggggaagcagcgctgccggacttgctggcggagtggcagctgccgtactccttgccctcctagtgctgttagtcgccccacctttgcttcgcagggcaggacgcctgaggtggcgcagacatgaagcggctgcacccgcaggcgcacctctgggtttccgcaatccggtgttcgacgtgactgcctccgaagagctgcctcttcccagaagactaagtctggtgcccaaggcagcagccgatagcacttctcattcatactttgttaacccactgttcgcaggagccgaggctgaggcttag

SEQ ID NO: 220788 - DNA, 1362 bp, Artificial Sequence
  derived and/or modified sequence
atgggcgtgctgggcagagtgctgctgtggctgcagctgtgcgccctgacccaggccgtgagcaagctgtgggtgcccaacaccgacttcgacgtggccgccaactggagccagaacagaaccccctgcgccggcggcgccgtggagttccccgccgacaagatggtgagcgtgctggtgcaggagggccacgccgtgagcgacatgctgctgcccctggacggcgagctggtgctggccagcggcgccggcttcggcgtgagcgacgtgggcagccacctggactgcggcgccggcgagcccgccgtgttcagagacagcgacagattcagctggcacgacccccacctgtggagaagcggcgacgaggcccccggcctgttcttcgtggacgccgagagagtgccctgcagacacgacgacgtgttcttcccccccagcgccagcttcagagtgggcctgggccccggcgccagccccgtgagagtgagaagcatcagcgccctgggcagaaccttcaccagagacgaggacctggccgtgttcctggccagcagagccggcagactgagattccacggccccggcgccctgagcgtgggccccgaggactgcgccgaccccagcggctgcgtgtgcggcaacgccgaggcccagccctggatctgcgccgccctgctgcagcccctgggcggcagatgcccccaggccgcctgccacagcgccctgagaccccagggccagtgctgcgacctgtgcggcgccgtggtgctgctgacccacggccccgccttcgacctggagagatacagagccagaatcctggacaccttcctgggcctgccccagtaccacggcctgcaggtggccgtgagcaaggtgcccagaagcagcagactgagagaggccgacaccgagatccaggtggtgctggtggagaacggccccgagaccggcggcgccggcagactggccagagccctgctggccgacgtggccgagaacggcgaggccctgggcgtgctggaggccaccatgagagagagcggcgcccacgtgtggggcagcagcgccgccggcctggccggcggcgtggccgccgccgtgctgctggccctgctggtgctgctggtggccccccccctgctgagaagagccggcagactgagatggagaagacacgaggccgccgcccccgccggcgcccccctgggcttcagaaaccccgtgttcgacgtgaccgccagcgaggagctgcccctgcccagaagactgagcctggtgcccaaggccgccgccgacagcaccagccacagctacttcgtgaaccccctgttcgccggcgccgaggccgaggcctag

SEQ ID NO: 220789 - protein, 246 aa, Artificial Sequence
  derived and/or modified sequence
MLWRQLIYWQLLALFFLPFCLCQDEYMESPQTGGLPPDCSKCCHGDYSFRGYQGPPGPPGPPGIPGNHGNNGNNGATGHEGAKGEKGDKGDLGPRGERGQHGPKGEKGYPGIPPELQIAFMASLATHFSNQNSGIIFSSVETNIGNFFDVMTGRFGAPVSGVYFFTFSMMKHEDVEEVYVYLMHNGNTVFSMYSYEMKGKSDTSSNHAVLKLAKGDEVWLRMGNGALHGDHQRFSTFAGFLLFETK

SEQ ID NO: 220790 - protein, 199 aa, Artificial Sequence
  derived and/or modified sequence
MLWRQLIYWQLLALFFLPFCLCQDEYMESPQTGGLPPDCSKCCHHGNNGNNGATGHKGEKGYPGIPPELQIAFMASLATHFSNQNSGIIFSSVETNIGNFFDVMTGRFGAPVSGVYFFTFSMMKHEDVEEVYVYLMHNGNTVFSMYSYEMKGKSDTSSNHAVLKLAKGDEVWLRMGNGALHGDHQRFSTFAGFLLFETK

SEQ ID NO: 220791 - DNA, 600 bp, Artificial Sequence
  derived and/or modified sequence
atgctctggagacagttaatctactggcagctgctggccctattctttctgcccttttgtctatgtcaggacgagtatatggagtccccccagacagggggattgcccccagactgtagcaaatgctgccaccatggaaacaatggaaacaacggtgccacaggccacaagggtgaaaaagggtaccctggcatcccgcctgaactgcagattgcgttcatggctagcctcgcaacacactttagtaaccagaacagcggtatcattttttcctccgttgagacaaacataggtaatttcttcgacgtcatgactggcaggttcggcgctcccgtttcaggagtgtacttttttacattctccatgatgaaacatgaagacgttgaagaggtgtatgtgtatctgatgcataacggaaacactgtcttttcaatgtattcttacgaaatgaaggggaagagcgatacgtccagtaatcatgcagtgttgaagttagctaagggagacgaagtgtggctgagaatgggaaacggggctctgcacggcgatcatcagaggtttagcacatttgcaggattcctgctgttcgaaaccaagtag

SEQ ID NO: 220792 - DNA, 855 bp, Artificial Sequence
  derived and/or modified sequence
atgactaaatcttctctccgcccattgcagaagcagagcccacagaccgggggtctccctcctgattgctccaaatgctgccatggcgactatagctttaggggataccagggtcctcccggacctccaggcccacccggaattccgggtaatcatgggaataacggcaacaatggcgcaaccgggcacgaaggcgcaaaaggagagaagggcgacaagggcgacctgggtccacggggagaacgcggacaacacgggccaaaaggcgaaaagggataccccggaattcctcctgagctgcagatagcctttatggcctccttagccactcacttctcaaaccagaattcaggcattattttcagttcagtagagactaacattggcaatttcttcgacgtcatgacaggacggttcggcgctcccgtgtcgggagtttacttttttaccttctccatgatgaaacatgaggatgtcgaggaggtgtatgtatatctgatgcacaacgggaacactgtatttagcatgtactcctacgaaatgaaagggaaaagcgacacttcttccaatcacgctgttctgaagttagcaaaaggggacgaggtttggctgcgcatgggcaacggagctctccatggggaccaccaaaggttcagcaccttcgccggattcctgctgttcgagactaaatgccacggagagacaccagccggacctagggacagcgcagctgggaaatctaaagcctatctttgtcaggctgagtggatttggccagttcgcaagctgttacccgtgtcctggcccaggtatcagctctttggatttgtccgatggaaggagcaacatatctag

SEQ ID NO: 220793 - DNA, 600 bp, Artificial Sequence
  derived and/or modified sequence
atgctctggaggcaactcatatattggcagctccttgcgcttttctttttacctttttgtctctgtcaggatgagtatatggagtccccacagacaggcggccttcccccggactgtagtaagtgttgccaccacgggaataacggaaataacggcgccactggtcacaagggagaaaagggttatcccggtatcccacctgagcttcaaattgcttttatggctagcctcgcgacgcacttcagtaaccagaacagtgggatcattttttcatcggtcgaaacaaatattggaaatttctttgacgttatgactggacgcttcggcgcacccgtctccggagtgtatttttttactttctccatgatgaaacacgaagacgtagaagaggtgtatgtatatcttatgcacaatggaaatactgtgttttcaatgtactcctatgagatgaaggggaagtctgacacatcaagcaaccacgccgtactcaagctggcaaaaggagacgaggtgtggctgcgtatgggaaatggggccctccacggtgaccatcagaggtttagtactttcgccggattcctgctgttcgaaactaagtag

SEQ ID NO: 220794 - DNA, 855 bp, Artificial Sequence
  derived and/or modified sequence
atgactaagtcatctctccggccactgcagaaacaaagcccccagacgggaggactgccacctgattgctccaaatgctgtcacggcgattactcatttagggggtatcaaggccctccaggtccgcctggaccgccagggatcccaggaaatcacggaaataacgggaataacggggccactggacatgagggcgctaagggcgaaaagggtgataagggagatcttggacctcgcggggaacgaggccaacacggacctaagggcgagaaaggatatccaggcatccctcccgaactgcagatcgcattcatggccagtctcgccacacacttctcaaatcagaactcaggtatcattttctcctccgtggaaacgaacatcggcaatttctttgacgttatgacaggacggttcggcgcccccgtctctggcgtgtattttttcaccttctcgatgatgaagcatgaggacgtggaggaggtctatgtgtatctaatgcataacggtaataccgtgttcagtatgtattcctacgaaatgaagggtaaatctgacacatcatcaaatcacgcagtgctaaagctggcgaaaggcgacgaagtgtggctacgaatggggaacggagctctgcacggcgaccatcaacgattctcgaccttcgctggatttctgttatttgagactaaatgccacggagagacccctgccggacctagggacagtgccgcgggaaaaagtaaggcatacctgtgtcaggcagaatggatctggcccgtccggaaacttctgccagtctcatggccacgttatcaattgtttggcttcgtgaggtggaaagaacaacacatctag

SEQ ID NO: 220795 - DNA, 600 bp, Artificial Sequence
  derived and/or modified sequence
atgctctggaggcaactcatatattggcagctccttgcgcttttctttttacctttttgtctctgtcaggatgagtatatggagtccccacagacaggcggccttcccccggactgtagtaagtgttgccaccacgggaataacggaaataacggcgccactggtcacaagggagaaaagggttatcccggtatcccacctgagcttcaaattgcttttatggctagcctcgcgacgcacttcagtaaccagaacagtgggatcattttttcatcggtcgaaacaaatattggaaatttcttcgatgtaatgactggcagattcggtgctcctgtgagcggggtctatttctttacattctccatgatgaaacatgaggacgtcgaggaagtctacgtgtatcttatgcacaatgggaacaccgtgtttagcatgtattcctacgaaatgaaaggcaaatccgatacaagttccaaccacgctgtgttgaagctggccaagggcgatgaagtctggttacggatgggcaacggcgcccttcatggagaccatcagcggttctcgacctttgcaggctttcttctctttgaaaccaagtag

SEQ ID NO: 220796 - DNA, 855 bp, Artificial Sequence
  derived and/or modified sequence
atgactaaatcatcactcaggccgctgcaaaagcagtccccccagaccggaggactaccccctgattgtagcaagtgttgtcacggggattacagttttagaggctatcaaggcccccctggtccccctgggcccccaggcatcccaggtaaccacggaaacaatggaaataatggtgccacaggacacgaaggagctaaaggtgaaaaaggggataaaggggacctcggaccacgtggagaaagaggtcagcatggccccaaaggcgaaaagggttatccgggcatccctcccgagctgcagatcgcttttatggcttcactcgcgacacacttttcgaaccagaactcaggaataatctttagctcagtcgagacaaacataggaaatttctttgatgtgatgacagggaggttcggggcgcctgtgtccggcgtatatttttttactttctccatgatgaaacacgaggacgtggaggaagtctacgtatacctgatgcataatgggaataccgtctttagcatgtattcatatgagatgaaaggaaagtcagacacatcctcaaaccatgccgttctcaagttagctaagggagacgaagtgtggctgagaatggggaatggagcgctccatggtgaccatcagagattctccacattcgcaggattcctcctgttcgagacaaagtgccatggagagacccctgcaggcccccgcgattctgccgcaggtaaaagtaaggcttatctctgtcaagctgagtggatctggccagtacgcaagctgttacccgtttcatggcctcggtatcaacttttcggattcgtaagatggaaagagcagcatatctag

SEQ ID NO: 220797 - DNA, 1959 bp, Artificial Sequence
  derived and/or modified sequence
agctccagtcctggcatctgcccgaggagaccacgctcctggagctctgctgtcttctcagggagactctgaggctctgttgagaatcatgctttggaggcagctcatctattggcaactgctggctttgtttttcctccctttttgcctgtgtcaagatgaatacatggagtctccacaaaccggaggactacccccagactgcagtaagtgttgtcatggagactacagctttcgaggctaccaaggcccccctgggccaccgggccctcctggcattccaggaaaccatggaaacaatggcaacaatggagccactggtcatgaaggagccaaaggtgagaagggcgacaaaggtgacctggggcctcgaggggagcgggggcagcatggccccaaaggagagaagggctacccggggattccaccagaacttcagattgcattcatggcttctctggcaacccacttcagcaatcagaacagtgggattatcttcagcagtgttgagaccaacattggaaacttctttgatgtcatgactggtagatttggggccccagtatcaggtgtgtatttcttcaccttcagcatgatgaagcatgaggatgttgaggaagtgtatgtgtaccttatgcacaatggcaacacagtcttcagcatgtacagctatgaaatgaagggcaaatcagatacatccagcaatcatgctgtgctgaagctagccaaaggggatgaggtttggctgcgaatgggcaatggcgctctccatggggaccaccaacgcttctccacctttgcaggattcctgctctttgaaactaagtaaatatatgactagaatagctccactttggggaagacttgtagctgagctgatttgttacgatctgaggaacattaaagttgagggttttacattgctgtattcaaaaaattattggttgcaatgttgttcacgctacaggtacaccaataatgttggacaattcaggggctcagaagaatcaaccacaaaatagtcttctcagatgaccttgactaatatactcagcatctttatcactctttccttggcacctaaaagataattctcctctgacgcaggttggaaatatttttttctatcacagaagtcatttgcaaagaattttgactactctgcttttaatttaataccagttttcaggaacccctgaagttttaagttcattattctttataacatttgagagaatcggatgtagtgatatgacagggctggggcaagaacaggggcactagctgccttattagctaatttagtgccctccgtgttcagcttagcctttgaccctttccttttgatccacaaaatacattaaaactctgaattcacatacaatgctattttaaagtcaatagattttagctataaagtgcttgaccagtaatgtggttgtaattttgtgtatgttcccccacatcgcccccaacttcggatgtggggtcaggaggttgaggttcactattaacaaatgtcataaatatctcatagaggtacagtgccaatagatattcaaatgttgcatgttgaccagagggattttatatctgaagaacatacactattaataaataccttagagaaagattttgacctggctttagataaaactgtggcaagaaaaatgtaatgagcaatatatggaaataaacacacctttgttaaagatactttctaaacttgtgtttaataaactttaatagtcatagaattgtaaatcactatggttaacagaaagtgaaaatattttcatgcagatgatgtgaacagccatgtgaataggtgacttgggcacacagcagggtcatatgacttcagaaaacttcgcttttcagttattccattgttataatgtcaaccctttaagacattgatgtttagagggctcacaaataaaatctgaatacctgtaa

SEQ ID NO: 220798 - DNA, 600 bp, Artificial Sequence
  derived and/or modified sequence
atgctgtggagacagctgatctactggcagctgctggccctgttcttcctgcccttctgcctgtgccaggacgagtacatggagagcccccagaccggcggcctgccccccgactgcagcaagtgctgccaccacggcaacaacggcaacaacggcgccaccggccacaagggcgagaagggctaccccggcatcccccccgagctgcagatcgccttcatggccagcctggccacccacttcagcaaccagaacagcggcatcatcttcagcagcgtggagaccaacatcggcaacttcttcgacgtgatgaccggcagattcggcgcccccgtgagcggcgtgtacttcttcaccttcagcatgatgaagcacgaggacgtggaggaggtgtacgtgtacctgatgcacaacggcaacaccgtgttcagcatgtacagctacgagatgaagggcaagagcgacaccagcagcaaccacgccgtgctgaagctggccaagggcgacgaggtgtggctgagaatgggcaacggcgccctgcacggcgaccaccagagattcagcaccttcgccggcttcctgctgttcgagaccaagtag

SEQ ID NO: 220799 - DNA, 855 bp, Artificial Sequence
  derived and/or modified sequence
atgaccaagagcagcctgagacccctgcagaagcagagcccccagaccggcggcctgccccccgactgcagcaagtgctgccacggcgactacagcttcagaggctaccagggcccccccggcccccccggcccccccggcatccccggcaaccacggcaacaacggcaacaacggcgccaccggccacgagggcgccaagggcgagaagggcgacaagggcgacctgggccccagaggcgagagaggccagcacggccccaagggcgagaagggctaccccggcatcccccccgagctgcagatcgccttcatggccagcctggccacccacttcagcaaccagaacagcggcatcatcttcagcagcgtggagaccaacatcggcaacttcttcgacgtgatgaccggcagattcggcgcccccgtgagcggcgtgtacttcttcaccttcagcatgatgaagcacgaggacgtggaggaggtgtacgtgtacctgatgcacaacggcaacaccgtgttcagcatgtacagctacgagatgaagggcaagagcgacaccagcagcaaccacgccgtgctgaagctggccaagggcgacgaggtgtggctgagaatgggcaacggcgccctgcacggcgaccaccagagattcagcaccttcgccggcttcctgctgttcgagaccaagtgccacggcgagacccccgccggccccagagacagcgccgccggcaagagcaaggcctacctgtgccaggccgagtggatctggcccgtgagaaagctgctgcccgtgagctggcccagataccagctgttcggcttcgtgagatggaaggagcagcacatctag

SEQ ID NO: 220800 - DNA, 600 bp, Artificial Sequence
  derived and/or modified sequence
atgctctggaggcaactgatttactggcagcttctggccctcttctttctgcctttctgcctttgccaagatgagtacatggagtccccgcagacgggtggcctgccgcccgattgcagcaagtgctgccatcatggcaataacggcaataatggcgcgacaggccataagggagaaaagggctatccagggatcccgcccgaactacaaatcgcctttatggccagcctggctacacactttagcaaccagaattccgggattatcttcagttccgttgagactaatatcggcaatttttttgacgtgatgacaggtcggttcggcgcccccgtgtcaggggtatattttttcacgttcagcatgatgaaacacgaagacgtggaggaggtgtacgtgtacttgatgcacaacggcaacaccgtcttttccatgtacagctacgagatgaagggcaagtccgatacttcttctaatcacgcagtcctcaaactggcaaaaggagacgaagtgtggctgcggatgggaaacggggcccttcatggtgatcatcagcgttttagcaccttcgccggatttctcttatttgagactaagtag

SEQ ID NO: 220801 - DNA, 855 bp, Artificial Sequence
  derived and/or modified sequence
atgacaaagtcctctcttaggccgttgcagaagcagtccccacagaccggaggtcttcccccagactgttcaaaatgctgccatggcgactacagctttcgcggatatcagggacctcccgggccacctggaccgcccgggataccagggaaccatggtaataatggaaacaatggcgccactggccacgaaggggcaaagggagagaagggcgacaagggtgacctgggcccaagaggagaacgcggacagcacggccctaagggtgagaaggggtaccccggaattcctcctgaattgcagattgctttcatggccagcctcgcgacacacttcagtaaccagaatagcggcattattttcagctccgtcgagacaaacatcggcaatttcttcgacgtcatgacaggcaggttcggggctcccgtgtcaggagtgtatttcttcactttctcgatgatgaaacacgaagatgtcgaggaagtttacgtgtacctgatgcacaacgggaacactgtttttagcatgtattcctatgagatgaaaggaaagtccgatacgagctccaaccacgctgtcctaaagttagccaaaggggacgaagtgtggctgaggatgggaaacggcgcactgcacggcgaccaccagcgttttagcacttttgcagggttcctactattcgaaacaaagtgccacggggagaccccggccggaccgcgggattctgcagccggaaagtccaaagcttacctctgccaagccgaatggatctggcctgttagaaaactgcttcctgtgagctggcccaggtaccagctctttggctttgtgcggtggaaggaacaacacatatag

SEQ ID NO: 220802 - DNA, 600 bp, Artificial Sequence
  derived and/or modified sequence
atgctgtggaggcagctgatctactggcagctgctggccctcttcttcctgcccttctgcctgtgccaggatgagtacatggagagcccccagacaggaggcctgcccccagactgcagcaagtgctgccaccacggcaacaacggcaacaatggagccaccggccacaagggggagaagggctacccaggcatccccccagagctgcagatcgccttcatggccagcctggccacccacttcagcaaccagaacagcggcatcatcttcagctctgtggagaccaacatcggcaacttctttgatgtgatgacaggccgctttggagcccctgtgtctggagtgtacttcttcaccttctccatgatgaagcatgaagatgtggaggaggtgtatgtgtacctgatgcacaacggcaacacagtgttctccatgtacagctatgagatgaagggcaagagtgacaccagcagcaaccacgctgtgctgaagctggccaagggagatgaggtgtggctgaggatgggaaatggagccctgcatggagaccaccagcgcttcagcacctttgctggcttcctgctgtttgagaccaagtag

SEQ ID NO: 220803 - DNA, 855 bp, Artificial Sequence
  derived and/or modified sequence
atgaccaagagcagcctgcggcccctgcagaagcagagcccccagacaggaggcctgcccccagactgcagcaagtgctgccacggggactacagcttccggggctaccagggccccccaggccccccaggccccccaggcatccctggcaaccacggcaacaatggaaacaacggggccactggacatgaaggagccaagggggagaagggggacaagggggacctgggccccagaggagagcggggccagcacggccccaagggggagaagggctacccaggcatccccccagagctgcagatcgccttcatggccagcctggccacccacttcagcaaccagaacagcggcatcatcttcagctctgtggagaccaacatcggcaacttctttgatgtgatgacaggccgctttggagcccctgtgtctggagtgtacttcttcaccttctccatgatgaagcatgaagatgtggaggaggtgtatgtgtacctgatgcacaatggaaacacagtgttctccatgtacagctatgagatgaagggcaagagtgacaccagcagcaaccacgctgtgctgaagctggccaagggagatgaggtgtggctgaggatgggaaatggagccctgcacggggaccaccagcgcttcagcacctttgctggcttcctgctgtttgagaccaagtgccacggggagaccccagctggcccccgggacagcgctgctgggaagagcaaggcctacctgtgccaggccgagtggatctggcctgtgaggaagctgctgcctgtgtcctggccccgctaccagctgtttggatttgtgcgctggaaggagcagcacatctag

SEQ ID NO: 220804 - DNA, 3408 bp, Artificial Sequence
  derived and/or modified sequence
gctccagtcctggcatctgcccgaggagaccacgctcctggagctctgctgtcttctcagggagactctgaggctctgttgagaatcatgctttggaggcagctcatctattggcaactgctggctttgtttttcctccctttttgcctgtgtcaagatgaatacatggagtctccacaaaccggaggactacccccagactgcagtaagtgttgtcatcatggaaacaatggcaacaatggagccactggtcataaaggagagaagggctacccggggattccaccagaacttcagattgcattcatggcttctctggcaacccacttcagcaatcagaacagtgggattatcttcagcagtgttgagaccaacattggaaacttctttgatgtcatgactggtagatttggggccccagtatcaggtgtgtatttcttcaccttcagcatgatgaagcatgaggatgttgaggaagtgtatgtgtaccttatgcacaatggcaacacagtcttcagcatgtacagctatgaaatgaagggcaaatcagatacatccagcaatcatgctgtgctgaagctagccaaaggggatgaggtttggctgcgaatgggcaatggcgctctccatggggaccaccaacgcttctccacctttgcaggattcctgctctttgaaactaagtaaatatatgactagaatagctccactttggggaagacttgtagctgagctgatttgttacgatctgaggaacattaaagttgagggttttacattgctgtattcaaaaaattattggttgcaatgttgttcacgctacaggtacaccaataatgttggacaattcaggggctcagaagaatcaaccacaaaatagtcttctcagatgaccttgactaatatactcagcatctttatcactctttccttggcacctaaaagataattctcctctgacgcaggttggaaatatttttttctatcacagaagtcatttgcaaagaattttgactactctgcttttaatttaataccagttttcaggaacccctgaagttttaagttcattattctttataacatttgagagaatcggatgtagtgatatgacagggctggggcaagaacaggggcactagctgccttattagctaatttagtgccctccgtgttcagcttagcctttgaccctttccttttgatccacaaaatacattaaaactctgaattcacatacaatgctattttaaagtcaatagattttagctataaagtgcttgaccagtaatgtggttgtaattttgtgtatgttcccccacatcgcccccaacttcggatgtggggtcaggaggttgaggttcactattaacaaatgtcataaatatctcatagaggtacagtgccaatagatattcaaatgttgcatgttgaccagagggattttatatctgaagaacatacactattaataaataccttagagaaagattttgacctggctttagataaaactgtggcaagaaaaatgtaatgagcaatatatggaaataaacacacctttgttaaagatactttctaaacttgtgtttaataaactttaatagtcatagaattgtaaatcactatggttaacagaaagtgaaaatattttcatgcagatgatgtgaacagccatgtgaataggtgacttgggcacacagcagggtcatatgacttcagaaaacttcgcttttcagttattccattgttataatgtcaaccctttaagacattgatgtttagagggctcacaaataaaatctgaatacctgtaaggaaagaggttttttatcacataccttaagtctttgtaatgttcatgcttaaattctaagttttcaccttagtgacacacaaggtttggttgtaggcaacaagtcccaggtgtgtgggaaattgattcacaacagagatgggaaaaggtgcagataatttccaatgccttcacaatttacccatgaccagaaatatacttggaagactgatttcacaagtgtcccaaaactgagatgctaaaaaggaaacagtaggtaggtgtcataggaaatttacatgtaccatctaataaacaaacttgcaaattctaaatcttttttttttttgagacagtttcacgctgctgcccaggctggagtgcagtggcatgatctcagctcaccgcagcctccgcctcctgggttcaagtgactctcctacctcagcctcctgagtagctgggactacaggcgcccaccaccaggaccagctaatttttaatgtttctaatagagatggggtttcaccatgttgaccaggccggtctggaactcctgacctcaggtgatctgcctgcctcggtcttccaaagtgctgggattacaggcgtgagcccccgcacccagccgcaaattctaaatcttaaaacaactctgcaaacgaagcacttgagtttctgcttgcttcagggatgtaatatggtgtagaactgtttcacataatgatcagccttggtaattttccagtgtagaaaacattatatttgacccttggacaacaaagagattatattgaaggaattttattgattgtatcatgaataaaagctgaagtcaaaattaaaatgtaaaaaaataattcagaggatggaatatgcaaatgtaaactccaaatgatgtggctggaattcataaacatttactttatgcaagatactgtgctattccaggcactcctatggcatttaaagtacaattcttaccttccctaatttttcaacctagtagaggacaataggctaaagggaataagtacatggataacaaaacataaagtagaatgtttttacagccatagaaggcaaagggctaggaattcacaggagagagaaacagtatctagctgagagcataagaaaagcttgtggaaaagataatatctgatggccagagacaatttcttgctttggtatgtttgaagtgttatatttaaatatatatatttttatttaaaaaactcactatagaaaatttataaaattccccaaaatatttagtataaaattaatcatcccatcaaatattaaataatattactattttaaagtgtttatttcagtcttttcctgcatgtatttatggcttttatttttaaatatagtaataaaataatttgaaattagctttttatatatttttgtatcttgctctaatgggttggactaaacatattaagaacactctcaaatgctactaaggacaatttgaaaacataattttaatgactgcataatttatttaactttcctgttttggaaaatattattttttttttattacaaataatatgtcatgagcattctctttttaaaaaaataaactatgtgtgcat

SEQ ID NO: 220805 - DNA, 600 bp, Artificial Sequence
  derived and/or modified sequence
atgctgtggcggcagctgatctactggcagctgctggccctgttcttcctgccattctgcctttgtcaggatgagtatatggaatcacctcagactggaggactaccccccgactgctcaaaatgctgccatcacgggaacaatggaaacaacggcgcaactgggcataagggagaaaagggatatcctggaataccgcctgagctgcaaatcgcattcatggcttcactcgcgacgcatttctcgaaccagaactccggtatcattttctcctccgtggaaacaaatatagggaactttttcgacgtgatgacagggcggtttggcgcaccggtgtcaggcgtctactttttcacgttctctatgatgaagcacgaagatgttgaggaggtgtacgtgtacttgatgcataatggcaatacagtattcagcatgtactcgtacgaaatgaaaggcaagagcgatacctcgagtaatcacgctgtgttaaaactggctaaaggcgatgaggtctggctgagaatgggcaacggagcactccatggagaccatcagagattcagcacattcgccggattcctactgttcgagaccaaatag

SEQ ID NO: 220806 - DNA, 855 bp, Artificial Sequence
  derived and/or modified sequence
atgaccaagagcagcctgcggcccctgcagaagcagagcccccagaccggagggcttccacccgactgctccaaatgttgtcatggcgactattcttttagggggtatcaaggaccacccggaccacctggcccccctggtattccaggtaaccatggcaataacggaaacaatggcgccacgggtcacgaaggcgccaaaggtgagaaaggagacaagggagatctgggaccgaggggggaaagaggacagcacggccccaaaggtgagaagggctatcctggaattcctcccgaactgcagatagcctttatggcctctttagccacccacttcagcaatcagaactccggcatcatcttcagtagcgttgaaactaatattggtaatttctttgacgtaatgacagggagatttggcgccccggtttccggtgtctattttttcaccttttctatgatgaaacacgaagacgtggaggaagtatatgtgtatctcatgcacaacgggaacaccgtcttttcaatgtatagttatgaaatgaaaggtaagtcggatacctcctctaatcacgcagttctgaaactagctaaaggcgacgaagtgtggcttcgcatgggtaacggagccctacatggcgatcatcagaggttcagcacatttgctggatttctccttttcgaaacaaaatgccatggcgagaccccagcgggtccaagagattctgcggccggtaagtccaaggcctatctctgccaggccgaatggatatggcccgtgaggaagctgctcccagtgtcttggcccagataccaactgttcggcttcgtgcggtggaaggagcagcatatatag

SEQ ID NO: 220807 - DNA, 741 bp, Artificial Sequence
  derived and/or modified sequence
atgctgtggaggcagctgatctactggcaactgcttgcactcttttttctgccattttgtttgtgtcaggacgagtatatggagtcccctcagacaggaggtctgccacctgactgctccaagtgctgccacggcgactattctttccggggctaccagggtcctcccgggccaccagggccccccggtatccctgggaaccacggcaataacggcaacaacggcgcaaccggccacgaaggcgcaaaaggggagaaaggcgataagggggatctggggccaagaggagaaagggggcaacacggcccaaagggggagaaaggctatccagggatcccaccagagcttcagatcgctttcatggcaagtctggctactcacttttcgaatcagaactccggaattatatttagcagcgtggagacaaacatcgggaatttcttcgacgtcatgacaggacggttcggggcaccggtgtcgggagtgtacttctttacctttagcatgatgaagcacgaagacgtagaggaagtctatgtgtatctcatgcataacggcaataccgtgttctcaatgtattcttacgagatgaagggcaagtcagatacctcctctaatcatgctgttcttaaactcgctaagggggatgaggtgtggcttaggatggggaacggcgctctgcacggtgaccatcagcgattctccaccttcgcaggcttcctgctgtttgaaacgaaatag

SEQ ID NO: 220808 - DNA, 741 bp, Artificial Sequence
  derived and/or modified sequence
atgctgtggaggcagctgatctactggcagctgctggccctcttcttcctgcccttctgcctgtgccaggatgagtacatggagagcccccagacaggaggcctgcccccagactgcagcaagtgctgccacggggactacagcttccggggctaccagggccccccaggccccccaggccccccaggcatccctggcaaccacggcaacaatggaaacaacggggccactggacatgaaggagccaagggggagaagggggacaagggggacctgggccccagaggagagcggggccagcacggccccaagggggagaagggctacccaggcatccccccagagctgcagatcgccttcatggccagcctggccacccacttcagcaaccagaacagcggcatcatcttcagctctgtggagaccaacatcggcaacttctttgatgtgatgacaggccgctttggagcccctgtgtctggagtgtacttcttcaccttctccatgatgaagcatgaagatgtggaggaggtgtatgtgtacctgatgcacaatggaaacacagtgttctccatgtacagctatgagatgaagggcaagagtgacaccagcagcaaccacgctgtgctgaagctggccaagggagatgaggtgtggctgaggatgggaaatggagccctgcacggggaccaccagcgcttcagcacctttgctggcttcctgctgtttgagaccaagtag

SEQ ID NO: 220809 - DNA, 741 bp, Artificial Sequence
  derived and/or modified sequence
atgctgtggcggcagctgatctactggcagctgctggccctgttcttcctacccttttgcctgtgtcaggacgaatatatggagtccccgcaaacaggcgggctgccccccgattgtagcaagtgctgtcatggtgattactccttccgtggctaccaggggcctcctggaccacctggcccccctgggattcccggtaaccacggcaacaacgggaacaatggagcaactggccatgagggagccaaaggagagaagggtgataagggcgatcttggccctcggggagaacgggggcagcatggaccaaagggggagaaaggatatcctgggatcccacctgagcttcaaatagcgtttatggcttctttggcgactcattttagtaaccagaattccggcataattttcagcagcgtggagacgaatatcggcaacttctttgacgtgatgaccggaagattcggcgctcccgttagcggtgtctacttcttcacattctcgatgatgaagcacgaggacgtggaggaagtgtacgtttatctcatgcacaacggcaacacagtgtttagtatgtactcgtacgaaatgaagggcaaatcagatacctcaagtaatcacgccgtattgaaattggcgaaaggtgacgaggtgtggctacggatgggtaacggcgcactccacggggatcaccagaggttctctaccttcgcaggatttctcttatttgaaacgaaatag

SEQ ID NO: 220810 - DNA, 741 bp, Artificial Sequence
  derived and/or modified sequence
atgctgtggcgccagctgatttattggcaattgctggcccttttcttccttcccttttgtctttgccaggatgaatacatggagagccctcagactggcggtcttcctcccgattgtagcaaatgttgccacggcgattactcattccgtggataccagggcccacctggacctccgggacctccaggtatcccagggaatcacggtaataatgggaataatggcgctaccggacatgagggcgctaagggtgagaaaggagataagggcgacctcggaccccgaggagagagaggccagcacggcccaaaaggagagaaaggatatccagggatcccaccagagcttcaaattgcctttatggcgagtctcgccacacattttagtaatcagaactcagggattattttcagtagcgtggaaacaaatatcggtaactttttcgacgttatgaccggccgttttggcgctccagtttccggggtgtactttttcaccttctcaatgatgaagcatgaagatgtggaggaggtgtacgtgtacctcatgcataatgggaacactgtgttctcaatgtatagctacgaaatgaagggaaaatctgataccagctctaatcacgctgttctcaaattggctaaaggagacgaagtgtggttgcgtatgggtaacggtgccctgcatggagatcatcagcgcttcagcaccttcgccggattcctgttatttgaaactaagtag

SEQ ID NO: 220811 - DNA, 741 bp, Artificial Sequence
  derived and/or modified sequence
atgctgtggcggcagttaatctattggcagttactggcactgttctttctgcctttctgtctgtgccaggacgaatacatggagtccccccaaaccggagggctaccccctgattgttcgaagtgctgccacggtgactactcattcagaggctaccagggacctcctggcccaccaggacctccaggtatccctgggaatcatggaaacaatggtaacaatggcgctactggtcacgagggtgcaaagggtgaaaaaggcgataaaggtgatctcggaccccgcggagagagagggcaacacggaccaaagggggaaaaaggttatcccggaattcctccggaattgcagatcgctttcatggcttccctcgccacccacttcagtaaccaaaacagcggcatcatattctcttcagtcgaaactaacatcgggaacttctttgacgttatgacgggcaggtttggggcgcccgtgagcggtgtctatttttttactttctcaatgatgaaacacgaggacgtggaggaggtatacgtgtacctgatgcacaatggcaacactgttttcagcatgtacagctacgagatgaagggcaaaagtgatacatcatcaaaccatgctgtcctgaagctagcaaaaggagacgaagtgtggttacgaatgggcaatggagcactgcatggagatcatcagcggttcagtactttcgcgggctttctactgtttgaaacgaagtag

SEQ ID NO: 220812 - DNA, 741 bp, Artificial Sequence
  derived and/or modified sequence
atgctgtggcggcagttaatctattggcagttactggcactgttctttctgcctttctgtctgtgccaggacgaatacatggagtccccccaaaccggagggctaccccctgattgttcgaagtgctgccacggtgactactcattcagaggctaccagggacctcctggcccaccaggacctccaggtatccctgggaatcatggaaacaatggtaacaatggcgctactggtcacgagggtgcaaagggtgaaaaaggcgataaaggtgatctcggaccccgcggagagagagggcaacatggccccaaaggcgagaagggatatccaggaatccctccggaactgcagattgctttcatggcctcactggccacacacttttctaaccaaaacagtggcattattttctccagtgtggaaacaaacatcggcaatttttttgatgtcatgacagggcggttcggcgctcccgtgtccggcgtgtattttttcaccttttctatgatgaagcacgaggatgttgaggaggtatacgtgtatttgatgcataatggtaacacagtattcagtatgtactcttacgaaatgaagggaaagtccgatacctcatcaaatcatgctgtcctaaaactggccaaaggcgacgaggtttggctcaggatgggaaacggtgccctgcacggcgatcaccagcgtttctcaacattcgcaggcttccttttgttcgaaacaaaatag

SEQ ID NO: 220813 - DNA, 741 bp, Artificial Sequence
  derived and/or modified sequence
atgctgtggagacagctgatctactggcagctgctggccctgttcttcctgcccttctgcctgtgccaggacgagtacatggagagcccccagaccggcggcctgccccccgactgcagcaagtgctgccacggcgactacagcttcagaggctaccagggcccccccggcccccccggcccccccggcatccccggcaaccacggcaacaacggcaacaacggcgccaccggccacgagggcgccaagggcgagaagggcgacaagggcgacctgggccccagaggcgagagaggccagcacggccccaagggcgagaagggctaccccggcatcccccccgagctgcagatcgccttcatggccagcctggccacccacttcagcaaccagaacagcggcatcatcttcagcagcgtggagaccaacatcggcaacttcttcgacgtgatgaccggcagattcggcgcccccgtgagcggcgtgtacttcttcaccttcagcatgatgaagcacgaggacgtggaggaggtgtacgtgtacctgatgcacaacggcaacaccgtgttcagcatgtacagctacgagatgaagggcaagagcgacaccagcagcaaccacgccgtgctgaagctggccaagggcgacgaggtgtggctgagaatgggcaacggcgccctgcacggcgaccaccagagattcagcaccttcgccggcttcctgctgttcgagaccaagtag

SEQ ID NO: 220814 - RNA, 600 nt, Artificial Sequence
  derived and/or modified sequence
augcucuggaggcaacucauauauuggcagcuccuugcgcuuuucuuuuuaccuuuuugucucugucaggaugaguauauggaguccccacagacaggcggccuucccccggacuguaguaaguguugccaccacgggaauaacggaaauaacggcgccacuggucacaagggagaaaaggguuaucccgguaucccaccugagcuucaaauugcuuuuauggcuagccucgcgacgcacuucaguaaccagaacagugggaucauuuuuucaucggucgaaacaaauauuggaaauuucuuugacguuaugacuggacgcuucggcgcacccgucuccggaguguauuuuuuuacuuucuccaugaugaaacacgaagacguagaagagguguauguauaucuuaugcacaauggaaauacuguguuuucaauguacuccuaugagaugaaggggaagucugacacaucaagcaaccacgccguacucaagcuggcaaaaggagacgagguguggcugcguaugggaaauggggcccuccacggugaccaucagagguuuaguacuuucgccggauuccugcuguucgaaacuaaguag

SEQ ID NO: 220815 - RNA, 855 nt, Artificial Sequence
  derived and/or modified sequence
augacuaagucaucucuccggccacugcagaaacaaagcccccagacgggaggacugccaccugauugcuccaaaugcugucacggcgauuacucauuuaggggguaucaaggcccuccagguccgccuggaccgccagggaucccaggaaaucacggaaauaacgggaauaacggggccacuggacaugagggcgcuaagggcgaaaagggugauaagggagaucuuggaccucgcggggaacgaggccaacacggaccuaagggcgagaaaggauauccaggcaucccucccgaacugcagaucgcauucauggccagucucgccacacacuucucaaaucagaacucagguaucauuuucuccuccguggaaacgaacaucggcaauuucuuugacguuaugacaggacgguucggcgcccccgucucuggcguguauuuuuucaccuucucgaugaugaagcaugaggacguggaggaggucuauguguaucuaaugcauaacgguaauaccguguucaguauguauuccuacgaaaugaaggguaaaucugacacaucaucaaaucacgcagugcuaaagcuggcgaaaggcgacgaaguguggcuacgaauggggaacggagcucugcacggcgaccaucaacgauucucgaccuucgcuggauuucuguuauuugagacuaaaugccacggagagaccccugccggaccuagggacagugccgcgggaaaaaguaaggcauaccugugucaggcagaauggaucuggcccguccggaaacuucugccagucucauggccacguuaucaauuguuuggcuucgugagguggaaagaacaacacaucuag

SEQ ID NO: 220816 - RNA, 600 nt, Artificial Sequence
  derived and/or modified sequence
augcucuggaggcaacucauauauuggcagcuccuugcgcuuuucuuuuuaccuuuuugucucugucaggaugaguauauggaguccccacagacaggcggccuucccccggacuguaguaaguguugccaccacgggaauaacggaaauaacggcgccacuggucacaagggagaaaaggguuaucccgguaucccaccugagcuucaaauugcuuuuauggcuagccucgcgacgcacuucaguaaccagaacagugggaucauuuuuucaucggucgaaacaaauauuggaaauuucuucgauguaaugacuggcagauucggugcuccugugagcggggucuauuucuuuacauucuccaugaugaaacaugaggacgucgaggaagucuacguguaucuuaugcacaaugggaacaccguguuuagcauguauuccuacgaaaugaaaggcaaauccgauacaaguuccaaccacgcuguguugaagcuggccaagggcgaugaagucugguuacggaugggcaacggcgcccuucauggagaccaucagcgguucucgaccuuugcaggcuuucuucucuuugaaaccaaguag

SEQ ID NO: 220817 - RNA, 855 nt, Artificial Sequence
  derived and/or modified sequence
augacuaaaucaucacucaggccgcugcaaaagcaguccccccagaccggaggacuacccccugauuguagcaaguguugucacggggauuacaguuuuagaggcuaucaaggccccccuggucccccugggcccccaggcaucccagguaaccacggaaacaauggaaauaauggugccacaggacacgaaggagcuaaaggugaaaaaggggauaaaggggaccucggaccacguggagaaagaggucagcauggccccaaaggcgaaaaggguuauccgggcaucccucccgagcugcagaucgcuuuuauggcuucacucgcgacacacuuuucgaaccagaacucaggaauaaucuuuagcucagucgagacaaacauaggaaauuucuuugaugugaugacagggagguucggggcgccuguguccggcguauauuuuuuuacuuucuccaugaugaaacacgaggacguggaggaagucuacguauaccugaugcauaaugggaauaccgucuuuagcauguauucauaugagaugaaaggaaagucagacacauccucaaaccaugccguucucaaguuagcuaagggagacgaaguguggcugagaauggggaauggagcgcuccauggugaccaucagagauucuccacauucgcaggauuccuccuguucgagacaaagugccauggagagaccccugcaggcccccgcgauucugccgcagguaaaaguaaggcuuaucucugucaagcugaguggaucuggccaguacgcaagcuguuacccguuucauggccucgguaucaacuuuucggauucguaagauggaaagagcagcauaucuag

SEQ ID NO: 220818 - protein, 321 aa, Artificial Sequence
  derived and/or modified sequence
MVNLTSMSGFLLMGFSDERKLQILHALVFLVTYLLALTGNLLIITIITVDRRLHSPMYYFLKHLSLLDLCFISVTVPQSIANSLMGNGYISLVQCILQVFFFIALASSEVAILTVMSYDRYAAICQPLHYETIMDPRACRHAVIAVWIAGGLSGLMHAAINFSIPLCGKRVIHQFFCDVPQMLKLACSYEFINEIALAAFTTSAAFICLISIVLSYIRIFSTVLRIPSAEGRTKVFSTCLPHLFVATFFLSAAGFEFLRLPSDSSSTVDLVFSVFYTVIPPTLNPVIYSLRNDSMKAALRKMLSKEELPQRKMCLKAMFKL

SEQ ID NO: 220819 - protein, 321 aa, Artificial Sequence
  derived and/or modified sequence
MVNLTSTSGFLLMGFSDERKLQILHALVFLVTYLLALTGNLLIITIITVDRRLHSPMYYFLKHLSLLDLCFISVTVPQSIANSLMGNGYISLVQCILQVFFFIALASSEVAILTVMSYDRYAAICQPLHYETIMDPRACRHAVIAVWIAGGLSGLMHAAINFSIPLCGKRVIHQFFCDVPQMLKLACSYEFINEIALAAFTTSAAFICLISIVLSYIRIFSTVLRIPSAEGRTKVFSTCLPHLFVATFFLSAAGFEFLRLPSDSSSTVDLVFSVFYTVIPPTLNPVIYSLRNDSMKAALRKMLSKEELPQRKMCLKAMFKL

SEQ ID NO: 220820 - DNA, 966 bp, Artificial Sequence
  derived and/or modified sequence
atggtgaacctgaccagcatgagcggcttcctgctgatgggcttcagcgacgagagaaagctgcagatcctgcacgccctggtgttcctggtgacctacctgctggccctgaccggcaacctgctgatcatcaccatcatcaccgtggacagaagactgcacagccccatgtactacttcctgaagcacctgagcctgctggacctgtgcttcatcagcgtgaccgtgccccagagcatcgccaacagcctgatgggcaacggctacatcagcctggtgcagtgcatcctgcaggtgttcttcttcatcgccctggccagcagcgaggtggccatcctgaccgtgatgagctacgacagatacgccgccatctgccagcccctgcactacgagaccatcatggaccccagagcctgcagacacgccgtgatcgccgtgtggatcgccggcggcctgagcggcctgatgcacgccgccatcaacttcagcatccccctgtgcggcaagagagtgatccaccagttcttctgcgacgtgccccagatgctgaagctggcctgcagctacgagttcatcaacgagatcgccctggccgccttcaccaccagcgccgccttcatctgcctgatcagcatcgtgctgagctacatcagaatcttcagcaccgtgctgagaatccccagcgccgagggcagaaccaaggtgttcagcacctgcctgccccacctgttcgtggccaccttcttcctgagcgccgccggcttcgagttcctgagactgcccagcgacagcagcagcaccgtggacctggtgttcagcgtgttctacaccgtgatcccccccaccctgaaccccgtgatctacagcctgagaaacgacagcatgaaggccgccctgagaaagatgctgagcaaggaggagctgccccagagaaagatgtgcctgaaggccatgttcaagctgtag

SEQ ID NO: 220821 - DNA, 966 bp, Artificial Sequence
  derived and/or modified sequence
atggttaatttaacctcaatgtcggggtttctgttaatgggattttctgatgagcggaaactgcagatccttcacgcgctcgtgtttcttgtgacctatctgctggccttgactgggaatctacttatcattactattattacggtggatcgacgactgcactccccaatgtactatttcctgaaacacttaagcctgctggatctgtgtttcatatctgtgacagtgcctcagtcaatcgcaaacagcttaatggggaacggctacatctccctggtgcaatgcatactgcaagtgttttttttcatcgctctcgcaagctctgaagtggccatactaactgttatgtcctacgaccgctatgcagccatctgccagccactacactatgagactatcatggatcctagagcatgtcggcacgccgtcattgcagtttggattgcgggcgggctgtccggtctgatgcatgcagcaatcaacttttcgatacccctgtgtgggaaacgcgtcatccaccagttcttctgcgacgtgccgcaaatgcttaaactggcgtgtagttacgagtttatcaatgaaatcgcactggctgctttcaccactagcgcggccttcatatgcctgatttcaatagtcttaagctacatccggatcttcagcaccgtgctgcggattccgagcgcggagggacgcaccaaagtgttttccacctgtctgccccacctgtttgtcgccaccttcttcctgtccgctgctggttttgaatttttaagactaccatcagattcaagcagcaccgtggatcttgttttttccgtgttctatactgtcatcccgcccaccctcaatcccgtcatctatagtctcagaaacgacagcatgaaagctgccctccgcaagatgctgtccaaagaggagctccctcaaaggaaaatgtgcctgaaagctatgttcaagctgtag

SEQ ID NO: 220822 - DNA, 966 bp, Artificial Sequence
  derived and/or modified sequence
atggttaacctgaccagcatgagcgggttccttctgatggggttcagcgatgaacggaagctccagatactccacgcacttgtctttctggttacctaccttctagcattgaccgggaatttactaatcatcaccataataacggttgatagacgcctccattctccaatgtactattttctaaagcatctgtctctattggacttgtgtttcatttcagtaaccgtgccacagagtattgccaattcgttgatgggaaacgggtatatttctctcgtccagtgtatcctgcaggttttttttttcattgccctcgccagctcagaggttgctatcctgactgtgatgagctatgacagatacgctgctatctgccagccactccactacgagaccatcatggacccgcgggcctgccgacacgctgtcatagccgtctggatcgccggggggctcagcggacttatgcatgcagccatcaacttctctattccattatgcggcaaaagggttatccaccagtttttttgcgatgtcccacagatgctcaagctggcttgcagctacgagtttatcaatgagattgctctcgccgcattcactacatccgctgccttcatttgcctgatctctattgtgctgtcctacatccggatttttagcaccgtactccggataccctcagcagaaggtcgcacaaaagtctttagtacttgtctcccccacctcttcgtggctacatttttcctctccgcagctggattcgaatttttacggttgcctagtgacagtagctcaaccgtggacctggtgtttagtgtgttttacacagttatcccccccaccctcaaccccgtcatctactcacttcgcaatgacagtatgaaggcagcactgaggaaaatgctcagtaaggaagaacttccgcagcgcaagatgtgtctgaaagctatgttcaaactgtag

SEQ ID NO: 220823 - DNA, 966 bp, Artificial Sequence
  derived and/or modified sequence
atggtgaacctgacctccatgagcggcttcctgctgatgggcttcagtgatgagaggaagctgcagatcctgcacgccctggtgttcctggtgacctacctgctggccctgaccggcaacctgctgatcatcaccatcatcaccgtggaccggcggctgcacagccccatgtactacttcctgaagcacctgagcctgctggacctgtgcttcatctctgtgacagtgccccagagcatcgccaacagcctgatgggaaatggctacatcagcctggtgcagtgcatcctgcaggtgttcttcttcatcgccctggccagcagcgaggtggccatcctgactgtgatgtcctatgacagatatgctgccatctgccagcccctgcactatgagaccatcatggacccccgggcctgcagacatgctgtgattgctgtgtggattgctgggggcctgagcggcctgatgcacgccgccatcaacttcagcatccccctgtgtgggaagagggtcatccaccagttcttctgtgatgtgccccagatgctgaagctggcctgcagctatgagttcatcaatgaaattgccctggccgccttcaccaccagcgctgccttcatctgcctgatcagcatcgtgctgagctacatccgcatcttcagcacagtgctgcgcatccccagcgctgagggccgcaccaaggtgttcagcacctgcctgccccacctgtttgtggccaccttcttcctgtctgctgctggctttgagttcctgcggctgcccagcgacagcagcagcacagtggacctggtgttttctgtgttctacaccgtcatcccccccaccctgaaccctgtgatctacagcctgagaaatgacagcatgaaggccgccctgaggaagatgctgagcaaggaggagctgccccagaggaagatgtgcctgaaggccatgttcaagctgtag

SEQ ID NO: 220824 - DNA, 1117 bp, Artificial Sequence
  derived and/or modified sequence
gcattttcttcctactgtctttggcttcctaaacagagtcacacttggtatcttcagagagactatggtcaatttgacttcaatgagtggattccttcttatggggttttctgatgagcgtaagcttcagattttacatgcattggtatttctggtgacatacctgctggccttgacaggcaacctcctcattatcaccatcattaccgtggaccgtcgtctccattcccccatgtattactttttaaagcacctctctcttctggacctctgcttcatctctgtcacagtcccccagtccattgcaaattcacttatgggcaacggttacatttctcttgttcagtgcattcttcaggttttcttcttcatagctctggcctcatcagaagtggccattctcacagtgatgtcttatgacaggtacgcagcaatctgtcaaccacttcattatgagactattatggatccccgtgcctgtaggcatgcagtgatagctgtgtggattgctgggggcctctctgggctcatgcatgctgccattaacttctccatacctctctgtgggaagagagtcattcaccaattcttctgtgatgttcctcagatgctgaaactagcctgttcttatgaattcattaatgagattgcactggctgcattcacaacgtctgcagcatttatctgtttgatctccattgtgctctcctacattcgcatcttctctacagtgctgagaatcccatcagctgagggccggaccaaggtcttctccacctgcctaccacacctatttgtagccaccttctttctttcagctgcaggctttgagtttctcagactgccttctgattcctcatcgactgtggaccttgtattctccgtattctatactgtgatacctccaacactcaatccagtcatttatagcttacggaatgattccatgaaggcagcactgaggaagatgctgtcaaaggaagagcttcctcagagaaaaatgtgcttaaaagccatgtttaaactctgaagaaccatacaaatgaaaggcattgttattatgtttcagattggaagagaggtgaatcttatttctacccagaatgctcttccaagc

SEQ ID NO: 220825 - DNA, 966 bp, Artificial Sequence
  derived and/or modified sequence
atggtgaacctgaccagcatgagcggcttcctgctgatgggcttctccgacgagcggaagctccagatactgcatgctctggtgttcctcgttacctacttgctggcattgaccggaaacctgttgattatcacaattatcaccgtggacagacggctgcacagtcctatgtattatttcttgaaacacttgagccttctggatttatgttttatttcggtcacggtcccccagagcatcgcaaactcattgatgggcaatgggtacatcagcctggtacagtgcattctccaggtgtttttctttatcgccttagcgtcaagcgaggtggctattctcaccgtcatgtcttacgatcggtacgcagcaatttgccagcccttacactacgagactatcatggatccgcgggcctgtaggcatgcagtcatagccgtgtggatcgcgggcggattgtcaggccttatgcacgccgctatcaatttttccatacccctgtgtggaaagcgcgtgatccaccagtttttttgtgatgtgccgcaaatgttgaaacttgcctgctcatacgagtttattaacgagattgcactcgctgcatttacgacctcagctgccttcatctgtttaatatctattgtgctgtcgtacatcagaatctttagcacagtgctgagaattccatcagccgagggcagaaccaaagtgttttcaacatgcctgccacatctgttcgtagccacttttttcctgtctgcggctggcttcgagtttttgcgtctgcctagtgacagctcctcaactgtcgacctggtcttctccgttttttatactgttattccacctacattaaatcccgtcatctatagcctgagaaacgactcaatgaaggcagccctgcgcaaaatgttgtccaaggaagaactgccccagaggaagatgtgtctaaaggctatgtttaagctgtag

SEQ ID NO: 220826 - DNA, 966 bp, Artificial Sequence
  derived and/or modified sequence
atggtgaacctgaccagcatgagcggcttcctgctgatgggcttcagcgatgagcgaaagctccagatacttcacgccctcgttttcctcgtgacgtatctcctagctcttacaggaaacctgctgataatcacaatcatcaccgttgaccgacggctgcattctccaatgtattacttcttgaaacatctgagcctgctagacctctgctttatcagcgtcaccgttccacagagtattgctaactccctaatgggaaacggttacatctctttggtgcaatgcatcttacaggttttctttttcattgccctcgcatcttctgaagtggctattcttacagtaatgagctacgatcgctatgccgccatctgccagcccttacattacgagacaatcatggacccgcgggcctgccggcacgctgttattgctgtatggatcgccggaggtctctccggtctgatgcacgctgctattaacttcagcattcctctgtgcggaaaacgggtcatccaccagttcttttgcgacgtacctcagatgctgaaattggcctgctcatacgagtttatcaacgagatcgctttggccgcatttacaacttcagcagcatttatttgtctgattagtatcgtgttatcttatatcagaatattctcgactgtgctgcgaataccctcggccgaaggacgtacaaaagtcttctcgacttgcttaccccatctgtttgtggccaccttcttcctgagtgccgcaggattcgagtttctgcggttgccttctgacagcagctccaccgttgatctggtgttctcggtattttacaccgtgataccacctacgctaaaccccgtcatttatagcctgaggaacgatagcatgaaggccgctctgcgaaagatgctgtctaaagaagaactcccccagagaaagatgtgtctgaaggctatgttcaaactttag

SEQ ID NO: 220827 - DNA, 966 bp, Artificial Sequence
  derived and/or modified sequence
atggtgaacctgaccagtatgtcgggcttccttcttatgggtttttccgatgaacggaagttacagatactacacgcgcttgtgttcttggtgacatatctcctcgcactcaccggtaacttgctgattatcactatcatcaccgtggatcgaagactccatagccccatgtactactttctgaaacacctgtccctgctcgatctgtgttttattagtgtgaccgttcctcagagcatagcgaatagcctcatgggtaatggatacatcagtctggtgcagtgcattctacaggtgttctttttcatcgcactggcctccagtgaagtggctatcctgacggtgatgtcttacgataggtacgcagcaatctgtcagcccctgcactatgagacaattatggaccctagggcatgcagacacgctgtcattgccgtgtggatcgctgggggactgtccgggctgatgcacgccgctattaattttagcattcccctatgtgggaagcgagtgattcatcagttcttctgcgatgtaccccaaatgctgaagctagcttgcagctatgaatttatcaatgagatcgcactggccgctttcaccactagtgcggctttcatctgcctgatctctatagtgttgtcctatatcaggatattctctacagtgttgcgtataccgagcgccgaggggagaacaaaggttttctcaacctgcctgccgcatttattcgttgctaccttctttctcagtgccgcaggctttgagttcctgcgtttgcccagtgattcgtcatccacagtcgatctggtgttcagcgtcttttacaccgtaataccacccaccttaaacccagtgatttactcgctccggaacgacagcatgaaggccgctttaagaaagatgctgagcaaggaggaactgccccagagaaagatgtgtcttaaggctatgtttaagctgtag

SEQ ID NO: 220828 - DNA, 966 bp, Artificial Sequence
  derived and/or modified sequence
atggtgaacctcacctctatgtccggctttctgctcatgggtttctccgacgagagaaaacttcagatactgcacgcactggtcttcttggttacatatctacttgctctaacaggaaatttgctaatcataacaatcatcacagtggatcgcagactgcatagtcccatgtattacttcctcaaacatctctccctgctggatctctgcttcatctccgtgactgttcctcagtctattgctaattcccttatgggcaacgggtatatttcactggtccagtgcatcctccaggtatttttcttcattgcattggcttccagcgaggtggcaatacttaccgtgatgtcttatgaccggtacgcagctatctgccaaccactccactatgagactatcatggaccctagggcatgccggcacgccgtaattgccgtttggatcgctggcggtctaagtgggttgatgcatgctgcaattaactttagtatccctttatgcgggaaacgggtgattcatcagtttttttgtgacgttccacagatgctcaagctggcttgtagctacgagttcatcaatgagatagcgcttgccgctttcaccacctccgccgctttcatctgtctcatctccatcgttctgtcctacatcagaatcttcagcacagtcctgaggatcccaagcgccgaaggtaggaccaaggtgttttcaacgtgtctgccacatctatttgtggctacattttttttgagcgccgctggcttcgagtttctgaggttaccttccgattcctctagcaccgtggatctggtgttcagtgtgttttacactgtcattcctcccacccttaatccagtgatctattccttgagaaacgatagtatgaaagcggcactgcggaaaatgctgagtaaagaagaacttccccaaaggaaaatgtgtctcaaagctatgtttaagctttag

SEQ ID NO: 220829 - DNA, 966 bp, Artificial Sequence
  derived and/or modified sequence
atggtgaacctgaccagcaccagcggcttcctgctgatgggcttcagcgacgagagaaagctgcagatcctgcacgccctggtgttcctggtgacctacctgctggccctgaccggcaacctgctgatcatcaccatcatcaccgtggacagaagactgcacagccccatgtactacttcctgaagcacctgagcctgctggacctgtgcttcatcagcgtgaccgtgccccagagcatcgccaacagcctgatgggcaacggctacatcagcctggtgcagtgcatcctgcaggtgttcttcttcatcgccctggccagcagcgaggtggccatcctgaccgtgatgagctacgacagatacgccgccatctgccagcccctgcactacgagaccatcatggaccccagagcctgcagacacgccgtgatcgccgtgtggatcgccggcggcctgagcggcctgatgcacgccgccatcaacttcagcatccccctgtgcggcaagagagtgatccaccagttcttctgcgacgtgccccagatgctgaagctggcctgcagctacgagttcatcaacgagatcgccctggccgccttcaccaccagcgccgccttcatctgcctgatcagcatcgtgctgagctacatcagaatcttcagcaccgtgctgagaatccccagcgccgagggcagaaccaaggtgttcagcacctgcctgccccacctgttcgtggccaccttcttcctgagcgccgccggcttcgagttcctgagactgcccagcgacagcagcagcaccgtggacctggtgttcagcgtgttctacaccgtgatcccccccaccctgaaccccgtgatctacagcctgagaaacgacagcatgaaggccgccctgagaaagatgctgagcaaggaggagctgccccagagaaagatgtgcctgaaggccatgttcaagctgtag

SEQ ID NO: 220830 - DNA, 966 bp, Artificial Sequence
  derived and/or modified sequence
atggttaaccttacttcaaccagcggtttcttgctgatggggttctccgatgagcggaaactccagatcctccacgcattagtttttcttgtgacatacttgctggctctgacaggcaatctcctcatcatcaccattatcaccgtagaccgtagactgcatagtcccatgtactactttctcaaacatctaagtctacttgatctctgtttcatctctgtgactgtgcctcagtcaatagctaactcgctcatgggaaacgggtatataagtttggttcagtgcatcctccaggtattcttcttcatagcactggcctcctctgaggtcgccatattgaccgttatgagttatgaccgctacgccgctatttgccagcctctgcactacgaaactatcatggaccctagggcatgtcggcacgccgttatcgctgtatggatagctggagggctttcaggattgatgcatgccgccattaatttcagcatcccactttgtgggaagagagtgatccaccaatttttctgtgatgtgccacagatgctgaagttagcctgttcatacgagtttataaacgaaatcgcacttgccgctttcacaacgtccgccgccttcatttgtctgatttccatcgtcctcagctacatacgcattttctctaccgtcctcagaatccctagcgctgaggggagaaccaaagtgtttagtacatgcttgccccatttgttcgttgcaacattttttcttagtgctgccgggtttgaattccttcggctgccatcagacagtagtagcactgtggacctggtgttttccgtgttttatacagtgatcccccccaccttaaatcctgtcatctactctctgcgaaacgatagcatgaaggctgctttgcgtaaaatgctgagcaaagaggaactcccgcagcggaaaatgtgcttgaaagccatgttcaagctctag

SEQ ID NO: 220831 - DNA, 966 bp, Artificial Sequence
  derived and/or modified sequence
atggtcaacctcacttctacgtctgggttccttcttatgggcttctctgacgagcgcaaacttcagatcttacacgctttggttttcctcgtaacatatctgttagccctcaccggaaatctgttgatcataactatcattaccgtggaccgcaggttgcactccccaatgtactatttcctaaaacacctgtcgctgctcgatctctgtttcatatcagtgaccgtaccgcagagcatcgcgaactctctgatgggcaacggctatatcagcctagtgcagtgtatcctgcaagtattcttctttatagctttggcctcatccgaggtcgccatccttacagtaatgtcctacgatagatacgctgctatttgccagccacttcattacgagaccattatggaccctagagcatgtagacatgccgtgatcgccgtatggatcgccggtggtttgagtggattgatgcatgctgccattaattttagtatcccactctgcggcaagcgcgtaatccaccagttcttttgtgatgtgcctcagatgttaaaactggcttgttcatacgagttcattaatgagattgcacttgccgcgtttactacctcggccgcttttatctgcctcatttcaatcgtgctctcttatattagaatcttcagcaccgtcttacggatacccagcgccgagggccgaaccaaggtgttcagtacatgcctccctcacctctttgttgctactttttttctaagtgccgctggcttcgaattccttcggctccctagtgactctagcagtactgtagacctggtcttcagcgtgttctatacagttatccccccgacattaaatccggtcatctactccctaagaaacgattccatgaaggcagctctgagaaagatgttgtcgaaagaagaattgccacaacgcaaaatgtgcttgaaagccatgttcaagctgtag

SEQ ID NO: 220832 - DNA, 966 bp, Artificial Sequence
  derived and/or modified sequence
atggtgaatttaacctcaacctccggctttctgctgatgggcttctccgatgaacggaagttacagatcctacacgccctagtgtttttggtaacttatctgttagcgctgaccgggaacttgctgatcatcaccatcataacggttgacaggcgtcttcactctcccatgtattatttcctaaaacatctttccttgttagatttgtgtttcatcagcgtcactgtgcctcagtccatcgccaattctttgatgggaaacggatacatatcactggttcagtgcattctgcaggtgttcttctttatcgccctggccagctcagaggtcgcaatccttaccgtcatgtcttacgaccgctacgcagccatttgtcagccgctacactatgaaacaatcatggacccgagggcttgtcggcatgccgtcattgccgtctggatcgccggggggctttccggactcatgcacgcggctattaatttctcaattccgctgtgtgggaaaagagtaatccaccagttcttctgtgacgtcccccaaatgctgaagcttgcctgttcctacgagttcataaatgagatagccctagccgcctttaccaccagcgcagcttttatttgccttatctcgatcgtcctctcttacatcaggatttttagcactgtacttcgtattccaagtgcggaggggaggacaaaagtgttctccacctgcctcccacacctttttgtggccacattttttctgagcgccgccggatttgagttcctacggctgccaagcgactcatccagtaccgtcgatctagtgttttctgtgttctataccgttattcctcccactcttaatcccgtgatctactcgttgcgaaacgactctatgaaagccgcattacgaaagatgttgagtaaggaggagctgccacagagaaaaatgtgtctgaaagcgatgttcaaattatag

SEQ ID NO: 220833 - DNA, 966 bp, Artificial Sequence
  derived and/or modified sequence
atggttaatttgacatctacatctggttttttgttaatgggtttttcagatgagagaaaactccaaatcctgcacgccttagtttttctggtcacctacctgctggctctaacaggcaacctgttgatcattactatcatcaccgtggatcggagacttcactcgcctatgtattatttcctgaaacatctaagccttctggacctgtgttttatcagcgttactgtgccccagtctatcgccaactcactgatggggaatgggtacattagcctggttcaatgcattttacaggttttctttttcatagctctggcctcctcagaggtggctatcctcacggtgatgagctatgatcgatacgccgccatctgccagccgctgcactatgaaacaattatggatccgcgggcctgccggcacgcagttatcgccgtctggatagccggggggctgtcaggcttgatgcacgccgctatcaatttctccatccctctctgcggcaagagagtcatccaccaatttttttgcgacgtccctcagatgcttaagctggcttgctcctacgaattcattaatgagatcgctcttgccgccttcaccacctcagccgcctttatttgcctgataagtatagtgctgtcatacatccgtattttcagcaccgtgctaaggattccatccgcagagggacgcacaaaagtctttagcacgtgtctcccccacttgtttgttgctaccttcttcctttcagctgctgggttcgaatttttgcgcctcccttctgacagcagctcgacagttgaccttgttttcagcgtgttctacacagttatccccccaaccctgaatccggtgatctacagcctcagaaatgattctatgaaagccgcactgcggaaaatgctgagcaaagaagagttgccccagagaaagatgtgcttgaaggcaatgtttaagctctag

SEQ ID NO: 220834 - DNA, 966 bp, Artificial Sequence
  derived and/or modified sequence
atggtaaacctaacatcgatgagcggattcctccttatgggcttttcagacgagcgcaagctacagatccttcacgctctggtcttcttggtcacctatctgctggcactcacagggaatctcctcattattaccattatcaccgtcgaccgtagacttcactcacctatgtactatttcctgaaacacctgagtctgctagatctgtgtttcatcagtgttacagtacctcaaagcattgctaattccctgatgggcaatggctatataagcctcgtgcaatgtatattgcaagtcttttttttcatcgctctggctagctcagaagttgccattctcacagtgatgtcctacgataggtacgcggccatctgccagcccttgcattacgagaccattatggacccccgggcttgtagacacgcagtcattgctgtttggattgcgggggggctctccggcttaatgcacgccgccatcaatttttctatacctctctgcggtaaacgtgttatccaccaatttttctgcgatgtgccccaaatgctgaaattggcctgtagttacgaattcattaacgagatagccctcgccgcattcaccacctccgcagccttcatctgcttgatctctatcgtactcagctatatacgcatcttcagcaccgtactccgcatcccttctgctgaggggaggacaaaagttttttcaacgtgtctgccacacctgtttgtggccaccttctttctcagcgcagccggcttcgagtttctgaggctgccgagtgacagcagtagcacagtcgatctggtgttctcagtgttctacacagtgatccctcctacactaaacccggtgatctacagtctgcgaaacgattcaatgaaagcagctctacgcaagatgctctcgaaggaggagctcccccaacgcaaaatgtgtctgaaagccatgttcaagttatag

SEQ ID NO: 220835 - DNA, 966 bp, Artificial Sequence
  derived and/or modified sequence
atggtgaacctgaccagcaccagcggcttcctgctgatgggcttcagtgatgagaggaagctgcagatcctgcacgccctggtgttcctggtgacctacctgctggccctgaccggcaacctgctgatcatcaccatcatcaccgtggaccggcggctgcacagccccatgtactacttcctgaagcacctgagcctgctggacctgtgcttcatctctgtgacagtgccccagagcatcgccaacagcctgatgggaaatggctacatcagcctggtgcagtgcatcctgcaggtgttcttcttcatcgccctggccagcagcgaggtggccatcctgactgtgatgtcctatgacagatatgctgccatctgccagcccctgcactatgagaccatcatggacccccgggcctgcagacatgctgtgattgctgtgtggattgctgggggcctgagcggcctgatgcacgccgccatcaacttcagcatccccctgtgtgggaagagggtcatccaccagttcttctgtgatgtgccccagatgctgaagctggcctgcagctatgagttcatcaatgaaattgccctggccgccttcaccaccagcgctgccttcatctgcctgatcagcatcgtgctgagctacatccgcatcttcagcacagtgctgcgcatccccagcgctgagggccgcaccaaggtgttcagcacctgcctgccccacctgtttgtggccaccttcttcctgtctgctgctggctttgagttcctgcggctgcccagcgacagcagcagcacagtggacctggtgttttctgtgttctacaccgtcatcccccccaccctgaaccctgtgatctacagcctgagaaatgacagcatgaaggccgccctgaggaagatgctgagcaaggaggagctgccccagaggaagatgtgcctgaaggccatgttcaagctgtag

SEQ ID NO: 220836 - DNA, 966 bp, Artificial Sequence
  derived and/or modified sequence
atggtgaacctgaccagcaccagcggcttcctgctgatgggcttctccgatgagcgtaagttgcagatcttacacgcactggtgttcctcgtgacatatttgctggcattgacggggaatcttctaatcattaccataataactgtagacaggagactccactcccctatgtactacttcctgaaacacctgtccctcctggatctgtgctttattagtgtcacagtgccacagtccatcgcaaactctctcatggggaacgggtatatatctttggttcagtgcatactacaagtcttcttctttatcgctcttgccagcagcgaggtcgcaatcctgaccgttatgtcttacgacagatacgctgcaatctgccaacctcttcactacgagaccatcatggaccccagagcctgccgacatgccgtgatcgcagtgtggatcgctggcgggttaagtggactgatgcatgccgcaataaatttttcaataccactgtgtggtaaacgagtcatccatcagttcttttgcgacgtgccacagatgctcaagttggcttgtagctatgagttcatcaatgagatagcattggcagccttcactacctccgctgccttcatttgcctcatctctatcgttctgtcttacatcagaatttttagcaccgtgttacgcattcctagtgccgagggcaggaccaaagtgttttccacatgcctgccccatctgttcgtggccaccttcttcctttctgccgctggctttgagttcttgcgtctcccaagcgatagcagctctactgtggatctcgttttttctgttttttacaccgtgatcccaccgacactgaacccagtgatctacagtctacggaatgattcaatgaaagccgcgctgcgtaaaatgttgtcaaaagaggaactgccccagagaaaaatgtgtctaaaagcaatgttcaagctgtag

SEQ ID NO: 220837 - DNA, 966 bp, Artificial Sequence
  derived and/or modified sequence
atggtgaacctgaccagcaccagcggcttcctgctgatgggcttcagtgacgaaaggaagctacagattctccatgccttggtgtttctggtgacttatctactcgccctgactggaaacctgcttattatcactatcattactgtcgatcgccgcctgcattcacccatgtactacttcctgaaacatctttctcttctggatctgtgctttatctctgtgaccgtgcctcaaagtattgcaaactcactgatgggaaacggatatatatcactggtacagtgcatactgcaggtcttcttttttatcgccctcgcatcttcggaggtggccatcttaactgtgatgtcttacgatcgttacgctgctatctgtcagccactccactacgaaactataatggacccaagggcctgcaggcacgctgttattgccgtgtggatcgctggaggcctatccggtctgatgcatgcggctatcaacttttctatcccgctttgcgggaagagggtaatccaccaatttttttgtgacgtgccacaaatgttgaaactggcttgcagctacgagttcattaacgaaatagccctagcagcatttaccacctccgctgctttcatatgcctcatcagcattgtcctgtcctacatccggattttctccacggttctgaggatcccaagtgctgaaggccgcactaaggtcttctccacttgcctacctcacctttttgtggccaccttctttctgagcgcagcgggatttgaattcctacggctcccttcagattcaagttccacagttgatctggttttttcagtcttttatactgtaattccaccaaccctgaacccagtgatatacagtttgcgcaacgattccatgaaggccgccctccgaaagatgctatccaaggaggagctgccccagcggaagatgtgtctgaaggccatgtttaaactctag

SEQ ID NO: 220838 - DNA, 966 bp, Artificial Sequence
  derived and/or modified sequence
atggtgaacctgaccagcaccagcggcttcctgctgatgggcttcagcgacgagcggaaactacagattctgcacgctttagtatttcttgtgacttacctgctcgcgctaaccggtaacctgctcatcattaccatcataacagtcgatagaagactccacagccctatgtactatttcttaaagcatctgtctctccttgatctttgcttcatttccgtgacggtgcctcagtcgattgcaaacagtctgatggggaacggatacatctcactcgtgcagtgcatcctacaggtgttcttcttcatcgccttagctagcagcgaggttgccattctgactgtaatgtcatacgaccggtacgctgcaatttgtcagccactgcactacgaaactataatggatccaagggcatgtaggcacgccgtgatcgccgtctggatcgccggagggctctccgggttgatgcacgctgccatcaatttctctatccctctttgtggcaagagagtcatccaccagttcttctgtgatgtgccccaaatgctcaaacttgcttgctcctacgagtttattaatgagatcgccttggcagcttttactacaagcgccgcatttatttgcttaatcagtatcgttttgtcgtatatccgtattttctctacagttctgagaataccaagtgcagaaggccgcaccaaggtcttcagcacctgtctgccacacctgttcgtcgccacgttctttctctctgctgctggatttgaattcctgaggctccccagcgacagctcttccacagtcgacctcgtgtttagtgtattctacacagtgatcccccccaccttgaatccagttatatatagtctgcggaatgacagcatgaaggccgctctgcggaagatgctgtccaaagaggagctgccccagcgtaagatgtgcctaaaggccatgtttaaactgtag

SEQ ID NO: 220839 - DNA, 966 bp, Artificial Sequence
  derived and/or modified sequence
atggtgaacctgaccagcaccagcggcttcctgctgatgggcttcagtgacgaaaggaagctgcagattttacacgctctggtcttcctggttacataccttttagccctcaccgggaacctcctgataatcacaattatcacggtggaccggcggctccattctcccatgtattactttcttaaacacctgagtctgctcgatttatgttttatctcagtgaccgtgcctcaaagcatcgcgaactccctgatgggtaacggatacatttcactggttcagtgcattctccaggtcttcttttttatagcgctggccagcagcgaggttgccatcctgaccgttatgtcatacgaccggtacgctgctatttgtcagcctttacactatgagaccattatggatcctagagcctgtcggcatgcagtgattgctgtgtggatcgccggcgggctgtccggactgatgcatgcagccataaatttttctattccactgtgtggaaaacgcgtgatacaccagttcttctgtgatgtgccacagatgctgaaactggcttgtagctacgaattcataaatgagattgctctcgctgcctttaccacctccgccgcctttatctgcctcatctcaatcgtattaagttatattcgcatctttagcactgttctgagaattccaagtgcggaggggagaaccaaggtattcagcacatgcctaccccatttgtttgtggctacttttttccttagtgcagccggttttgagttcctccgccttccttctgactcctcttccactgtcgaccttgtgttctcagtgttctacaccgtgatcccccctactttgaaccccgtaatatattccctgcgcaatgatagtatgaaggcagctctgcgaaaaatgctgagtaaggaggagttacctcaacggaagatgtgcctgaaggccatgttcaagctctag

SEQ ID NO: 220840 - DNA, 966 bp, Artificial Sequence
  derived and/or modified sequence
atggtgaacctgaccagcatgagcggcttcctgctgatgggcttctccgacgagagaaagctacaaatccttcacgccctcgtgttcctggttacctacctgctggcactgactgggaacctgctgatcattaccattataactgtggacagacgcttgcactcacctatgtactactttctcaagcatctgagcctgctggacttgtgtttcattagcgtgaccgtgccccagtccatcgcaaacagtctgatggggaatggttatatatcactggtgcagtgcatcctgcaggtcttcttcttcattgccctcgcctcgagcgaagtggccattttgaccgttatgtcatacgatcggtatgccgcaatatgtcaaccactccactatgaaacaatcatggatcctcgagcctgccgccatgccgttatcgcagtgtggatcgcaggggggctttccgggctcatgcacgccgcaattaatttttctattcccctatgcggcaagagggtgatacaccagttcttctgcgacgtgccacagatgctaaaactcgcatgttcttacgagttcatcaacgagatcgctctggcggcattcacgactagcgccgcatttatttgccttatctctatcgtactctcctacatcagaatttttagtacggtgctgcggattcctagtgccgagggtcggactaaggtcttcagcacatgtttgccgcatctgttcgtagccacattctttctctcagctgcaggcttcgagtttctccgactgccctctgattctagctccacggtggatttggtattttcagtcttctataccgttattcctccaacgctgaatcctgtcatctactccctgaggaacgatagcatgaaagccgctttgagaaaaatgctgtctaaagaagagcttcctcagaggaaaatgtgtctgaaagccatgttcaagctgtag

SEQ ID NO: 220841 - DNA, 1117 bp, Artificial Sequence
  derived and/or modified sequence
gcattttcttcctactgtctttggcttcctaaacagagtcacacttggtatcttcagagagactatggtcaatttgacttcaacgagtggattccttcttatggggttttctgatgagcgtaagcttcagattttacatgcattggtatttctggtgacatacctgctggccttgacaggcaacctcctcattatcaccatcattaccgtggaccgtcgtctccattcccccatgtattactttttaaagcacctctctcttctggacctctgcttcatctctgtcacagtcccccagtccattgcaaattcacttatgggcaacggttacatttctcttgttcagtgcattcttcaggttttcttcttcatagctctggcctcatcagaagtggccattctcacagtgatgtcttatgacaggtacgcagcaatctgtcaaccacttcattatgagactattatggatccccgtgcctgtaggcatgcagtgatagctgtgtggattgctgggggcctctctgggctcatgcatgctgccattaacttctccatacctctctgtgggaagagagtcattcaccaattcttctgtgatgttcctcagatgctgaaactagcctgttcttatgaattcattaatgagattgcactggctgcattcacaacgtctgcagcatttatctgtttgatctccattgtgctctcctacattcgcatcttctctacagtgctgagaatcccatcagctgagggccggaccaaggtcttctccacctgcctaccacacctatttgtagccaccttctttctttcagctgcaggctttgagtttctcagactgccttctgattcctcatcgactgtggaccttgtattctccgtattctatactgtgatacctccaacactcaatccagtcatttatagcttacggaatgattccatgaaggcagcactgaggaagatgctgtcaaaggaagagcttcctcagagaaaaatgtgcttaaaagccatgtttaaactctgaagaaccatacaaatgaaaggcattgttattatgtttcagattggaagagaggtgaatcttatttctacccagaatgctcttccaagc

SEQ ID NO: 220842 - DNA, 1117 bp, Artificial Sequence
  derived and/or modified sequence
gcattttcttcctactgtctttggcttcctaaacagagtcacacttggtatcttcagagagactatggtcaatttgacttcaacgagtggattccttcttatggggttttctgatgagcgtaagcttcagattttacatgcattggtatttctggtgacatacctgctggccttgacaggcaacctcctcattatcaccatcattaccgtggaccgtcgtctccattcccccatgtattactttttaaagcacctctctcttctggacctctgcttcatctctgtcacagtcccccagtccattgcaaattcacttatgggcaacggttacatttctcttgttcagtgcattcttcaggttttcttcttcatagctctggcctcatcagaagtggccattctcacagtgatgtcttatgacaggtacgcagcaatctgtcaaccacttcattatgagactattatggatccccgtgcctgtaggcatgcagtgatagctgtgtggattgctgggggcctctctgggctcatgcatgctgccattaacttctccatacctctctgtgggaagagagtcattcaccaattcttctgtgatgttcctcagatgctgaaactagcctgttcttatgaattcattaatgagattgcactggctgcattcacaacgtctgcagcatttatctgtttgatctccattgtgctctcctacattcgcatcttctctacagtgctgagaatcccatcagctgagggccggaccaaggtcttctccacctgcctaccacacctatttgtagccaccttctttctttcagctgcaggctttgagtttctcagactgccttctgattcctcatcgactgtggaccttgtattctccgtattctatactgtgatacctccaacactcaatccagtcatttatagcttacggaatgattccatgaaggcagcactgaggaagatgctgtcaaaggaagagcttcctcagagaaaaatgtgcttaaaagccatgtttaaactctgaagaaccatacaaatgaaaggcattgttattatgtttcagattggaagagaggtgaatcttatttcttcccagaacgctcttccaagc

SEQ ID NO: 220843 - DNA, 966 bp, Artificial Sequence
  derived and/or modified sequence
atggtcaatctgacctctacctccgggtttctcctgatgggattttcggacgaacggaagctgcagatactgcacgccttggtgttcctggtaacatacctcttggcgctgacaggaaacctgctgatcattacaattatcacagttgaccggagattacattcacccatgtattatttcttgaagcatctgtctctccttgatctttgcttcatcagcgtaaccgtccctcagtcaatcgccaactctctgatgggtaacggatacatctctctcgtgcagtgcatcctgcaggtttttttctttatcgccttggcgagcagcgaagtagccatcctgaccgtcatgagttatgacaggtacgcggctatctgtcagccattacattacgaaactataatggatcccagggcatgccgccatgctgtgattgctgtctggatagcaggcggtctaagtgggttaatgcatgccgctattaacttttctatccccctgtgcggcaagcgagtaatccatcagttcttttgtgatgtgccgcagatgctcaaattggcatgtagttacgagtttattaacgaaattgcgttagccgcatttactacatcagcagcattcatctgcctgataagcattgtgctgagttacatccggatttttagcacagtgctccgcataccatccgccgaaggcagaacaaaggttttttccacatgcctgccacatctgttcgtggctactttctttctgtccgccgcaggatttgagtttctgagactcccctcagactcttccagcacagtcgatttagtgttcagcgtcttctatactgttatccctcccactttaaaccctgttatatattctcttcgcaacgactctatgaaggctgctctgagaaaaatgttgtccaaagaggaacttccacagagaaagatgtgcctcaaagccatgtttaaactatag

SEQ ID NO: 220844 - DNA, 966 bp, Artificial Sequence
  derived and/or modified sequence
atggtgaacttgaccagtaccagtggattcctcctcatgggctttagcgacgaaagaaagctccagattttgcatgcattggtctttttggtgacctatctcctggccctcaccggcaatttgttaataatcacaattataacggttgatagaagactccacagtccaatgtactatttcctgaaacatctgtctctgctcgatctgtgtttcatatccgtgaccgtgccgcaatctatcgccaattccctcatggggaacggctatatctcactggtgcagtgcattctacaggtctttttcttcattgccctggcttcttctgaggtggccattctgaccgtgatgtcctatgataggtatgcagctatctgtcagcccttgcattatgagaccatcatggacccaagggcctgccggcatgcagtgatcgctgtctggatcgctggagggctgtcaggacttatgcacgcggctatcaattttagcatcccactctgtggtaaaagggttattcaccaatttttttgcgacgtgcctcaaatgctcaagcttgcctgcagctacgagttcattaacgaaattgctctggctgctttcactacttcagctgcgtttatttgtcttatctctatcgtgctgagctacatccggatctttagtacagtgctcaggattcctagcgccgaaggcaggacaaaggtattcagtacgtgcctgccacatctctttgttgcgacattctttttgtcagctgccggtttcgagttcctcagattgccatccgactcgagtagcacagtcgacctggtgttctcagtgttctacacagtgattccaccaacgctaaatcccgtgatttacagcttgcgcaatgatagcatgaaggctgcgcttcgcaaaatgttatcaaaggaggaactgccccaacgaaagatgtgtctgaaggctatgttcaagctgtag

SEQ ID NO: 220845 - DNA, 966 bp, Artificial Sequence
  derived and/or modified sequence
atggttaaccttacctctaccagtgggttcttgcttatgggtttctcggatgagcggaagttgcagattctgcatgctctggtcttcttggtgacgtacctgctcgccctgactggtaaccttctgataattaccatcattaccgtggaccggcgactccattctcctatgtactatttcctgaaacatctgagcctgctcgatttgtgttttatttctgtcaccgtgccacagtccatcgctaactcactgatgggaaacggctacatctccttggtccagtgtatcctacaggtatttttcttcattgccttggcttcctcagaggtagcaattttgacagtgatgtcttacgataggtatgccgctatatgccagccactacattatgagactattatggatcccagagcctgcaggcacgcagtaattgctgtctggatcgcaggtgggctctccggtctgatgcacgctgccatcaatttttcaattcccctctgtggaaaacgcgtgatccatcagtttttttgcgatgtgccgcagatgttaaagctcgcctgctcctatgaattcatcaacgaaattgcccttgctgccttcaccacctccgcagcgtttatctgcctgatctcaattgtgctaagctacatcagaattttcagcactgtgctccgcatcccgtcagccgagggacgtacaaaggtatttagcacctgcctgccacacttgttcgttgcaacatttttcctgtccgccgctggatttgagttcctgcggctaccaagcgactcttcctccaccgttgacctggtgtttagtgtattctatacagtgatccccccaaccctcaaccccgtgatatacagccttcggaacgactcgatgaaggctgccctcagaaaaatgctctcgaaggaggaacttccgcagagaaagatgtgcctcaaagcaatgttcaagttatag

SEQ ID NO: 220846 - DNA, 966 bp, Artificial Sequence
  derived and/or modified sequence
atggttaacctgacgtcgacatccgggttcttacttatgggattctccgatgagcgaaaattacaaatactgcacgcactggtcttcctcgtcacctaccttctcgcactgacgggcaatctgttaattatcactatcataaccgtggatcggcgtctccatagtccaatgtactatttcctgaaacatttatctctgctagacctgtgtttcatctctgtcactgtgccgcagtcaattgcgaacagtctgatggggaatggctacatctcactagtgcaatgcatcctgcaggtctttttttttatagctcttgcttccagcgaagttgctatactcacggttatgtcctatgatagatacgctgctatctgtcaacccctgcactacgaaacaatcatggatccacgagcctgtcgccacgctgtgattgctgtgtggattgcgggagggttgagcggtctcatgcatgccgcaattaatttctccatccctctgtgtggaaagagggttatccaccagttcttctgtgatgtgcctcagatgctgaagttagcctgctcgtacgagttcatcaacgaaatagccttggcggctttcacaacttcagcggctttcatctgcctgattagtatcgtgctgtcatacatccgcatcttctctaccgtgctgcgcattccttcagccgaggggagaacaaaggtgtttagcacatgtctaccccatctgtttgttgcaacattcttcctgtctgcggctgggtttgaattcctcagactgccctctgattcctcatccacagtcgatctggttttttctgtgttctatacagtcatcccacctaccctaaatcccgtgatttactccctgcggaacgacagcatgaaggctgccctacgtaagatgctgagtaaggaagaactgccacaacggaaaatgtgtctcaaggccatgtttaaactgtag

SEQ ID NO: 220847 - DNA, 966 bp, Artificial Sequence
  derived and/or modified sequence
atggttaacctcactagtatgagtggttttctgttgatgggtttcagtgacgagagaaagctgcagattctccacgcgctggtgtttttggtgacctacctcttggctctgaccggaaacttgctgattatcactatcataactgtagaccgcaggctgcatagtccgatgtactattttcttaaacacctgagtctgctcgacttatgcttcattagcgttaccgttccccagtcgatcgccaactctctcatggggaacggttatatctctctggtgcagtgcattctgcaggtattctttttcatcgccttagccagttctgaagtggctattcttactgtgatgtcctatgaccgctacgcagccatctgccagcccctacactatgagacgattatggacccacgggcatgccgacacgccgtaattgccgtctggatcgccggagggctgtcaggtctgatgcacgccgctatcaacttttctatccccctttgtgggaagcgtgtcatccaccagtttttttgtgatgttcctcagatgctgaagctggcgtgttcttatgaattcatcaacgagatcgccctggccgcttttacaacatccgctgcatttatttgcctaatctctattgtgctgtcttacattaggatcttttcaaccgtactgaggatccccagcgccgaaggccgaactaaggttttttcaacatgtctgcctcatctcttcgtcgctactttctttctgtcggctgctgggttcgagttcctcaggttgccaagcgactcatctagcactgtggatctagtctttagtgtgttttatactgtgattcccccaaccctcaaccccgtgatctatagtctgagaaacgattcaatgaaagcagccctccgcaagatgctcagtaaggaagagctccctcaaagaaagatgtgcctcaaggcaatgttcaagttgtag

SEQ ID NO: 220848 - protein, 165 aa, Artificial Sequence
  derived and/or modified sequence
MSVATGSSETAGGASGGGARVFFQSPRGGAGGSPGSSSGSGSSREDSAPVATAAAAGQVQQQQQRRHQQGKVTVKYDRKELRKRLVLEEWIVEQLGQLYGCEEEEMPEVEIDIDDLLDADSDEERASKLQEALVDCYKPTEEFIKELLSRIRGMRKLSPPQKKSV

SEQ ID NO: 220849 - DNA, 498 bp, Artificial Sequence
  derived and/or modified sequence
atgtcagttgcgacaggcagtagcgaaaccgccggtggcgcatctgggggaggggcacgtgtgttttttcagtctccgaggggaggagcaggagggtcccctggatcttcttctggatccggctcatcgagagaagacagcgccccagtggctacagccgcagctgccggccaggtgcagcagcagcaacagagacgccatcagcaggggaaggtgactgttaaatacgacagaaaagagctgcggaaacgcttggtgctggaggaatggattgtcgagcaacttggccagctctatggctgcgaagaagaagagatgccggaggtggaaattgatatagacgacctgttggacgccgactcagatgaggaaagagcctctaagttgcaggaggctctggtggattgttacaaacccactgaggagttcataaaggagttattgagccggatacggggcatgcgcaagctgagccctcctcagaagaaatcagtttag

SEQ ID NO: 220850 - DNA, 498 bp, Artificial Sequence
  derived and/or modified sequence
atgtctgtggccaccggcagcagcgagacagctggaggagccagcggcggcggggcccgggtcttcttccagagcccccggggcggggccggcggcagccctggcagcagcagcggcagcggcagcagcagagaagattctgcccctgtggccacagctgctgctgctggccaggtgcagcagcagcagcagaggaggcaccagcagggcaaggtgacagtgaagtatgacaggaaggagctgaggaagaggctggtgctggaggagtggatcgtggagcagctgggccagctgtatggctgtgaggaggaggagatgcctgaggtggagattgatattgatgacctgctggatgctgacagtgatgaggagcgggccagcaagctgcaggaggccctggtggactgctacaagcccacagaggagttcatcaaggagctgctgagccgcatccggggcatgaggaagctgagccccccccagaagaagtctgtgtag

SEQ ID NO: 220851 - DNA, 498 bp, Artificial Sequence
  derived and/or modified sequence
atgagcgtggccaccggcagcagcgagaccgccggcggcgccagcggaggcggcgcacgagtattctttcaaagcccacgcggtggagcgggggggagccctgggtctagctctggcagcggctcctctcgcgaggatagcgctcccgtggccaccgcagccgccgccggtcaagtgcagcaacagcagcagaggcggcatcagcagggaaaggttacagttaagtatgacaggaaggaactcaggaagagattagtgctggaggagtggatcgttgagcaactgggacaactgtacgggtgtgaggaggaagagatgccagaggtggagattgacattgacgacctgctggatgccgactccgacgaggagcgggcctcaaagctccaggaagccctcgtcgactgttataaaccaactgaggaatttatcaaggagctcctgagcaggatccgcggtatgcgcaagctcagcccacctcagaaaaagtcagtgtag

SEQ ID NO: 220852 - DNA, 498 bp, Artificial Sequence
  derived and/or modified sequence
atgagcgttgccacgggcagcagcgaaaccgcgggaggcgcatctggaggcggagcccgtgtgttttttcagtctccaagaggcggagcgggaggctcaccaggttcaagcagtggttccgggtctagcagagaggattctgccccagttgctacagcagccgcagcaggtcaggtgcagcagcaacagcaaagaaggcaccagcagggcaaggtaactgtgaaatacgaccggaaagagctcagaaagaggctagttttggaggagtggatcgtcgagcagctggggcaactatatggatgcgaggaggaggaaatgcctgaggttgaaattgacatcgatgacctgctggacgccgatagtgacgaggagcgcgcttcaaagctccaggaggcgctggttgactgctacaaacctacagaggaattcatcaaagagctgctgtcccgaatcagaggaatgcggaaactgtctcctccacagaaaaaatccgtgtag

SEQ ID NO: 220853 - DNA, 2152 bp, Artificial Sequence
  derived and/or modified sequence
agagcaggtgccggggagcccttcgcatgcggctgccgggccggaggtggtagcggcgccgggcgcgctccgcccgcccctcctccgggccgcactgaggctcgggcgcgcggggacatgtcggtggcgacgggcagcagcgagacggccggcggggccagcggcggcggcgcacgggttttcttccaaagcccccggggtggcgccggtggcagccccggctccagcagcggctcaggctcctcccgggaggactcggcgcccgtggccacggcggccgctgcagggcaggttcagcagcaacagcagcggcgacaccagcagggaaaagtgacagtgaaatacgatcgtaaggagcttcggaagcggctggtgctggaggaatggatcgtggagcagctgggtcagctctacggctgcgaggaagaagaaatgccagaggtagaaattgacattgatgatcttcttgatgcagacagtgatgaagagagagcttcaaaattacaggaagctcttgtagactgctacaaaccaacagaggaatttatcaaagagctgctttctcggataagaggcatgaggaaactgagccctccgcagaagaagagtgtatgattctggaacagggtgaaactctcccagagacgaagaaagagtcctgggatttgtacttcatgaagacttttgtgaaagaataggtgtccttatgaacaacgtttttgtttttttttttttcttttttggtgtgaaggtgggggggtctattagacatttattcaagagcgttctttttttggttttaaaggtttttgttaatgtaatattttaatagcaaagatatcatgactctagccacagcctaaccaaggattatcaaaggaggtggacactcaaggaagggccacgccaggctgcgtttcctgcaaggactcagatgttcagtaccttatgatacagggaagatagttttcttacaagtagtttggtaatattttttttcttaagttgtacatttgactcagctgtcaaatttctcacacttgtatatatctacacacaactaagttaaaatgttgatgtgagttttatttcacatggatggaataaacttgtggttgtcctttaactggaggtcccagcacatgtgttttcaagaggccactaggcattcttcactgagtgctgctgacttcaacgttcactttatgcaccaaagtgaaagaattcagtgtatccgttattttaatgcactacaccacagaaatgttaagttggtcaagggcttaatttatggaatttctattatttcattggttgggatgctttgccaggtcatgtgcttattgtctcattttgtagtcttttaaagttgtatgaacccttaatttgaagaactaacttgatttctagagaaatatccacactatctcagtggtattttgcattggaaaaaggaagcactgtgtagcagtgaattgtctgctttccaccgagtactgtgtttattctctctccaggaaagcagatcaaaagaaagttagcagatcgagtgtcttcttccttagaaataggttctggtagcttctgtgcctgggtagtatcagaccagtgggagtaaaccgagtgttaagtgtcaaggtgagaaagcctcacattctctcaagacagttgctctaggagctgagttgctggtttggaagtgtggagattgcatttctggcttctctcaatggcttgtgttgaggactctgggtgctcctggccctaattgtgcaccctgatccccgtgcttggagctaggcctggtggcgtgctctagccctctcagttaccagctctttggagaaggatcaaaattcagatggaatgtgggatgggtaataggtgagagtagaaacccttccctccaggaggcccccgctgactcccacagaaacccacctaccataagatgtcttcaggtggccttgtccaaggatgggggtcaggcattttatatcaagggtgctctgaacatattttattttttaaaaaaactatgtttgtgaattttgcgtatactggcaagcttttgaaaatgtatttaattttgtattgtttaccaatgatttatttacaagatatttactcaaataaatggagctgcttacaa

SEQ ID NO: 220854 - DNA, 498 bp, Artificial Sequence
  derived and/or modified sequence
atgagcgtggccaccggcagcagcgagaccgccggcggcgccagcggcggcggcgccagagtgttcttccagagccccagaggcggcgccggcggcagccccggcagcagcagcggcagcggcagcagcagagaggacagcgcccccgtggccaccgccgccgccgccggccaggtgcagcagcagcagcagagaagacaccagcagggcaaggtgaccgtgaagtacgacagaaaggagctgagaaagagactggtgctggaggagtggatcgtggagcagctgggccagctgtacggctgcgaggaggaggagatgcccgaggtggagatcgacatcgacgacctgctggacgccgacagcgacgaggagagagccagcaagctgcaggaggccctggtggactgctacaagcccaccgaggagttcatcaaggagctgctgagcagaatcagaggcatgagaaagctgagccccccccagaagaagagcgtgtag

SEQ ID NO: 220855 - protein, 628 aa, Artificial Sequence
  derived and/or modified sequence
MESLVFARRSGPTPSAAELARPLAEGLIKSPKPLMKKQAVKRHHHKHNLRHRYEFLETLGKGTYGKVKKARESSGRLVAIKSIRKDKIKDEQDLMHIRREIEIMSSLNHPHIIAIHEVFENSSKIVIVMEYASRGDLYDYISERQQLSEREARHFFRQIVSAVHYCHQNRVVHRDLKLENILLDANGNIKIADFGLSNLYHQGKFLQTFCGSPLYASPEIVNGKPYTGPEVDSWSLGVLLYILVHGTMPFDGHDHKILVKQISNGAYREPPKPSDACGLIRWLLMVNPTRRATLEDVASHWWVNWGYATRVGEQEAPHEGGHPGSDSARASMADWLRRSSRPLLENGAKVCSFFKQHAPGGGSTTPGLERQHSLKKSRKENDMAQSLHSDTADDTAHRPGKSNLKLPKGILKKKVSASAEGVQEDPPELSPIPASPGQAAPLLPKKGILKKPRQRESGYYSSPEPSESGELLDAGDVFVSGDPKEQKPPQASGLLLHRKGILKLNGKFSQTALELAAPTTFGSLDELAPPRPLARASRPSGAVSEDSILSSESFDQLDLPERLPEPPLRGCVSVDNLTGLEEPPSEGPGSCLRRWRQDPLGDSCFSLTDCQEVTATYRQALRVCSKLT

SEQ ID NO: 220856 - DNA, 1887 bp, Artificial Sequence
  derived and/or modified sequence
atggagagcctggtgttcgccagaagaagcggccccacccccagcgccgccgagctggccagacccctggccgagggcctgatcaagagccccaagcccctgatgaagaagcaggccgtgaagagacaccaccacaagcacaacctgagacacagatacgagttcctggagaccctgggcaagggcacctacggcaaggtgaagaaggccagagagagcagcggcagactggtggccatcaagagcatcagaaaggacaagatcaaggacgagcaggacctgatgcacatcagaagagagatcgagatcatgagcagcctgaaccacccccacatcatcgccatccacgaggtgttcgagaacagcagcaagatcgtgatcgtgatggagtacgccagcagaggcgacctgtacgactacatcagcgagagacagcagctgagcgagagagaggccagacacttcttcagacagatcgtgagcgccgtgcactactgccaccagaacagagtggtgcacagagacctgaagctggagaacatcctgctggacgccaacggcaacatcaagatcgccgacttcggcctgagcaacctgtaccaccagggcaagttcctgcagaccttctgcggcagccccctgtacgccagccccgagatcgtgaacggcaagccctacaccggccccgaggtggacagctggagcctgggcgtgctgctgtacatcctggtgcacggcaccatgcccttcgacggccacgaccacaagatcctggtgaagcagatcagcaacggcgcctacagagagccccccaagcccagcgacgcctgcggcctgatcagatggctgctgatggtgaaccccaccagaagagccaccctggaggacgtggccagccactggtgggtgaactggggctacgccaccagagtgggcgagcaggaggccccccacgagggcggccaccccggcagcgacagcgccagagccagcatggccgactggctgagaagaagcagcagacccctgctggagaacggcgccaaggtgtgcagcttcttcaagcagcacgcccccggcggcggcagcaccacccccggcctggagagacagcacagcctgaagaagagcagaaaggagaacgacatggcccagagcctgcacagcgacaccgccgacgacaccgcccacagacccggcaagagcaacctgaagctgcccaagggcatcctgaagaagaaggtgagcgccagcgccgagggcgtgcaggaggacccccccgagctgagccccatccccgccagccccggccaggccgcccccctgctgcccaagaagggcatcctgaagaagcccagacagagagagagcggctactacagcagccccgagcccagcgagagcggcgagctgctggacgccggcgacgtgttcgtgagcggcgaccccaaggagcagaagcccccccaggccagcggcctgctgctgcacagaaagggcatcctgaagctgaacggcaagttcagccagaccgccctggagctggccgcccccaccaccttcggcagcctggacgagctggccccccccagacccctggccagagccagcagacccagcggcgccgtgagcgaggacagcatcctgagcagcgagagcttcgaccagctggacctgcccgagagactgcccgagccccccctgagaggctgcgtgagcgtggacaacctgaccggcctggaggagccccccagcgagggccccggcagctgcctgagaagatggagacaggaccccctgggcgacagctgcttcagcctgaccgactgccaggaggtgaccgccacctacagacaggccctgagagtgtgcagcaagctgacctag

SEQ ID NO: 220857 - DNA, 1887 bp, Artificial Sequence
  derived and/or modified sequence
atggagtcgctggtatttgcacgtcgatcaggacccacgccctcggctgcggagctagccagacctctcgcagaggggctcataaagtctcccaaacctttgatgaagaagcaagcagtgaaaagacaccaccacaaacataatctcaggcaccgctacgaattcctggaaacgctgggaaaagggacctacggaaaggtgaagaaggcccgagagtcttccggccgactggtagcaatcaaatctatccgaaaggacaagatcaaggacgaacaggatctgatgcatattcggcgggaaattgaaatcatgtcgagcttaaaccatccccacatcattgccatacacgaggtgtttgaaaattcaagcaaaatcgtgatcgtgatggaatatgcatctagaggcgatctgtacgattatatctccgaacgacagcagctgtctgagagagaagcaaggcacttcttccggcagatcgttagcgctgtgcattattgtcaccagaatcgagtagtacatcgagatctgaaactggaaaacattctcttggatgccaacgggaatattaaaattgccgacttcggtttgagcaacctatatcaccaaggaaaatttctccagacgttttgcggcagccccctttatgccagccccgaaattgtcaacgggaagccatataccggaccagaggtggactcttggtccctgggtgtacttttatacatcttagtccacggtacgatgccctttgatgggcacgatcataaaatcctagtgaaacagatcagcaatggggcctatagggagccgccaaagccatcggacgcttgtggtttgatcagatggctgctgatggtaaaccccactcgacgggcaactctcgaagatgtcgccagccactggtgggtcaactgggggtatgcgacgcgtgtcggtgaacaggaggcacctcatgagggtgggcatcctgggagcgactccgctagggcctccatggccgactggctccggcggagctcaaggccgctgctggagaacggagccaaagtctgctctttttttaaacagcacgcacctggcggaggttcaacaacaccaggcctggaacgccagcatagccttaagaaatctcgtaaagaaaatgacatggcacagtctctgcatagcgataccgccgacgatacagcccaccgcccaggaaaatcaaatctgaagctgcccaagggcattctgaaaaagaaagtttcagcgagcgccgagggggtccaggaggatccgcccgaattgtccccgatacccgctagtcctggccaggcggcgcctctgctccctaagaaaggcatcctcaagaagccccggcagagggagagtgggtactattccagtcccgaaccaagcgaatcaggagagctcctggacgctggagacgtgtttgtgtctggggaccctaaagagcaaaaacctccacaagcatccggattgctcttacaccggaagggaatcttaaagctcaacggtaagttcagccagacagccttggaattggccgcaccaactacgtttgggtcattagatgagttagcccccccacgccccttggctcgagcatcaaggcctagcggggccgtgtccgaagattctatactctcgtctgaaagttttgaccagctggacttaccggagcggctgcctgagccaccactgagaggctgcgtgtctgtggacaacttgaccggcctggaggagcctccctcagagggtcctggctcatgcctcagaagatggagacaagaccctctgggggactcgtgcttttctctcactgattgccaggaagtgaccgcgacgtatcgacaagccctccgggtctgtagcaaactaacatag

SEQ ID NO: 220858 - DNA, 1887 bp, Artificial Sequence
  derived and/or modified sequence
atggagagcctggtgtttgcccggcgcagcggccccaccccatctgctgctgagctggcccggcccctggccgagggcctcatcaagagccccaagcccctgatgaagaagcaggccgtgaagaggcaccaccacaagcacaacctgcggcacagatatgagttcctggagaccctgggcaagggcacctacggcaaggtgaagaaggcccgggagagcagcggccgcctggtggccatcaagagcatcaggaaggacaagatcaaggatgagcaggacctgatgcacatccggcgggagattgagatcatgagcagcctgaaccacccccacatcatcgccatccacgaggtgtttgagaacagcagcaagatcgtgattgtgatggagtatgccagcagaggagacctgtatgactacatcagcgagcggcagcagctgtctgagcgggaggcccggcacttcttccggcagatcgtgtctgctgtgcactactgccaccagaacagagtggtgcaccgggacctgaagctggagaacatcctgctggatgccaacggcaacatcaagattgctgactttggcctgagcaacctgtaccaccagggcaagttcctgcagaccttctgtggcagccccctgtatgccagccctgagatcgtgaatggcaagccctacacaggccctgaggtggacagctggagcctgggcgtgctgctgtacatcctggtgcacggcaccatgccctttgatggccatgaccacaagatcctggtgaagcagatcagcaatggagcctaccgggagccccccaagcccagtgatgcctgtggcctcatccgctggctgctgatggtgaaccccacccggcgggccaccctggaggatgtggccagccactggtgggtgaactggggctacgccaccagggtgggggagcaggaggcccctcatgagggcggccaccctggcagtgacagcgcccgggcctccatggctgactggctgcggcgcagcagccggcccctgctggagaatggagccaaggtgtgcagcttcttcaagcagcacgcccctgggggcggcagcaccaccccaggcctggagcggcagcacagcctgaagaagagcaggaaagaaaatgacatggcccagagcctgcacagcgacacagcagatgacacagcccacaggcctgggaagagcaacctgaagctgcccaagggcatcctgaagaagaaggtgtctgccagcgctgagggcgtgcaggaggaccccccagagctgagccccatcccagccagccctggccaggccgcccccctgctgcccaagaagggcatcctgaagaagccccggcagcgggagagcggctactacagcagccctgagcccagcgagagcggggagctgctggatgctggagatgtgtttgtgtctggggaccccaaggagcagaagccaccccaggccagcggcctgctgctgcacaggaagggcatcctgaagctgaatggcaagttcagccagacagccctggagctggccgcccccaccaccttcggcagcctggatgagctggccccaccccggcccctggcccgggccagccggcccagcggggctgtgtctgaagattccatcctgagcagcgagagctttgaccagctggacctgcctgagcggctgcctgagccccccctgcggggctgtgtgtctgtggacaacctgaccggcctggaggagcccccatctgagggccctggcagctgcctgcggcgctggaggcaggaccccctgggggacagctgcttcagcctgacagactgccaggaggtgacagccacctaccggcaggccctgcgggtgtgcagcaagctgacctag

SEQ ID NO: 220859 - DNA, 1887 bp, Artificial Sequence
  derived and/or modified sequence
atggagagcctggtgttcgcccggcggagcggccccacccccagcgccgccgagctggcccgccctctggccgaggggttgattaaaagcccaaaaccactcatgaagaaacaggccgtcaagcgacatcatcacaagcacaacctgcgccaccggtacgaattcctggagaccctgggtaagggcacttatggcaaggtgaagaaagcacgggagtcttcaggacggctggtggctattaaaagcattcggaaggataaaataaaagacgagcaggacttgatgcatattaggcgcgaaatcgagatcatgtcttcccttaatcacccccacatcatagccatccacgaggtgttcgagaatagcagcaagatcgtaatcgtgatggagtacgcaagcaggggtgacctctacgattacatttctgaacgccagcaactgagcgagcgcgaggccagacattttttccggcagatagtcagtgcagtccactattgtcaccaaaaccgcgttgtgcaccgggatctgaagctcgaaaatatcctgcttgatgccaacggaaacatcaaaatcgccgattttggactgtcaaacctatatcatcagggaaaattccttcagaccttctgcgggagccccctgtacgccagtccagaaattgtgaacggcaagccatataccggtccagaggtagacagctggagcctgggcgtgcttctgtacatcctggtgcacggcacgatgccatttgatgggcacgaccataagatcctggtgaaacagatctctaatggcgcctatcgcgaacctcccaagcccagcgacgcttgcggacttataagatggctactgatggtcaaccccacccggcgtgcaacactcgaagacgtggcctcccattggtgggtgaattgggggtacgccactagggtgggcgaacaggaggctcctcatgaaggtggacatccaggcagtgattccgctcgcgcgtcgatggctgattggctcagaagatcttcgcgacccctactcgaaaatggcgcaaaggtttgctccttctttaagcagcacgcacctgggggcggaagtaccacacccgggctcgagcgccagcattcactgaaaaaatcaagaaaagagaacgatatggctcagagtctccacagtgacacagctgatgacacagcacacaggccaggaaagtctaacttaaagctgccaaaagggatcctgaagaaaaaagttagcgcgtcagccgaaggcgttcaggaagatccccccgagctctcacccattcctgcaagccccggacaggccgcaccactgctgccaaagaaaggaatcctgaagaagcctcgtcaaagggagtcggggtactattcgagtccagagccaagcgagtcaggcgaactgttggatgccggggatgtgtttgtatctggagatcctaaggaacagaagccgccacaagcgagtggactgttgctgcaccgtaaggggatcttgaaactgaatggcaaattctctcagacagcgttggagctggccgctcccaccaccttcggcagcctcgacgaactggctcctcccagaccacttgcccgggcatctcggcctagcggcgcagtgtccgaggactccatcttgtccagcgaatcttttgaccagctcgacctcccggaacgccttccagagcctccactgagaggatgtgtttcggtggataatctgacggggttggaggagccccctagcgaagggccgggctcctgtctacgcaggtggcggcaagacccactgggtgactcttgcttcagtctgactgactgccaggaagttactgcaacatatcggcaagccctgcgggtgtgttccaagctgacatag

SEQ ID NO: 220860 - DNA, 3405 bp, Artificial Sequence
  derived and/or modified sequence
gtgctttactgcgcgctctggtactgctgtggctccccgtcctggtgcgggacctgtgccccgcgcttcagccctccccgcacagcctactgattcccctgccgcccttgctcacctcctgctcgccatggagtcgctggttttcgcgcggcgctccggccccactccctcggccgcagagctagcccggccgctggcggaagggctgatcaagtcgcccaagcccctaatgaagaagcaggcggtgaagcggcaccaccacaagcacaacctgcggcaccgctacgagttcctggagaccctgggcaaaggcacctacgggaaggtgaagaaggcgcgggagagctcggggcgcctggtggccatcaagtcaatccggaaggacaaaatcaaagatgagcaagatctgatgcacatacggagggagattgagatcatgtcatcactcaaccaccctcacatcattgccatccatgaagtgtttgagaacagcagcaagatcgtgatcgtcatggagtatgccagccggggcgacctttatgactacatcagcgagcggcagcagctcagtgagcgcgaagctaggcatttcttccggcagatcgtctctgccgtgcactattgccatcagaacagagttgtccaccgagatctcaagctggagaacatcctcttggatgccaatgggaatatcaagattgctgacttcggtctctccaacctctaccatcaaggcaagttcctgcagacattctgtgggagccccctctatgcctcgccagagattgtcaatgggaagccctacacaggcccagaggtggacagctggtccctgggtgttctcctctacatcctggtgcatggcaccatgccctttgatgggcatgaccataagatcctagtgaaacagatcagcaacggggcctaccgggagccacctaaaccctctgatgcctgtggcctgatccggtggctgttgatggtgaaccccacccgccgggccaccctggaggatgtggccagtcactggtgggtcaactggggctacgccacccgagtgggagagcaggaggctccgcatgagggtgggcaccctggcagtgactctgcccgcgcctccatggctgactggctccggcgttcctcccgccccctcctggagaatggggccaaggtgtgcagcttcttcaagcagcatgcacctggtgggggaagcaccacccctggcctggagcgccagcattcgctcaagaagtcccgcaaggagaatgacatggcccagtctctccacagtgacacggctgatgacactgcccatcgccctggcaagagcaacctcaagctgccaaagggcattctcaagaagaaggtgtcagcctctgcagaaggggtacaggaggaccctccggagctcagcccaatccctgcgagcccagggcaggctgcccccctgctccccaagaagggcattctcaagaagccccgacagcgcgagtctggctactactcctctcccgagcccagtgaatctggggagctcttggacgcaggcgacgtgtttgtgagtggggatcccaaggagcagaagcctccgcaagcttcagggctgctcctccatcgcaaaggcatcctcaaactcaatggcaagttctcccagacagccttggagctcgcggcccccaccaccttcggctccctggatgaactcgccccacctcgccccctggcccgggccagccgaccctcaggggctgtgagcgaggacagcatcctgtcctctgagtcctttgaccagctggacttgcctgaacggctcccagagcccccactgcggggctgtgtgtctgtggacaacctcacggggcttgaggagcccccctcagagggccctggaagctgcctgaggcgctggcggcaggatcctttgggggacagctgcttttccctgacagactgccaggaggtgacagcgacctaccgacaggcactgagggtctgctcaaagctcacctgagtggagtaggcattgccccagcccggtcaggctctcagatgcagctggttgcaccccgaggggagatgccttctcccccacctcccaggacctgcatcccagctcagaaggctgagagggtttgcagtggagccctgagcagggctggatatgggaagtaggcaaatgaaatgcgccaagggttcagtgtctgtcttcagccctgctgaacgaagaggatactaaagagaggggaacgggaatgcccgcgacagagtccacattgcctgtttcttgtgtacatgggggggccacagagacctggaaagagaactctcccagggcccatctcctgcatcccatgaatactctgtacacatggtgccttctaaggacagctccttccctactcattccctgcccaagtggggccagacctctttacacacacattcccgttcctaccaaccaccagaactggatggtggcacccctaatgtgcatgaggcatcctgggaatggtctggagtaacgcttcgttatttttatttttatttttatttatttatttatttttttgagacggagtttcgctcttggtgcccaggctagagtgcaatggcgcgatctcagctcacctcaacctccgcctcccgggttcaagcgattctcctgcctcagcctccctagtagctgggattacaggcgcccgccaccatgcccggctaattttgtatttttagtagagacagggtttctccatgttggtcaggctggtctcaaactcccgacctcaggtgatccacccacctcggcctcccaaagtgctgggattacaggcgtgagccaccgcgccccacctaacccttccttatttagcctaggagtaagagaacacaatctctgtttcttcaatggttctcttcccttttccatcctccaaacctggcctgagcctcctgaagttgctgctgtgaatctgaaagacttgaaaagcctccgcctgctgtgtggacttcatctcaaggggcccagcctcctctggactccaccttggacctcagtgactcagaacttctgcctctaagctgctctaaagtccagactatggatgtgttctctaggccttcaggactctagaatgtccatatttatttttatgttcttggctttgtgttttaggaaaagtgaatcttgctgttttcaataatgtgaatgctatgttctgggaaaatccactatgacatctaagttttgtgtacagagagatatttttgcaactatttccacctcctcccacaaccccccacactccactccacactcttgagtctctttacctaatggtctctacctaatggacctccgtggccaaaaagtaccattaaaaccagaaaggtgattggaagcag

SEQ ID NO: 220861 - DNA, 1887 bp, Artificial Sequence
  derived and/or modified sequence
atggagtccttagtattcgccaggcgcagcgggcctacacctagtgctgctgaactcgcccgacctctggcggagggtttgataaagtctcccaagcctctgatgaaaaagcaggcagtgaagcgccaccaccataagcataatttacggcacagatacgagttcctcgagactctaggaaaaggcacatatggcaaagtgaagaaggcacgggaaagcagcggaagacttgttgctatcaagagcatcaggaaggataagataaaggacgaacaggacctgatgcacatccggagagagatcgagatcatgtccagcctcaaccatcctcacatcattgctatacacgaggtgtttgaaaattcgtccaaaatcgttatcgtgatggagtatgcttcacggggagacctctacgactacatctccgaaaggcagcagcttagtgaaagggaagccagacacttttttaggcaaatcgtgtccgcggtccattactgtcatcagaatcgagtggtccaccgcgatcttaagctcgagaacatattgcttgacgcaaatgggaatataaaaatcgctgatttcgggctgtctaacttgtatcaccagggaaagttccttcagacattttgtggatctcccctatacgcttctcctgagatagtgaacggtaagccctacaccgggccagaagtagattcttggtctctgggggtccttctgtacatcttggtgcatgggaccatgcctttcgacggtcatgaccacaaaatcctggtgaaacagatctcaaacggagcctatagggagcctcctaagccttcagacgcgtgtggactgatccgatggctgctgatggttaatcccacccgaagggccacgcttgaggacgtagctagccactggtgggtgaactgggggtatgctacgcgagtgggtgaacaagaagctccacacgaggggggacacccgggatccgactctgctagggcttccatggctgactggcttagacggtcatcaaggcctctcctagaaaacggagccaaggtgtgctcgttcttcaagcagcacgcaccagggggaggttctaccacacctggtcttgagcggcagcacagtttgaagaagtctcgaaaggagaatgacatggcccagagcctccattctgataccgctgacgacactgctcatcggcctggaaaatccaacctaaagctgcctaaaggaatcctcaaaaagaaagtgtccgcctcagctgagggcgtgcaggaagatccgcctgagctctcaccgataccggcaagtcccggtcaagctgcacctctgctccctaaaaagggaattctcaagaagccccgacagagagaaagtggttattacagctcacccgagccctcagagtccggggaattactggatgccggagacgtgttcgtgagcggtgatcccaaagagcagaagccaccccaagcttctggacttcttctgcatagaaaggggatcttgaagctcaatggaaagttttcacagaccgccctagaactggcagctcctaccacattcggtagcctagacgagcttgccccacccagacctctggcgagagcgtcacggccaagtggcgcagtgtctgaagatagcattttgagctccgagtccttcgatcagctcgacctgcccgagcgcctgcccgagccacccctgcgaggatgcgtcagcgtcgacaacctcaccggcctggaggaaccacccagtgaaggccctgggtcctgtctccgaagatggcgacaagacccactgggcgatagttgtttttctctgaccgattgccaagaagtaacggctacttaccgtcaggccctcagagtctgctccaaacttacatag

SEQ ID NO: 220862 - protein, 1594 aa, Artificial Sequence
  derived and/or modified sequence
MPCAQRSWLANLSVVAQLLNFGALCYGRQPQPGPVRFPDRRQEHFIKGLPEYHVVGPVRVDASGHFLSYGLHYPITSSRRKRDLDGSEDWVYYRISHEEKDLFFNLTVNQGFLSNSYIMEKRYGNLSHVKMMASSAPLCHLSGTVLQQGTRVGTAALSACHGLTGFFQLPHGDFFIEPVKKHPLVEGGYHPHIVYRRQKVPETKEPTCGLKDSVNISQKQELWREKWERHNLPSRSLSRRSISKERWVETLVVADTKMIEYHGSENVESYILTIMNMVTGLFHNPSIGNAIHIVVVRLILLEEEEQGLKIVHHAEKTLSSFCKWQKSINPKSDLNPVHHDVAVLLTRKDICAGFNRPCETLGLSHLSGMCQPHRSCNINEDSGLPLAFTIAHELGHSFGIQHDGKENDCEPVGRHPYIMSRQLQYDPTPLTWSKCSEEYITRFLDRGWGFCLDDIPKKKGLKSKVIAPGVIYDVHHQCQLQYGPNATFCQEVENVCQTLWCSVKGFCRSKLDAAADGTQCGEKKWCMAGKCITVGKKPESIPGGWGRWSPWSHCSRTCGAGVQSAERLCNNPEPKFGGKYCTGERKRYRLCNVHPCRSEAPTFRQMQCSEFDTVPYKNELYHWFPIFNPAHPCELYCRPIDGQFSEKMLDAVIDGTPCFEGGNSRNVCINGICKMVGCDYEIDSNATEDRCGVCLGDGSSCQTVRKMFKQKEGSGYVDIGLIPKGARDIRVMEIEGAGNFLAIRSEDPEKYYLNGGFIIQWNGNYKLAGTVFQYDRKGDLEKLMATGPTNESVWIQLLFQVTNPGIKYEYTIQKDGLDNDVEQQMYFWQYGHWTECSVTCGTGIRRQTAHCIKKGRGMVKATFCDPETQPNGRQKKCHEKACPPRWWAGEWEACSATCGPHGEKKRTVLCIQTMVSDEQALPPTDCQHLLKPKTLLSCNRDILCPSDWTVGNWSECSVSCGGGVRIRSVTCAKNHDEPCDVTRKPNSRALCGLQQCPSSRRVLKPNKGTISNGKNPPTLKPVPPPTSRPRMLTTPTGPESMSTSTPAISSPSPTTASKEGDLGGKQWQDSSTQPELSSRYLISTGSTSQPILTSQSLSIQPSEENVSSSDTGPTSEGGLVATTTSGSGLSSSRNPITWPVTPFYNTLTKGPEMEIHSGSGEEREQPEDKDESNPVIWTKIRVPGNDAPVESTEMPLAPPLTPDLSRESWWPPFSTVMEGLLPSQRPTTSETGTPRVEGMVTEKPANTLLPLGGDHQPEPSGKTANRNHLKLPNNMNQTKSSEPVLTEEDATSLITEGFLLNASNYKQLTNGHGSAHWIVGNWSECSTTCGLGAYWRRVECSTQMDSDCAAIQRPDPAKRCHLRPCAGWKVGNWSKCSRNCSGGFKIREIQCVDSRDHRNLRPFHCQFLAGIPPPLSMSCNPEPCEAWQVEPWSQCSRSCGGGVQERGVFCPGGLCDWTKRPTSTMSCNEHLCCHWATGNWDLCSTSCGGGFQKRTVQCVPSEGNKTEDQDQCLCDHKPRPPEFKKCNQQACKKSADLLCTKDKLSASFCQTLKAMKKCSVPTVRAECCFSCPQTHITHTQRQRRQRLLQKSKEL

SEQ ID NO: 220863 - protein, 232 aa, Artificial Sequence
  derived and/or modified sequence
MPCAQRSWLANLSVVAQLLNFGALCYGRQPQPGPVRFPDRRQEHFIKGLPEYHVVGPVRVDASGHFLSYGLHYPITSSRRKRDLDGSEDWVYYRISHEEKDLFFNLTVNQGFLSNSYIMEKRYGNLSHVKMMASSAPLCHLSGTVLQQGTRVGTAALSACHGLTGFFQLPHGDFFIEPVKKHPLVEGGYHPHIVYRRQKVPETKEPTCGLKGIVTHMSSWVEESVLFFWLFY

SEQ ID NO: 220864 - DNA, 4530 bp, Artificial Sequence
  derived and/or modified sequence
atgccatgcgcacagcgtagctggctcgctaatctgagtgtggtggcccagttacttaatttcggcgcactatgctatggccggcagcctcagccaggccccgtaaggtttcccgaccgacgccaggagcacttcattaagggtcttccggagtatcatgtggtcggcccagtgagggtggatgctagcgggcatttcctctcctacggcctccactatcctatcactagcagccgtcgcaagcgggacctcgacggatccgaggactgggtctattatcggatcagtcatgaggagaaagacctttttttcaacctcactgtcaaccaagggtttctgtccaactcatacataatggagaaacgctatggcaatctgtcccatgtgaagatgatggcgtcctctgcacccctgtgccatctgtccgggaccgttctgcagcagggaaccagggtcgggaccgccgcactctcggcttgtcacgggcttaccggattctttcagctcccacatggcgattttttcattgaaccagtcaaaaagcatcctctggtggagggggggtaccacccccatatcgtgtatagaaggcagaaagtgcccgagacaaaagaaccaacgtgcggactgaaggattcggtcaacatcagccagaagcaggaactgtggcgtgagaaatgggaacggcacaatctgccgtcaaggagcttgtcccgacgctctattagcaaagaacggtgggtagaaaccctggtcgtcgccgacactaaaatgattgaatatcacggctccgagaacgtggagagctacatactcactatcatgaacatggtgacgggactgttccacaatcctagcattggcaatgccatccatatcgtcgtcgtgcggcttatcctccttgaggaagaagagcagggcctcaagattgtccaccatgctgagaaaacactcagctctttctgtaaatggcaaaagtccataaatcccaagagtgacttgaatcctgtgcaccacgacgtagctgtgctgctcactcgcaaagacatttgcgctggctttaataggccttgcgaaaccctgggcctgtctcacctgagcggcatgtgccaaccccatcgcagctgcaatataaacgaagatagcggcttaccactcgcttttactattgcccacgaactcggccacagctttgggatccagcacgacggaaaggaaaacgactgcgaacccgtagggcgccacccctatattatgtcgcggcagctccagtacgaccccactccattaacttggtctaagtgcagtgaggagtatattaccagattcctggaccggggctggggcttttgcctggatgatatcccaaagaaaaaaggtttaaagtccaaggtgatcgccccgggagttatctacgacgttcaccatcagtgccagctccagtatggtccaaacgctacgttctgccaggaggtggagaatgtctgccagaccctctggtgtagcgtgaaaggattctgcaggtccaagttagacgccgcagccgatgggacccagtgtggagagaagaagtggtgtatggcaggtaagtgtatcacagtaggaaagaagcctgagtcgatccctgggggatgggggcggtggtcaccttggtcacattgttcccgtacctgcggggctggcgtccagtcagcagagaggctttgcaataaccccgagcctaaattcgggggcaagtactgtaccggcgagcgcaagcggtatcggctgtgcaacgttcacccctgtaggtccgaggcccctacttttcggcaaatgcagtgcagcgagttcgacacagtcccctacaaaaacgagctctaccactggttccctatattcaatccagggtacgtcgacatcgggctcatccctaaaggagccagagacataagagttatggagatagaaggcgccggaaacttcctagccatcagatctgaagatcctgagaagtattacttgaatggcggattcatcatccagtggaacggcaattacaagctagcaggaaccgtgtttcagtacgatagaaagggcgatcttgaaaaactgatggctaccggcccaacaaacgaaagcgtctggatacagttgcttttccaggtgacgaatccaggcattaaatatgaatacactatccaaaaagacggactggataatgacgtcgaacagcaaatgtacttttggcagtatggacactggaccgagtgttcagtgacatgcggtacagggattagaagacagaccgcccattgtatcaagaaaggccgtggcatggtgaaggcgacattctgcgacccggaaacccagcccaacggccgacaaaaaaagtgccatgagaaggcctgtccaccaagatggtgggctggagaatgggaagcatgctcagccacctgcggacctcacggagaaaagaaacggactgtgttatgcatccaaacgatggtaagcgatgaacaggctctgccacccactgattgccaacacctcctcaaacctaaaacgctgctgtcttgtaatcgcgacatcctgtgccccagcgactggacagttgggaattggtccgagtgttccgtctcttgtggtggcggcgttcgcatcaggtctgtcacttgcgcaaagaaccacgacgagccctgcgatgtgaccaggaagcctaactcccgggccctttgtggcctccagcagtgtccttcctccaggagggtccttaagcccaataagggaaccatttccaacgggaagaatcccccaaccctgaaacctgtccccccacccacttccaggccccgaatgcttaccactcctaccggccctgagagtatgtccacctcaacaccagctatctcctctccaagcccaacaactgccagtaaggaaggcgaccttgggggtaaacagtggcaggactcctctacccagccagagttatcctctcggtatttaatctccaccggctcaacatcacagcctattttgactagccagagcttgagcatccagccaagtgaggagaacgtgtctagctctgacaccggcccaactagtgaggggggactggttgcgactacgacctcgggctctggactttcatcttcccggaatcctataacttggcctgtgacccctttctacaacactctgaccaaaggccccgaaatggaaatccacagcgggtcaggcgaagagagggaacaacccgaagacaaggacgagtcgaatcccgttatatggactaagatcagggttccggggaacgatgcacctgttgaatcgactgagatgccgctcgcacccccacttacccctgatctgtctcgggaatcctggtggcctcccttcagcacggtgatggaaggtttgctcccctcccagagaccaactaccagtgaaaccggtacgccacgggtggagggtatggtgacggaaaaacctgccaacacactgttacctctggggggtgaccaccagcctgagccatctggcaaaactgctaataggaatcacctgaagttacccaacaacatgaatcaaacaaagtcttccgaaccagtccttacagaagaggacgcgacgtcgttaatcactgaggggttccttctgaacgcgagtaattataagcagctaaccaacgggcatggtagtgcacactggattgtcggcaattggagcgaatgcagtacaacatgtggccttggggcatactggcggagggtcgaatgtagcacacagatggattctgactgcgcggcaatccagcgccctgatccagcaaaacgctgccacctgaggccctgcgcgggatggaaagttgggaattggtctaagtgtagccgtaactgtagtggtggattcaagatccgcgaaattcagtgcgtagacagccgcgatcacagaaatttgcgaccattccactgccagttcctggctgggatcccccctcctctaagcatgtcttgcaacccggagccctgcgaggcttggcaggtggagccatggtcgcagtgcagccgctcctgtgggggcggtgttcaagagcgcggcgttttctgccctgggggtctgtgcgactggaccaaaagacctacgagcacaatgtcatgtaatgaacatctctgttgtcactgggccactggcaactgggatttgtgttcaacctcatgtggcggtgggttccagaaaagaacagtccagtgcgtgcctagtgaggggaataaaacagaggatcaggaccaatgtctctgtgaccacaaaccccgcccgccagagttcaagaaatgcaaccagcaggcctgtaagaaaagcgctgatttgctgtgtactaaagataaactctccgcctcgttttgccagactttaaaagccatgaaaaagtgttcggttccaaccgtgagagcggagtgttgtttctcctgtcctcaaacccacatcacacatacccagcggcagcgcaggcagaggctgcttcagaaatccaaagaactgtag

SEQ ID NO: 220865 - DNA, 4785 bp, Artificial Sequence
  derived and/or modified sequence
atgccgtgtgcgcagaggtcctggcttgctaatcttagcgtcgttgcccagctcctgaattttggagccctgtgctatggcaggcagccccaacctggtccagtgagattccccgatcgccgtcaggagcacttcatcaagggactcccagaatatcatgttgtcggtcctgtccgggttgatgcctctgggcacttccttagttatggcctccattacccgattacatcctcccggcggaagcgcgatctggatgggagcgaggactgggtctactacagaattagtcacgaagagaaagatttatttttcaacttgaccgtgaatcagggcttcttaagtaattcctacataatggagaagagatacggcaatctgagccatgtgaagatgatggcttcctcagcaccactctgccatctgagcggaaccgtattgcagcaggggacccgtgtagggacggctgcgctctccgcgtgccatggactgaccggtttcttccaactgccacacggcgacttcttcatagagcctgtgaaaaagcatcctctggtggaaggcgggtaccaccctcatattgtttaccggcggcagaaggtgcctgaaacgaaagagccaacttgtggactaaaggattccgtgaacatttcacagaaacaggagttgtggagagaaaagtgggaacgccataaccttccatctcgcagcctctcaaggcggtccattagcaaggagagatgggtcgagacacttgttgtggcggatactaaaatgatcgaataccatggttccgaaaatgtggaatcctacatcttaacaattatgaacatggtaacaggactttttcataacccgtccattgggaatgctatacacattgtggttgtgagacttatccttctggaagaagaggaacaggggctgaagattgtgcaccacgcagagaaaactctgagttcgttctgcaaatggcagaaaagcatcaatcctaagagcgacctcaatcctgtccaccatgacgtggccgttttattaacccgaaaggatatctgtgcaggctttaaccggccatgtgaaactctgggtctgagccatttgtccggcatgtgccaaccccaccgcagctgtaacatcaacgaggacagcggacttcccctcgcctttaccatcgcgcacgagctggggcactcgttcgggatccagcacgacggcaaggaaaacgattgcgagcccgtcggacggcacccatatattatgagcagacagcttcagtacgaccctacgcctctcacatggtccaaatgctcagaggaatatatcacccgctttctagaccgcggatggggattttgtttagacgacatcccaaaaaaaaagggacttaaatcaaaggttatcgctccaggggtcatatacgacgtgcaccatcagtgccagctgcaatacggcccgaatgcaacattttgtcaggaagtggagaacgtatgccagacactctggtgtagtgtgaaaggcttctgtagatccaagctcgatgcagctgccgacggaactcaatgtggcgaaaaaaagtggtgtatggccgggaagtgtattactgtcggcaaaaagcctgaatccattccagggggctggggccggtggtctccttggtctcattgttcccgtacctgcggggccggggtacagtctgccgagagactgtgcaacaatcctgaaccaaagttcggaggaaagtattgtacgggagaacgaaagagatatcggctttgtaatgttcatccgtgcagatctgaagcccctacatttcgccagatgcaatgctctgaatttgacactgtgccatataagaacgaactgtaccactggtttccaattttcaatcccgcacacccatgtgagctgtactgtagacctatcgacggtcagttcagtgagaaaatgctcgacgccgtgatcgatggcacaccttgcttcgagggtggcaatagcagaaacgtctgcattaacgggatttgcaaaatggtgggttgtgattacgagattgactcgaacgccactgaggaccggtgtggcgtgtgtcttggagacgggtctagctgtcagactgtaagaaagatgttcaagcagaaggagggcagcggctatgtggatataggcctgatccccaagggggcgcgtgatattagggtgatggagatcgagggggctgggaatttcctcgcaataaggtctgaggatccagaaaagtactatctgaacggtgggtttatcattcaatggaatggtaattataagctagccggaacggtgttccaatacgaccgtaaaggtgatctggaaaaactcatggctactgggcctaccaatgagagtgtgtggatccagttgttgttccaagtcacaaatcccggcataaaatacgaatacaccattcagaaggatggacttgacaacgacgtggagcagcagatgtacttttggcagtacggacactggaccgagtgctctgtgacctgcggcactggtatacggaggcagacggcgcactgtataaagaaaggccggggaatggtgaaggcgacattctgcgatccggagacccagcctaacggcagacaaaagaaatgccacgaaaaggcgtgtcccccccggtggtgggccggagaatgggaggcctgcagtgctacctgtggcccacacggggaaaagaagaggacagtgctctgcatccaaacaatggtttcagatgaacaggccctaccacctacagattgtcaacacctcctgaagcccaagacacttctatcgtgtaatcgggatattttgtgtccttccgactggacagtaggaaactggtccgaatgcagtgtatcttgtgggggaggagtgcggattcgatcagtgacatgcgcaaagaatcacgacgagccttgcgatgtgaccaggaaaccaaacagtagggctctgtgtggactgcaacagtgtcctagctctcgtagagttctgaagcccaacaaggggaccatttctaacgggaaaaatccccctacgctcaaacccgttccaccccccacatctcgaccgcgaatgcttaccacaccaaccgggcccgagtctatgtcgacttccacgcccgccatctcgagtccatcccccactactgcatctaaagaaggggatctgggtggcaagcaatggcaggatagtagcacacaacctgaactctcatccagatacctcatcagtactggaagcaccagccagcctattttgacttcccagagcttgagcatccagccatcagaggagaatgtcagttcctccgacacggggccaacctctgagggcggtcttgtggctactaccactagcggatcgggactgtcatctagtaggaatccaattacttggccagtaacacctttttacaatacgctcactaaaggacccgaaatggaaatccacagtggatccggagaggaacgagagcagcccgaggataaagacgaatcgaatcctgtgatttggacaaaaataagagtgcccggaaatgacgcacctgtggaatctactgagatgccactcgcacccccgctcacgccggacctgtccagggagtcttggtggcctcccttcagcaccgtgatggagggccttctgccttcacagcggcccaccacatcagaaacgggaacaccaagggtcgaaggcatggtgacagaaaaaccagccaataccctgctgcctcttgggggcgaccatcagccagaaccatcgggtaaaacagccaatcgcaatcatttgaagctgccaaacaacatgaaccagacaaaaagttcggaaccagtgttgacagaggaggatgcaactagcctgatcactgagggtttcttactcaacgcctccaattataaacagctaaccaatggccacggcagcgcccactggatcgtggggaactggtcagagtgctccactacatgtgggttaggcgcatactggcgccgcgtagaatgctctacacagatggatagtgattgtgcagctattcaacggcccgaccctgctaagagatgccacttgcgtccctgcgccggatggaaagtaggtaactggagcaaatgttctagaaactgctcaggggggtttaaaatcagggagatccagtgcgtggattcaagagaccacagaaatctgagaccttttcactgccagtttctggcagggattccacctccactgagcatgtcctgtaaccccgagccctgcgaagcatggcaagtggagccttggtcccagtgctcacgatcctgcggagggggcgtgcaggaacggggtgtgttctgcccagggggtctgtgcgactggacaaagaggcccacaagcaccatgtcctgcaacgagcacctatgctgtcactgggccacaggcaattgggacctttgtagcaccagttgcggaggcgggtttcaaaagcggactgtgcaatgcgtaccaagcgagggcaacaaaacagaggatcaggaccagtgcttgtgtgaccacaaacctcgtcctccagagttcaaaaaatgtaatcagcaagcatgtaagaagagtgccgatctgctttgcactaaagacaaactgtcagcttcgttttgccagaccctgaaagctatgaagaaatgcagtgtgcctacggtccgagccgaatgttgtttctcttgccctcagacccacattacgcatacacaacgacaaaggagacagagactactgcaaaagtctaaggagctgtag

SEQ ID NO: 220866 - DNA, 4530 bp, Artificial Sequence
  derived and/or modified sequence
atgccctgtgcccagaggtcctggctggccaacctgtctgtggtggcccagctgctgaactttggagccctgtgctacggccggcagccccagcccggccctgtgcgcttcccagaccggcggcaggagcacttcatcaagggcctgcctgagtaccacgtggtgggccctgtgcgggtggatgccagcggccacttcctgtcctatggcctgcactaccccatcaccagcagcaggaggaagagggacctggatggcagcgaggactgggtgtactaccgcatcagccatgaggagaaggacctcttcttcaacctgactgtgaaccagggcttcctgagcaacagctacatcatggagaagagatatggcaacctgagccacgtgaagatgatggccagcagcgcccccctgtgccacctgagcggcaccgtgctgcagcagggcaccagggtgggcacagctgccctgagcgcctgccacggcctgaccggcttcttccagctgccccatggagacttcttcatcgagcctgtgaagaagcaccccctggtggagggcggctaccacccccacatcgtgtaccgccggcagaaggtgcctgagaccaaggagcccacctgtggcctgaaggacagcgtgaacatcagccagaagcaggagctgtggagggagaagtgggagcggcacaacctgcccagccgcagcctgagcagaagaagcatcagcaaggagcgctgggtggagaccctggtggtggccgacaccaagatgattgagtaccacggctctgaaaatgtggagagctacatcctgaccatcatgaacatggtgacaggcctcttccacaaccccagcattggaaatgccatccacatcgtggtggtgcggctcatcctgctggaggaggaggagcagggcctgaagatcgtgcaccacgccgagaagaccctgagcagcttctgcaagtggcagaagagcatcaaccccaagagtgacctgaaccctgtgcaccatgatgtggccgtgctgctgaccaggaaggacatctgtgccggcttcaaccggccctgtgagaccctgggcctgagccacctgagcggcatgtgccagccccacaggagctgcaacatcaatgaagacagcggcctgcccctggccttcaccatcgcccacgagctgggccacagctttggcatccagcatgatggcaaggaaaatgactgtgagcctgtgggccgccacccctacatcatgagccggcagctgcagtatgaccccacccccctgacctggagcaagtgcagcgaggagtacatcacccgcttcctggaccggggctggggcttctgcctggatgacatccccaagaagaagggcctgaagagcaaggtgattgcccctggggtcatctatgatgtgcaccaccagtgccagctgcagtatggccccaatgccaccttctgccaggaggtggagaatgtgtgccagaccctgtggtgcagcgtgaagggcttctgccgcagcaagctggatgctgctgctgatggcacccagtgtggggagaagaagtggtgcatggccggcaagtgcatcaccgtgggcaagaagccagagagcatccctgggggctggggccgctggagcccctggagccactgcagcaggacctgtggggccggcgtgcagagcgctgagcggctgtgcaacaaccctgagcccaagtttggaggcaagtactgcaccggggagaggaagcgctaccgcctgtgcaatgtgcacccctgccgctctgaggcccccaccttccggcagatgcagtgcagcgagtttgacacagtgccctacaagaatgagctgtaccactggttccccatcttcaaccctggctacgtggacatcggcctcatccccaagggggcccgggacatccgggtgatggagattgaaggagctggcaacttcctggccatccgctcagaagatcctgagaagtactacctgaatggaggcttcatcatccagtggaatggaaactacaagctggccggcaccgtcttccagtatgacaggaagggggacctggagaagctgatggccaccggccccaccaatgaatctgtgtggatccagctgctcttccaggtgaccaaccctggcatcaagtatgagtacaccatccagaaggatggcctggacaatgatgtggagcagcagatgtacttctggcagtatggccactggacagagtgcagcgtgacctgtggcaccggcatccggcggcagacagcccactgcatcaagaagggccggggcatggtgaaggccaccttctgtgaccctgagacccagcccaacggccggcagaagaagtgccacgagaaggcctgccccccacgctggtgggccggggagtgggaggcctgcagcgccacctgtggcccccacggggagaagaagaggacagtgctgtgcatccagaccatggtgtctgatgagcaggccctgcccccaacagactgccagcacctgctgaagcccaagaccctgctgagctgcaacagagacatcctgtgccccagcgactggacagtgggcaactggagcgagtgcagcgtgtcctgtggcggcggcgtgcgcatccgctctgtgacctgtgccaagaaccatgatgagccctgtgatgtgaccaggaagcccaacagccgggccctgtgtggcctgcagcagtgccccagcagcagaagagtgctgaagcccaacaagggcaccatcagcaatggcaagaacccccccaccctgaagcctgtgcccccacccaccagccggcccaggatgctgaccacccccactggacctgagagcatgagcaccagcaccccagccatcagcagccccagccccaccacagccagcaaggagggggacctgggcggcaagcagtggcaggacagcagcacccagcctgagctgagcagccgctacctgatcagcacaggcagcaccagccagcccatcctgaccagccagagcctgagcatccagcccagtgaagaaaatgtgagcagcagtgacaccggccccaccagcgagggcggcctggtggccaccaccaccagcggcagcggcctgagcagcagcaggaaccccatcacctggcctgtgacccccttctacaacaccctgaccaagggccctgagatggagatccacagcggcagcggggaggagcgggagcagcctgaggacaaggatgagagcaaccctgtgatctggaccaagatccgggtgcctggaaatgatgcccctgtggagagcacagagatgcccctggccccacccctgaccccagacctgagccgggagagctggtggccacccttcagcacagtgatggagggcctgctgcccagccagaggcccaccaccagcgagaccggcaccccccgggtggagggcatggtgacagagaagccagccaacaccctgctgcccctgggcggggaccaccagcctgagcccagcggcaagacagccaacagaaaccacctgaagctgcccaacaacatgaaccagaccaagagcagcgagcctgtgctgacagaagaagatgccaccagcctcatcacagagggcttcctgctgaatgccagcaactacaagcagctgaccaatggacatggcagcgcccactggatcgtgggcaactggagcgaatgttccaccacctgtggcctgggcgcctactggaggagagtggagtgcagcacccagatggacagcgactgtgccgccatccagaggccagaccctgccaagcgctgccacctgcggccctgtgccggctggaaggtgggcaactggagcaagtgcagcaggaactgcagcggcggcttcaagatccgggagatccagtgtgtggacagccgggaccacaggaacctgcggcccttccactgccagttcctggccggcatccccccacccctgtccatgagctgcaaccctgagccctgtgaggcctggcaggtggagccctggagccagtgcagccgcagctgtggcggcggcgtgcaggagcggggcgtcttctgccctgggggcctgtgtgactggaccaagaggcccaccagcaccatgagctgcaatgagcacctgtgctgccactgggccaccggcaactgggacctgtgcagcaccagctgtggcggcggcttccagaagaggacagtgcagtgtgtgcccagcgagggcaacaagacagaggaccaggaccagtgcctgtgtgaccacaagcccaggcctcctgagttcaagaagtgcaaccagcaggcctgcaagaagtctgctgacctgctgtgcaccaaggacaagctgagcgccagcttctgccagaccctgaaggccatgaagaagtgcagcgtgcccaccgtgcgggcagagtgctgcttcagctgcccccagacccacatcacccacacccagaggcagaggcggcagaggctgctgcagaagagcaaggagctgtag

SEQ ID NO: 220867 - DNA, 4785 bp, Artificial Sequence
  derived and/or modified sequence
atgccctgtgcccagaggtcctggctggccaacctgtctgtggtggcccagctgctgaactttggagccctgtgctacggccggcagccccagcccggccctgtgcgcttcccagaccggcggcaggagcacttcatcaagggcctgcctgagtaccacgtggtgggccctgtgcgggtggatgccagcggccacttcctgtcctatggcctgcactaccccatcaccagcagcaggaggaagagggacctggatggcagcgaggactgggtgtactaccgcatcagccatgaggagaaggacctcttcttcaacctgactgtgaaccagggcttcctgagcaacagctacatcatggagaagagatatggcaacctgagccacgtgaagatgatggccagcagcgcccccctgtgccacctgagcggcaccgtgctgcagcagggcaccagggtgggcacagctgccctgagcgcctgccacggcctgaccggcttcttccagctgccccatggagacttcttcatcgagcctgtgaagaagcaccccctggtggagggcggctaccacccccacatcgtgtaccgccggcagaaggtgcctgagaccaaggagcccacctgtggcctgaaggacagcgtgaacatcagccagaagcaggagctgtggagggagaagtgggagcggcacaacctgcccagccgcagcctgagcagaagaagcatcagcaaggagcgctgggtggagaccctggtggtggccgacaccaagatgattgagtaccacggctctgaaaatgtggagagctacatcctgaccatcatgaacatggtgacaggcctcttccacaaccccagcattggaaatgccatccacatcgtggtggtgcggctcatcctgctggaggaggaggagcagggcctgaagatcgtgcaccacgccgagaagaccctgagcagcttctgcaagtggcagaagagcatcaaccccaagagtgacctgaaccctgtgcaccatgatgtggccgtgctgctgaccaggaaggacatctgtgccggcttcaaccggccctgtgagaccctgggcctgagccacctgagcggcatgtgccagccccacaggagctgcaacatcaatgaagacagcggcctgcccctggccttcaccatcgcccacgagctgggccacagctttggcatccagcatgatggcaaggaaaatgactgtgagcctgtgggccgccacccctacatcatgagccggcagctgcagtatgaccccacccccctgacctggagcaagtgcagcgaggagtacatcacccgcttcctggaccggggctggggcttctgcctggatgacatccccaagaagaagggcctgaagagcaaggtgattgcccctggggtcatctatgatgtgcaccaccagtgccagctgcagtatggccccaatgccaccttctgccaggaggtggagaatgtgtgccagaccctgtggtgcagcgtgaagggcttctgccgcagcaagctggatgctgctgctgatggcacccagtgtggggagaagaagtggtgcatggccggcaagtgcatcaccgtgggcaagaagccagagagcatccctgggggctggggccgctggagcccctggagccactgcagcaggacctgtggggccggcgtgcagagcgctgagcggctgtgcaacaaccctgagcccaagtttggaggcaagtactgcaccggggagaggaagcgctaccgcctgtgcaatgtgcacccctgccgctctgaggcccccaccttccggcagatgcagtgcagcgagtttgacacagtgccctacaagaatgagctgtaccactggttccccatcttcaacccagcccacccctgtgagctgtactgccggcccattgatggccagttcagcgagaagatgctggatgctgtgattgatggcaccccctgctttgaaggaggcaacagcagaaatgtgtgcatcaatggcatctgcaagatggtgggctgtgactatgaaattgacagcaatgccacagaggacagatgtggggtgtgcctgggagatggcagcagctgccagacagtgaggaagatgttcaagcagaaggagggcagcggctacgtggacatcggcctcatccccaagggggcccgggacatccgggtgatggagattgagggcgccggcaacttcctggccatccgctctgaggaccctgagaagtactacctgaatggaggcttcatcatccagtggaatggaaactacaagctggccggcaccgtcttccagtatgacagaaaaggagacctggagaagctgatggccaccggccccaccaatgaatctgtgtggatccagctgctcttccaggtgaccaaccctggcatcaagtatgagtacaccatccagaaggatggcctggacaatgatgtggagcagcagatgtacttctggcagtatggccactggacagaatgttctgtgacctgtggcaccggcatccggcggcagacagcccactgcatcaagaagggccggggcatggtgaaggccaccttctgtgaccctgagacccagcccaacggccggcagaagaagtgccacgagaaggcctgccccccacgctggtgggccggggagtgggaggcctgcagcgccacctgtggcccccatggagagaagaagaggacagtgctgtgcatccagaccatggtgtctgatgagcaggccctgcccccaacagactgccagcacctgctgaagcccaagaccctgctgagctgcaacagagacatcctgtgccccagcgactggacagtgggcaactggagcgaatgttctgtgtcctgtggcggcggcgtgcgcatccgctctgtgacctgtgccaagaaccatgatgagccctgtgatgtgaccaggaagcccaacagccgggccctgtgtggcctgcagcagtgccccagcagccggcgggtgctgaagcccaacaagggcaccatcagcaatggcaagaacccccccaccctgaagcctgtgcccccacccaccagccggcccaggatgctgaccacccccaccggccctgagagcatgagcaccagcaccccagccatcagcagccccagccccaccacagccagcaaggagggggacctgggcggcaagcagtggcaggacagcagcacccagcctgagctgagcagccgctacctgatcagcacaggcagcaccagccagcccatcctgaccagccagagcctgagcatccagcccagcgaggagaatgtgagcagcagtgacaccggccccaccagcgagggcggcctggtggccaccaccaccagcggcagcggcctgagcagcagcaggaaccccatcacctggcctgtgacccccttctacaacaccctgaccaagggccctgagatggagatccacagcggcagcggggaggagcgggagcagcctgaggacaaggatgagagcaaccctgtgatctggaccaagatccgggtgcctggaaatgatgcccctgtggagagcacagagatgcccctggccccacccctgaccccagacctgagccgggagagctggtggccacccttcagcacagtgatggagggcctgctgcccagccagaggcccaccaccagcgagaccggcaccccccgggtggagggcatggtgacagagaagccagccaacaccctgctgcccctgggcggggaccaccagcctgagcccagcggcaagacagccaacagaaaccacctgaagctgcccaacaacatgaaccagaccaagagcagcgagcctgtgctgacagaggaggatgccaccagcctcatcacagagggcttcctgctgaatgccagcaactacaagcagctgaccaacggccacggcagcgcccactggatcgtgggcaactggagcgagtgcagcaccacctgtggcctgggcgcctactggaggagagtggagtgcagcacccagatggacagcgactgtgccgccatccagaggccagaccctgccaagcgctgccacctgcggccctgtgccggctggaaggtgggcaactggagcaagtgcagcaggaactgcagcggcggcttcaagatccgggagatccagtgtgtggacagccgggaccacaggaacctgcggcccttccactgccagttcctggccggcatccccccacccctgtccatgagctgcaaccctgagccctgtgaggcctggcaggtggagccctggagccagtgcagccgcagctgtggcggcggcgtgcaggagcggggcgtcttctgccctgggggcctgtgtgactggaccaagaggcccaccagcaccatgagctgcaatgagcacctgtgctgccactgggccactggaaactgggacctgtgcagcaccagctgtggcggcggcttccagaagaggacagtgcagtgtgtgcccagcgagggcaacaagacagaggaccaggaccagtgcctgtgtgaccacaagccccggcccccagagttcaagaagtgcaaccagcaggcctgcaagaagtctgctgacctgctgtgcaccaaggacaagctgagcgccagcttctgccagaccctgaaggccatgaagaagtgcagcgtgcccaccgtgcgggcagagtgctgcttcagctgcccccagacccacatcacccacacccagaggcagaggcggcagaggctgctgcagaagagcaaggagctgtag

SEQ ID NO: 220868 - DNA, 4530 bp, Artificial Sequence
  derived and/or modified sequence
atgccctgcgcccagcggagctggctggccaacctgagcgtggtggctcaactgctgaactttggggctctgtgctatggccgccagccacagccgggacccgttcgcttcccagacagacgtcaggagcattttataaaagggctgcccgagtaccacgtcgttggccccgtgcgagtggacgctagcggccattttctatcatacggcctacattacccaatcaccagctcgcggaggaaacgggacctggacggatcagaagattgggtgtactatcgtatttctcatgaagagaaggatctgttctttaatctgacggtgaatcagggcttcctaagtaattcttacattatggaaaagagatacggtaatctcagccatgttaagatgatggcgtcatcagcccctctgtgccatctctccggaacggtcctgcagcaggggactcgcgtcggcactgccgctctcagcgcttgccatggacttacaggattttttcaactgccccatggagactttttcatcgaacccgtgaagaagcacccactggtggagggaggataccaccctcacatcgtatataggagacagaaggtgcctgagaccaaggaaccaacttgtggactgaaggattctgttaacatatctcagaagcaggaactgtggagggagaagtgggagcggcacaacctcccttctaggagtttgtcccgccgcagcatttccaaggagaggtgggtggaaacgctggtcgtagccgacacaaagatgatagaataccacggttctgaaaatgtggaaagttatatattgacaatcatgaatatggtgactggtctgttccacaatcctagtattgggaatgccatccacatcgtagtcgtgagactgatactgttagaggaggaagaacagggccttaaaatagttcatcacgccgagaaaactctgtcatccttctgcaagtggcagaagagcatcaaccctaagagcgacttgaaccccgttcaccatgatgtggccgtgctgcttacccggaaggatatttgcgccggctttaaccgaccctgtgaaaccctggggctgtctcaccttagtggaatgtgccagccccatcgatcgtgtaatatcaacgaggactccggcctgcctctcgcctttacaattgcacacgagctgggccacagtttcggaatccagcatgatggcaaagagaatgattgcgagcctgtgggacgtcatccgtatatcatgtcacgccagctgcagtacgatccaacgcccctgacctggtcaaagtgctcagaagagtatataacacggttcctggaccgcggatggggcttctgtctggacgatatccccaagaaaaagggactcaaaagcaaggtgattgcccccggcgttatttatgacgtccaccaccagtgccaactccaatacggacccaacgccactttctgccaagaagttgagaatgtttgccagactctgtggtgtagtgttaaggggttctgtcgttcgaagttagacgccgctgcagatgggacccagtgcggggagaaaaaatggtgtatggcgggtaaatgtatcactgtgggcaaaaaacctgaatccatccctgggggttggggtcgatggtctccgtggtcacactgcagcagaacctgtggcgcgggcgttcaatctgcagagagactttgtaacaacccagaacctaagttcggagggaaatactgcactggcgagcgtaaaaggtatcgactttgcaatgttcacccatgccgctccgaagccccaacgttccggcagatgcagtgttcagagttcgataccgtgccgtataaaaacgagctgtaccactggtttcccattttcaacccaggatatgttgacattggtctaatccctaaaggagcacgagacattagggtgatggagattgaaggcgctgggaactttcttgctatacggagcgaagaccccgagaagtattatctcaacggaggctttataatacaatggaatggcaattataagctggctggaactgttttccagtacgatagaaaaggagacctggagaaactgatggccaccgggcccactaacgaaagtgtgtggatccagcttctgttccaagttactaatccagggatcaagtacgaatacacaatccaaaaggacgggttggataacgacgttgagcagcagatgtatttttggcaatatggacattggaccgagtgttctgtgacatgcggaaccggaattaggaggcagacagctcattgtataaagaagggacgtgggatggtgaaggcgacattctgtgatcctgaaactcagcctaatggccgccagaagaaatgtcatgagaaagcctgccctccaaggtggtgggcaggggaatgggaagcttgttccgctacctgcggcccccacggggaaaaaaagaggaccgtcctctgcatacagactatggtttctgacgaacaggccctgcccccgactgactgtcagcacctgctgaagcccaagacactgctgtcctgtaacagagatatactgtgcccgtcagattggaccgtgggaaactggtccgagtgtagcgtctcctgcggcgggggagtgcggattaggagcgtcacttgcgccaaaaaccatgatgagccgtgcgatgtgactagaaaaccaaactcacgtgccctttgcggcctacagcagtgcccgtctagtagaagagtgctcaaaccaaataaaggcaccatcagcaatggcaagaatcctccaacattgaaacccgtccccccccccacatcccgcccgagaatgctgacgaccccaacaggtcccgaatctatgagcacatcgactccagcaataagctcaccctcccctactactgctagtaaggagggagatctgggcggcaaacagtggcaggatagcagcacacagcccgagttgtccagtcgttacctcatatctactggttccacaagccaacccatcctcacatcccagtccctttctatacaaccatccgaagagaatgtgtcgagctccgacaccggacctacctctgaagggggcctggtcgcaacgacgactagcggatctgggctgagttcatctcgcaatccgatcacttggccagtgacacctttctacaataccctgaccaagggcccggaaatggaaatacatagtggctctggggaggagcgcgagcagccagaagataaggacgaaagcaaccctgtcatctggacaaagatcagggtcccagggaacgatgcccctgtagagtccactgaaatgccactggcaccccccctaactccggacttgtctcgtgaatcatggtggccccccttttccactgttatggaaggactccttccctctcagcgcccaaccacctccgaaaccgggactccccgcgtcgaaggcatggtgaccgagaaaccagccaatactctcctgcccttgggcggggatcatcaacctgagcccagtggcaaaaccgccaatcgaaaccacctcaagttaccaaataatatgaaccaaactaaaagttccgagcccgtgctgaccgaggaagacgcaacgtccctaattaccgaaggattcctgctgaacgcctccaattacaagcagctcactaatgggcatggatctgcacactggattgtcgggaattggtcagaatgctcgaccacctgcggactgggagcttactggaggcgggtcgaatgttccacacagatggactctgattgtgctgctatccagcggcctgaccccgccaagcggtgtcacttaagaccttgtgcgggctggaaagtgggaaattggagcaagtgttccaggaactgcagcgggggatttaaaatccgtgagatccagtgcgtggacagcagggaccaccgtaatctgaggcccttccactgtcagttcctcgcaggcattccacctcccttgtccatgtcttgcaaccccgagccctgtgaggcctggcaagtggaaccatggtctcaatgctcccggagctgcggcgggggcgtccaggagcgcggcgtcttttgtccaggggggctttgcgattggaccaaaagacccacttccaccatgtcctgcaatgagcatctctgctgtcattgggccaccggaaactgggatctctgcagcaccagctgcgggggaggatttcagaagaggacagtgcagtgcgtgccctccgagggcaacaaaacagaagaccaggatcagtgcttgtgcgaccacaagcctcggcctcctgaatttaagaaatgtaaccaacaggcatgcaagaagtcagctgacctgctctgtacaaaagacaagttgagtgccagcttttgtcagacattgaaggccatgaagaagtgttcggtgcccaccgtacgggcagagtgttgctttagctgcccccagactcacattactcacacgcagcggcaaaggagacagagactgctccagaagtctaaagaactatag

SEQ ID NO: 220869 - DNA, 4785 bp, Artificial Sequence
  derived and/or modified sequence
atgccctgcgcccagcggagctggctggccaacctgagcgtggtggctcagctgctcaattttggagctctgtgttacgggaggcaaccccagcctggcccggttcgattcccggatcgccgccaggaacatttcattaagggcctgcctgaatatcatgtagtgggcccagtccgagtcgacgcttctgggcactttctgtcctacggtctccactaccctattacgtcaagccgcagaaagagggatctggacggatctgaggattgggtgtactatcgcatctcacacgaggagaaggacctgttttttaatctaaccgttaatcagggctttctgtctaattcgtatatcatggaaaagcgctatggaaacttatctcatgtcaagatgatggcctcaagcgcccctctttgtcacctgagcgggacagtgctgcagcaggggacccgagtagggaccgccgccctctcagcctgtcacggcttgactgggttttttcagctcccacacggagacttcttcatcgagcctgtgaagaaacaccccctggtggagggcgggtaccatccgcatatagtatacagaaggcaaaaggtgcccgagactaaagagccaacctgcgggctgaaggacagcgtcaatatctcccagaaacaggaactgtggcgcgagaaatgggagagacacaacctcccttcccggtctctgtcccggcggtccattagcaaggagcgatgggtcgagacactcgttgtagcagacacgaaaatgatcgagtaccacggcagtgagaacgtggaatcatatatccttacgattatgaatatggtgaccgggctgtttcataatccctctatcgggaacgcgatacacattgtggtagtgcgcctgatcctgctggaagaagaggaacaaggactgaagattgtgcatcacgcagaaaaaaccctcagttcattttgtaagtggcagaagagtataaaccccaagtcggatttgaatcctgtgcatcatgatgtggcagttctgctcactagaaaggatatatgcgctggctttaaccggccgtgtgaaacactaggtctcagtcatctatctggcatgtgccagccccataggagttgtaatatcaacgaggacagtggcctgccattggccttcaccatagcacatgagctaggtcattcttttggcatccagcacgacggaaaggaaaacgactgtgaacccgtcggaaggcatccatacatcatgagccgtcagttacaatatgatcccacccctttaacatggtcgaagtgcagcgaggagtacattacacggttcctcgatagaggctggggcttttgcctcgatgacatcccaaagaagaaaggcttaaagagcaaggtgattgcaccgggagtgatatacgacgtacaccaccagtgccagctccagtatgggcccaatgccactttctgccaggaggtggagaatgtttgccagactctgtggtgcagtgtgaagggcttctgtagatcaaagctggatgcagcagcagatggtacacagtgcggggaaaaaaaatggtgtatggccggaaaatgtatcactgtgggaaaaaaacctgagagcatccccgggggatggggccggtggtcaccttggtctcattgctccaggacttgcggcgcaggagtacagagtgctgagaggttgtgcaacaatcctgagcctaagttcggaggtaaatactgcactggggagcggaagcgatacagactttgcaacgtgcatccttgcagatccgaggcacctacattccggcagatgcaatgttccgagtttgataccgttccctataagaacgagctgtatcactggtttcccatctttaaccctgcacacccctgcgagctgtattgtagaccaattgacggacagttcagcgaaaagatgctcgatgcagtaatcgacggcacaccctgctttgaaggcggaaactccaggaatgtttgcataaacggaatttgtaagatggtggggtgtgactacgaaatagactcgaatgcaacagaggatcgatgcggggtgtgtctgggggatggcagcagttgccaaaccgtgcgaaagatgtttaagcagaaagaaggctcggggtacgtggacattggactgattcccaagggggcaagggacatcagagttatggagattgagggggcaggaaacttcttggccattcggtcagaggacccagagaagtactacctcaatggcgggttcattattcagtggaatggaaattacaagctggccggcaccgtgtttcagtatgacaggaaaggcgatttggaaaaactgatggctactggacctactaacgaatccgtttggatccaattgctctttcaggtaacgaatcctggcattaaatatgaatatactatccaaaaggacgggctggataacgatgtcgagcagcagatgtacttttggcagtacggtcactggacagagtgttctgttacttgcggaactggaatccggcgccagactgcacactgtattaagaaaggccgggggatggtgaaggcaaccttctgcgaccccgagactcaacctaacggaagacaaaaaaagtgtcacgagaaggcgtgtccccctcggtggtgggctggagaatgggaggcttgttcagcaacttgcgggccacacggtgagaagaaacggactgttctttgcatacagactatggtttctgacgaacaggcactgcccccgaccgactgccagcacctccttaaacctaagacccttctgtcatgtaatagggacattttatgtccatcagactggaccgtgggaaactggagcgaatgtagtgtgagctgcggagggggtgttagaattcgctccgtgacctgtgccaaaaaccatgacgaaccatgtgatgttacccggaaaccaaattctagagctttatgtgggcttcagcagtgcccttcctctcggcgagtcttaaagcctaataagggaaccatctcaaacggcaagaacccccccacgctcaagcctgtgccaccaccgacgtcaagaccccgcatgctaaccactccaaccggaccagagagcatgtctacttctacaccagccatttcctccccgtctcctacaaccgcatctaaggaaggagacctcgggggtaaacagtggcaggattctagtacgcaacccgagctcagctctcggtatctgatttctaccggtagcacctctcaacccattctgacttcacagagcctgtctatccagccgagcgaagagaatgtctcttccagtgacactggcccaactagtgaagggggtttagtcgccacaaccacctcaggctccggactgagctcaagcagaaacccgattacctggcccgttacacctttttacaacacgctgactaaagggcccgaaatggaaatacactctggcagcggcgaggaacgagaacagcctgaggataaggatgaatcgaatcctgttatttggaccaagatccgagtgcccgggaacgatgcaccagttgaatccacagagatgccactggctcctcccctcacccccgatctgtctagagaaagctggtggcctccgttctccactgtgatggaggggcttctgccatcacaacggcccaccactagcgagactgggaccccccgggtcgagggaatggtgacagagaaacctgccaacacgctcctcccccttggtggagatcatcagcctgaaccctcaggtaaaaccgcgaataggaatcacctgaagctgcctaacaacatgaatcaaacaaaaagcagtgaaccggtgttaacagaagaggatgctacatccctcataacagagggctttctcctaaatgcttcaaattataaacagctaacaaacggtcacggatctgctcactggatagttggcaactggagcgagtgctccacgacatgtgggctgggagcttactggagaagagtggaatgctctacccaaatggacagtgactgtgcagctatccagcgtccagatcccgctaagaggtgtcacttaaggccatgcgccggctggaaagttggaaattggtcgaagtgctctcggaattgttctggcggatttaaaatacgagagattcaatgcgtcgactcccgcgatcacaggaatctcaggccctttcattgccagttcctggctggcatccctccgcccctcagcatgtcctgtaaccccgagccctgcgaggcatggcaggtcgagccctggagccagtgctcaaggtcctgcggtgggggcgtccaggaacgaggggtgttttgccctggaggcctgtgtgattggacgaaacgtccgacaagcaccatgtcctgcaacgaacacctttgttgccactgggcgacaggcaattgggacctttgctcaacaagctgcggcggcggattccagaagagaactgtgcagtgcgtgccctccgagggaaacaagacagaggaccaggaccagtgtttgtgcgatcacaagccacggcccccagaattcaagaagtgcaatcagcaagcttgcaagaaatctgccgacctgttgtgtacaaaagacaagctatctgcgtctttctgccaaactctgaaagccatgaagaagtgttcagtcccgactgtgagagcagagtgttgttttagttgcccacagacccatattacccatacacagcggcagcgcagacagaggttacttcagaagtcgaaagagttatag

SEQ ID NO: 220870 - DNA, 4530 bp, Artificial Sequence
  derived and/or modified sequence
atgccatgtgctcaacggagctggctggccaacctgagcgttgtggcccagttactcaatttcggtgcgctgtgctatggcaggcagcctcagcccggaccagtgcgttttccagaccgccgacaagagcattttattaagggcctcccagaatatcacgtggtcggcccagtgcgcgtcgacgcctcaggccacttcctgtcctacggtctgcactatcctatcacttcctcaaggcggaagcgcgacctcgatggatccgaagattgggtgtattaccgcatatctcacgaagaaaaagatctcttcttcaatctgacagtgaatcaggggttcctgagcaactcttacataatggagaaaaggtacggcaatctttcccacgtgaagatgatggccagctccgcacccctgtgtcatctcagtggcacagtgctgcagcaaggtacaagagtgggcacagctgcactcagcgcttgtcacggcctgactggcttcttccaactcccccatggcgatttcttcattgagccggtcaagaagcaccctctggtcgagggcggatatcacccccatatcgtgtataggagacagaaggtgccagagaccaaggagccgacctgcggcctgaaagattctgttaacatttcacagaagcaggaattgtggagggaaaagtgggagaggcacaacctgccctcccggagtctttctaggaggtctatctccaaggagaggtgggtggagacgttggtcgtagcagatacaaaaatgattgagtaccacggctccgaaaatgttgaatcatacattctgactattatgaacatggtgactggcctgttccataatcccagtatcgggaatgctattcatatcgtggtggtgcgattgatactcctcgaggaagaggagcagggattgaagatcgtgcaccacgcagaaaaaaccctgtccagcttctgcaaatggcaaaaatctatcaatccaaagagtgatctgaacccggtgcaccacgacgtggccgttctgctcacccgcaaggacatttgtgccggatttaacaggccctgtgagacgctggggctctcacatctgtccgggatgtgccaaccccacaggagctgtaatataaacgaggatagcggcctcccattagcctttaccattgcacatgagctgggccattcattcggaattcagcatgatgggaaggagaacgattgcgaaccagtgggaagacatccatatatcatgtccagacagcttcaatacgaccccacacctctgacttggtccaagtgctcagaggaatacatcactcgcttcttggatcgagggtggggcttctgcctggacgacatccccaagaaaaaagggctgaaaagcaaagttatcgctcccggtgttatctacgacgtgcatcaccaatgccagttgcaatatgggcctaacgcaaccttctgccaagaggtggaaaacgtgtgccagactctgtggtgctccgttaaaggcttctgcagaagcaagctggacgcagctgcggatgggacccagtgcggagagaagaaatggtgtatggcgggtaaatgcattacagtaggaaagaagccagaatctattcctgggggttggggacgctggagcccttggtctcactgctccagaacttgcggagccggagtgcagtctgccgagaggctctgtaataatcccgagcctaaattcgggggtaagtattgcacgggggagcgaaaaaggtaccgcttatgtaacgtgcacccatgtagatccgaggctccaacattccgtcagatgcagtgcagcgaatttgacactgtcccatacaagaacgaattgtaccattggtttcccattttcaatcccggatatgttgacattggcctgatacccaagggagcgagggatattcgcgtcatggagatagagggcgctggcaacttcctggccattcgttcagaggatcctgagaaatactacctcaatggcggttttataattcagtggaacggaaactacaaactggctggtacggtgtttcagtatgatcggaagggggatctagagaagctgatggctactggacctacaaacgagtcagtctggatccagctgcttttccaagtaaccaatcccggaatcaagtacgagtacaccattcaaaaggacggtctggacaacgatgtggagcagcagatgtacttctggcaatacggccactggaccgaatgctctgtgacttgcggcactggaatccggcgacagaccgcccactgtattaaaaaaggtcgtggcatggtgaaagctacattttgtgatccagagacacagccaaatgggaggcagaaaaagtgccacgagaaggcgtgcccgccacgctggtgggctggggagtgggaggcttgttccgctacctgtggcccacatggggaaaaaaaaagaacggttttgtgcattcagacaatggtgtccgacgagcaggcactgcctcctacggactgccagcatctgctcaagcctaaaacattactctcttgcaatagagatattttgtgcccatctgactggactgtggggaactggtccgagtgctccgtgtcatgtgggggtggggtgaggattcgctctgtcacatgcgctaagaaccacgacgagccatgcgatgtcaccaggaagcccaattctcgcgcattgtgcggcctccagcagtgcccttccagcaggcgggtgttgaagcccaataaaggcacaataagcaacggaaaaaatcccccaactctcaagccagtgccccctcctacctccaggcccaggatgttgaccacccctacaggaccggagagtatgtctacctccaccccagctatatccagtccctcgcccaccaccgctagcaaggagggcgacctcggagggaagcagtggcaggactcgtccacccagccggagcttagtagcaggtatttgatctctactggttccacaagccaaccaatactgacctcccagtccttaagcattcaaccatcagaggagaacgtaagcagttcggacacaggtcctacatccgagggcggtctggtggccaccaccactagtggctcaggcctgagttctagcagaaatcctatcacctggccagtgacccctttctataataccctgaccaagggacctgaaatggagattcattccgggtccggggaagagcgtgagcaaccagaagataaagatgaaagtaatcccgtaatttggacaaaaatccgcgtgccaggcaacgacgcacccgtggagtccacagagatgccactcgctccgccattgaccccagatttgagccgtgagtcctggtggcccccattcagcacagtgatggagggactgctgcccagccagcggccaacaacttcagaaactgggacccccagagtggagggcatggtgacagagaagcctgccaataccttattgccgctgggcggagaccaccaacctgagccttcagggaagacggctaaccggaaccatctgaagttaccaaacaacatgaatcaaaccaagagttcagaacccgtcctgaccgaggaagatgctacaagtcttattaccgagggctttttgctaaacgcaagcaactataagcagctgacgaacggacatggatcagcccactggatcgtgggcaactggtcagaatgctccacgacctgtggattgggcgcttactggcggcgtgtcgaatgttccacacagatggattctgactgtgccgcaattcagaggccagaccctgcaaagaggtgtcaccttaggccttgcgccggatggaaagtaggcaactggtccaagtgttcccggaactgttctggtggattcaaaatccgtgagatccagtgcgtggactctcgcgaccatcgtaaccttcggccattccattgccagtttctggccggtattcctccgcctttgtccatgtcttgtaatcccgagccgtgcgaggcgtggcaggtggagccttggtcccagtgctcacgcagttgtggagggggagtgcaggagcgcggagtgttctgtccgggaggcctgtgcgattggactaagcggccaacgtctacaatgtcatgcaacgagcacctgtgttgccattgggcaacagggaactgggacctttgctccacatcctgtggcggagggttccagaagaggactgtccaatgcgtccccagtgaggggaataagacagaggaccaggaccagtgcttgtgtgaccacaaaccacggcctccagagtttaagaaatgtaatcagcaggcctgcaagaagtcagccgatctcctgtgtactaaggacaagctttccgcctctttctgtcaaactctcaaagctatgaaaaaatgcagtgtgcccacagttagggctgagtgttgcttcagctgtccccagacacacatcactcatacacagagacagcgacgtcagcggctcctccagaaatcaaaggagctttag

SEQ ID NO: 220871 - DNA, 4784 bp, Artificial Sequence
  derived and/or modified sequence
atgccatgcgctcagaggtcctggctggcaaacctgtccgttgtagcgcagctgcttaactttggggctctgtgctatggaaggcagccacagcccggtcctgttaggttccccgaccgcaggcaggagcatttcatcaagggcttgcccgaatatcatgtcgttggacctgtccgagtggacgcgtctggacactttttaagctacgggctccactaccccattacctccagccggaggaaaagggatctcgatgggagcgaggattgggtgtactacaggatctcacatgaagagaaggatctgttcttcaacctgacagtaaaccaagggttcttaagtaattcatacatcatggaaaagcgatacgggaacctgagccatgtgaagatgatggccagctcggccccattatgtcatctgtccggcaccgtcctgcaacaggggaccagggtgggcacagctgccctgtccgcttgccacgggttgaccgggtttttccagttgcctcatggagacttcttcatcgaaccagtcaagaagcaccccttggtagaaggtggctatcacccacatatagtgtatcggagacaaaaggtaccagaaacaaaggagcctacatgcggactcaaggactcagtcaatattagtcagaaacaggagctgtggagagagaaatgggagcggcataacttaccttccaggtccctctccagacgctcgatctccaaggaacgatgggtcgagaccctggtggttgcggacactaaaatgatcgaataccatggatcggaaaatgtggagagttacattttgactatcatgaatatggtgacaggtctgttccacaacccgtctattggaaacgcaatccatatcgtggtggtgagattaatcctgctggaggaggaggagcagggtctgaagatcgtgcatcacgcagaaaaaacactatcatccttttgcaaatggcagaaaagcattaacccgaaaagcgaccttaatccagtccatcacgacgttgccgtacttttgaccaggaaggatatctgcgcgggattcaatcgaccttgtgagaccctgggacttagccacctgtcgggaatgtgtcagccacataggagctgcaacataaacgaagacagcggcttaccccttgcttttacaatcgcacatgagctaggacattcatttggcatccagcacgatggcaaggaaaacgattgcgagcccgttggccgacacccatacataatgtcccgacagttgcaatacgatccaacacctctaacgtggagtaagtgttcagaggagtacattactaggttcctcgatcggggatgggggttctgcctcgacgatattcccaagaagaaggggctcaaatcaaaagtgatcgcccctggagtgatctatgacgtccaccatcagtgtcagcttcagtacgggccaaacgcaacgttctgtcaggaggtagaaaacgtgtgtcagaccctatggtgcagtgtgaagggattctgtcgctccaagttggacgcagccgctgatggcacccagtgtggtgaaaaaaagtggtgtatggctggaaagtgtatcaccgtggggaagaagcccgaatccattcctggtggctggggtcgctggagcccctggagccattgcagcaggacttgtggcgcaggggttcagtcggcagaacgtctatgcaacaatccggaaccgaagttcggcggtaagtattgcactggcgagaggaagcgatatcggctgtgtaacgttcacccttgcagatctgaggcccctacattcaggcagatgcagtgttccgaattcgacactgttccctacaaaaacgagctttaccattggtttcccattttcaaccctgcccatccctgcgagctgtactgcagaccaatcgacgggcagtttagcgagaaaatgctcgatgcagtcatcgacggcacgccttgcttcgaggggggaaacagcaggaacgtttgcattaacgggatctgcaagatggtggggtgcgattatgagatcgattcaaacgccacggaagatcgatgcggtgtctgtttgggggatggctcttcttgccagacagtccgcaaaatgttcaagcagaaggaagggtcggggtacgtcgacattggcttgatacccaagggcgctagggatattcgcgtgatggagatcgagggtgccggtaatttcctggcaattaggtccgaggaccctgaaaaatactaccttaacgggggtttcataatacagtggaacggcaattataagctcgcgggtaccgtgttccagtacgaccgcaagggtgatctggagaaactgatggcaaccggtccaaccaatgaatctgtgtggattcagctgctgtttcaagttaccaatccaggcatcaaatacgagtataccattcaaaaggacggtctggataacgatgttgagcagcagatgtacttttggcagtatggacactggacggagtgcagcgtgacatgtggtacagggatacgtaggcagaccgcccattgcatcaaaaaaggcaggggcatggtgaaagcgaccttctgtgaccccgagactcagcctaatggtcgtcagaagaaatgtcatgaaaaagcatgtccaccacgatggtgggctggcgaatgggaagcctgctctgcaacctgtgggcctcatggtgaaaagaagcgcacagtgctctgcatccagaccatggtaagtgacgaacaggccctgcctccgactgattgtcagcacctcctaaagccgaagacgcttctcagctgcaaccgggacatcttgtgcccatccgattggaccgtgggaaattggtcggagtgcagcgttagctgcggcggtggggttaggattcgctctgtcacgtgtgcgaaaaaccacgacgaaccatgcgatgtgacacgtaaacccaatagtcgcgctctctgcgggcttcagcaatgcccaagttctaggcgggtactgaagccaaataaaggcactatcagcaacgggaagaacccacccaccttgaagccagtcccacctcctacgtctaggcctcggatgctgactacgcccactggccctgagtctatgtccaccagcactccagcgatctcatctccatctcccactacagcctcaaaagagggagatcttggcggaaagcagtggcaggattctagcactcagcctgaactgtcttcacgctaccttatctcaacaggatctacttcccagccaatcctgacatcacagtcactgtctattcaaccttcagaggaaaacgtctcctcctctgacacggggccaacctctgaaggcggtcttgtggccaccacaacaagtgggtccggactctcctcttccagaaatcccatcacctggcctgtcacacctttctataacaccctgactaagggacccgagatggagatacactcggggagtggggaggaacgcgagcagccagaggacaaggatgagtctaatcctgtgatttggaccaaaatccgcgttcccggaaatgacgcgcctgtagaatctactgagatgccactcgccccacctctcaccccggacctctcaagagaatcctggtggcccccattctccacagtgatggagggactactacccagccagagaccaacgacatctgagaccggaacgcctagggtggagggcatggtgactgagaaacccgcaaacactctcctgcccctcggaggtgaccatcagccagaaccctctggaaagaccgcaaatagaaaccacttgaaactccccaataacatgaatcagactaagtcgtcagaaccagtgctgacagaagaagacgccacatctctcataaccgaagggttccttctgaatgcttcgaactacaagcagcttacaaacggccacggatctgcacattggatcgtaggcaattggagtgagtgcagcactacttgtggcttaggcgcatattggcgtagggttgagtgcagtactcagatggattccgattgtgctgcaatccagcgcccagaccccgctaaacgttgtcatctccgaccatgcgccggatggaaggtgggaaattggtcaaagtgtagtcgaaattgcagcggaggctttaagattcgcgaaatacagtgcgtggacagccgcgatcaccgaaatctacggccttttcactgtcagtttctggcgggaatcccacctcccctctcaatgtcgtgtaaccccgagccttgcgaggcatggcaggtggaaccgtggagccagtgcagcaggtcttgtggtggcggagtccaggaaaggggagtgttctgccccggtggcttatgcgattggaccaaacgaccaacctccaccatgtcttgcaatgaacatctgtgttgtcactgggccacaggcaattgggacctctgctccactagctgcggtgggggtttccagaaaaggaccgtccagtgtgttccgtccgagggaaataaaaccgaagatcaggatcaatgtctctgcgaccataagcctcgcccacctgaattcaaaaaatgcaatcagcaggcatgcaaaaaatctgccgatcttctctgcacgaaggataagctgtcggcatccttctgccaaaccctcaaagcaatgaaaaagtgcagcgtgcccaccgtaagagcggagtgctgtttttcttgccctcagacccacattactcacacacagcgtcagcgcaggcagagactgctccagaagagcaaagaactata

SEQ ID NO: 220872 - DNA, 4530 bp, Artificial Sequence
  derived and/or modified sequence
atgccctgcgcccagagaagctggctggccaacctgagcgtggtggcccagctgctgaacttcggcgccctgtgctacggcagacagccccagcccggccccgtgagattccccgacagaagacaggagcacttcatcaagggcctgcccgagtaccacgtggtgggccccgtgagagtggacgccagcggccacttcctgagctacggcctgcactaccccatcaccagcagcagaagaaagagagacctggacggcagcgaggactgggtgtactacagaatcagccacgaggagaaggacctgttcttcaacctgaccgtgaaccagggcttcctgagcaacagctacatcatggagaagagatacggcaacctgagccacgtgaagatgatggccagcagcgcccccctgtgccacctgagcggcaccgtgctgcagcagggcaccagagtgggcaccgccgccctgagcgcctgccacggcctgaccggcttcttccagctgccccacggcgacttcttcatcgagcccgtgaagaagcaccccctggtggagggcggctaccacccccacatcgtgtacagaagacagaaggtgcccgagaccaaggagcccacctgcggcctgaaggacagcgtgaacatcagccagaagcaggagctgtggagagagaagtgggagagacacaacctgcccagcagaagcctgagcagaagaagcatcagcaaggagagatgggtggagaccctggtggtggccgacaccaagatgatcgagtaccacggcagcgagaacgtggagagctacatcctgaccatcatgaacatggtgaccggcctgttccacaaccccagcatcggcaacgccatccacatcgtggtggtgagactgatcctgctggaggaggaggagcagggcctgaagatcgtgcaccacgccgagaagaccctgagcagcttctgcaagtggcagaagagcatcaaccccaagagcgacctgaaccccgtgcaccacgacgtggccgtgctgctgaccagaaaggacatctgcgccggcttcaacagaccctgcgagaccctgggcctgagccacctgagcggcatgtgccagccccacagaagctgcaacatcaacgaggacagcggcctgcccctggccttcaccatcgcccacgagctgggccacagcttcggcatccagcacgacggcaaggagaacgactgcgagcccgtgggcagacacccctacatcatgagcagacagctgcagtacgaccccacccccctgacctggagcaagtgcagcgaggagtacatcaccagattcctggacagaggctggggcttctgcctggacgacatccccaagaagaagggcctgaagagcaaggtgatcgcccccggcgtgatctacgacgtgcaccaccagtgccagctgcagtacggccccaacgccaccttctgccaggaggtggagaacgtgtgccagaccctgtggtgcagcgtgaagggcttctgcagaagcaagctggacgccgccgccgacggcacccagtgcggcgagaagaagtggtgcatggccggcaagtgcatcaccgtgggcaagaagcccgagagcatccccggcggctggggcagatggagcccctggagccactgcagcagaacctgcggcgccggcgtgcagagcgccgagagactgtgcaacaaccccgagcccaagttcggcggcaagtactgcaccggcgagagaaagagatacagactgtgcaacgtgcacccctgcagaagcgaggcccccaccttcagacagatgcagtgcagcgagttcgacaccgtgccctacaagaacgagctgtaccactggttccccatcttcaaccccggctacgtggacatcggcctgatccccaagggcgccagagacatcagagtgatggagatcgagggcgccggcaacttcctggccatcagaagcgaggaccccgagaagtactacctgaacggcggcttcatcatccagtggaacggcaactacaagctggccggcaccgtgttccagtacgacagaaagggcgacctggagaagctgatggccaccggccccaccaacgagagcgtgtggatccagctgctgttccaggtgaccaaccccggcatcaagtacgagtacaccatccagaaggacggcctggacaacgacgtggagcagcagatgtacttctggcagtacggccactggaccgagtgcagcgtgacctgcggcaccggcatcagaagacagaccgcccactgcatcaagaagggcagaggcatggtgaaggccaccttctgcgaccccgagacccagcccaacggcagacagaagaagtgccacgagaaggcctgcccccccagatggtgggccggcgagtgggaggcctgcagcgccacctgcggcccccacggcgagaagaagagaaccgtgctgtgcatccagaccatggtgagcgacgagcaggccctgccccccaccgactgccagcacctgctgaagcccaagaccctgctgagctgcaacagagacatcctgtgccccagcgactggaccgtgggcaactggagcgagtgcagcgtgagctgcggcggcggcgtgagaatcagaagcgtgacctgcgccaagaaccacgacgagccctgcgacgtgaccagaaagcccaacagcagagccctgtgcggcctgcagcagtgccccagcagcagaagagtgctgaagcccaacaagggcaccatcagcaacggcaagaacccccccaccctgaagcccgtgcccccccccaccagcagacccagaatgctgaccacccccaccggccccgagagcatgagcaccagcacccccgccatcagcagccccagccccaccaccgccagcaaggagggcgacctgggcggcaagcagtggcaggacagcagcacccagcccgagctgagcagcagatacctgatcagcaccggcagcaccagccagcccatcctgaccagccagagcctgagcatccagcccagcgaggagaacgtgagcagcagcgacaccggccccaccagcgagggcggcctggtggccaccaccaccagcggcagcggcctgagcagcagcagaaaccccatcacctggcccgtgacccccttctacaacaccctgaccaagggccccgagatggagatccacagcggcagcggcgaggagagagagcagcccgaggacaaggacgagagcaaccccgtgatctggaccaagatcagagtgcccggcaacgacgcccccgtggagagcaccgagatgcccctggccccccccctgacccccgacctgagcagagagagctggtggccccccttcagcaccgtgatggagggcctgctgcccagccagagacccaccaccagcgagaccggcacccccagagtggagggcatggtgaccgagaagcccgccaacaccctgctgcccctgggcggcgaccaccagcccgagcccagcggcaagaccgccaacagaaaccacctgaagctgcccaacaacatgaaccagaccaagagcagcgagcccgtgctgaccgaggaggacgccaccagcctgatcaccgagggcttcctgctgaacgccagcaactacaagcagctgaccaacggccacggcagcgcccactggatcgtgggcaactggagcgagtgcagcaccacctgcggcctgggcgcctactggagaagagtggagtgcagcacccagatggacagcgactgcgccgccatccagagacccgaccccgccaagagatgccacctgagaccctgcgccggctggaaggtgggcaactggagcaagtgcagcagaaactgcagcggcggcttcaagatcagagagatccagtgcgtggacagcagagaccacagaaacctgagacccttccactgccagttcctggccggcatccccccccccctgagcatgagctgcaaccccgagccctgcgaggcctggcaggtggagccctggagccagtgcagcagaagctgcggcggcggcgtgcaggagagaggcgtgttctgccccggcggcctgtgcgactggaccaagagacccaccagcaccatgagctgcaacgagcacctgtgctgccactgggccaccggcaactgggacctgtgcagcaccagctgcggcggcggcttccagaagagaaccgtgcagtgcgtgcccagcgagggcaacaagaccgaggaccaggaccagtgcctgtgcgaccacaagcccagaccccccgagttcaagaagtgcaaccagcaggcctgcaagaagagcgccgacctgctgtgcaccaaggacaagctgagcgccagcttctgccagaccctgaaggccatgaagaagtgcagcgtgcccaccgtgagagccgagtgctgcttcagctgcccccagacccacatcacccacacccagagacagagaagacagagactgctgcagaagagcaaggagctgtag

SEQ ID NO: 220873 - DNA, 4785 bp, Artificial Sequence
  derived and/or modified sequence
atgccctgcgcccagagaagctggctggccaacctgagcgtggtggcccagctgctgaacttcggcgccctgtgctacggcagacagccccagcccggccccgtgagattccccgacagaagacaggagcacttcatcaagggcctgcccgagtaccacgtggtgggccccgtgagagtggacgccagcggccacttcctgagctacggcctgcactaccccatcaccagcagcagaagaaagagagacctggacggcagcgaggactgggtgtactacagaatcagccacgaggagaaggacctgttcttcaacctgaccgtgaaccagggcttcctgagcaacagctacatcatggagaagagatacggcaacctgagccacgtgaagatgatggccagcagcgcccccctgtgccacctgagcggcaccgtgctgcagcagggcaccagagtgggcaccgccgccctgagcgcctgccacggcctgaccggcttcttccagctgccccacggcgacttcttcatcgagcccgtgaagaagcaccccctggtggagggcggctaccacccccacatcgtgtacagaagacagaaggtgcccgagaccaaggagcccacctgcggcctgaaggacagcgtgaacatcagccagaagcaggagctgtggagagagaagtgggagagacacaacctgcccagcagaagcctgagcagaagaagcatcagcaaggagagatgggtggagaccctggtggtggccgacaccaagatgatcgagtaccacggcagcgagaacgtggagagctacatcctgaccatcatgaacatggtgaccggcctgttccacaaccccagcatcggcaacgccatccacatcgtggtggtgagactgatcctgctggaggaggaggagcagggcctgaagatcgtgcaccacgccgagaagaccctgagcagcttctgcaagtggcagaagagcatcaaccccaagagcgacctgaaccccgtgcaccacgacgtggccgtgctgctgaccagaaaggacatctgcgccggcttcaacagaccctgcgagaccctgggcctgagccacctgagcggcatgtgccagccccacagaagctgcaacatcaacgaggacagcggcctgcccctggccttcaccatcgcccacgagctgggccacagcttcggcatccagcacgacggcaaggagaacgactgcgagcccgtgggcagacacccctacatcatgagcagacagctgcagtacgaccccacccccctgacctggagcaagtgcagcgaggagtacatcaccagattcctggacagaggctggggcttctgcctggacgacatccccaagaagaagggcctgaagagcaaggtgatcgcccccggcgtgatctacgacgtgcaccaccagtgccagctgcagtacggccccaacgccaccttctgccaggaggtggagaacgtgtgccagaccctgtggtgcagcgtgaagggcttctgcagaagcaagctggacgccgccgccgacggcacccagtgcggcgagaagaagtggtgcatggccggcaagtgcatcaccgtgggcaagaagcccgagagcatccccggcggctggggcagatggagcccctggagccactgcagcagaacctgcggcgccggcgtgcagagcgccgagagactgtgcaacaaccccgagcccaagttcggcggcaagtactgcaccggcgagagaaagagatacagactgtgcaacgtgcacccctgcagaagcgaggcccccaccttcagacagatgcagtgcagcgagttcgacaccgtgccctacaagaacgagctgtaccactggttccccatcttcaaccccgcccacccctgcgagctgtactgcagacccatcgacggccagttcagcgagaagatgctggacgccgtgatcgacggcaccccctgcttcgagggcggcaacagcagaaacgtgtgcatcaacggcatctgcaagatggtgggctgcgactacgagatcgacagcaacgccaccgaggacagatgcggcgtgtgcctgggcgacggcagcagctgccagaccgtgagaaagatgttcaagcagaaggagggcagcggctacgtggacatcggcctgatccccaagggcgccagagacatcagagtgatggagatcgagggcgccggcaacttcctggccatcagaagcgaggaccccgagaagtactacctgaacggcggcttcatcatccagtggaacggcaactacaagctggccggcaccgtgttccagtacgacagaaagggcgacctggagaagctgatggccaccggccccaccaacgagagcgtgtggatccagctgctgttccaggtgaccaaccccggcatcaagtacgagtacaccatccagaaggacggcctggacaacgacgtggagcagcagatgtacttctggcagtacggccactggaccgagtgcagcgtgacctgcggcaccggcatcagaagacagaccgcccactgcatcaagaagggcagaggcatggtgaaggccaccttctgcgaccccgagacccagcccaacggcagacagaagaagtgccacgagaaggcctgcccccccagatggtgggccggcgagtgggaggcctgcagcgccacctgcggcccccacggcgagaagaagagaaccgtgctgtgcatccagaccatggtgagcgacgagcaggccctgccccccaccgactgccagcacctgctgaagcccaagaccctgctgagctgcaacagagacatcctgtgccccagcgactggaccgtgggcaactggagcgagtgcagcgtgagctgcggcggcggcgtgagaatcagaagcgtgacctgcgccaagaaccacgacgagccctgcgacgtgaccagaaagcccaacagcagagccctgtgcggcctgcagcagtgccccagcagcagaagagtgctgaagcccaacaagggcaccatcagcaacggcaagaacccccccaccctgaagcccgtgcccccccccaccagcagacccagaatgctgaccacccccaccggccccgagagcatgagcaccagcacccccgccatcagcagccccagccccaccaccgccagcaaggagggcgacctgggcggcaagcagtggcaggacagcagcacccagcccgagctgagcagcagatacctgatcagcaccggcagcaccagccagcccatcctgaccagccagagcctgagcatccagcccagcgaggagaacgtgagcagcagcgacaccggccccaccagcgagggcggcctggtggccaccaccaccagcggcagcggcctgagcagcagcagaaaccccatcacctggcccgtgacccccttctacaacaccctgaccaagggccccgagatggagatccacagcggcagcggcgaggagagagagcagcccgaggacaaggacgagagcaaccccgtgatctggaccaagatcagagtgcccggcaacgacgcccccgtggagagcaccgagatgcccctggccccccccctgacccccgacctgagcagagagagctggtggccccccttcagcaccgtgatggagggcctgctgcccagccagagacccaccaccagcgagaccggcacccccagagtggagggcatggtgaccgagaagcccgccaacaccctgctgcccctgggcggcgaccaccagcccgagcccagcggcaagaccgccaacagaaaccacctgaagctgcccaacaacatgaaccagaccaagagcagcgagcccgtgctgaccgaggaggacgccaccagcctgatcaccgagggcttcctgctgaacgccagcaactacaagcagctgaccaacggccacggcagcgcccactggatcgtgggcaactggagcgagtgcagcaccacctgcggcctgggcgcctactggagaagagtggagtgcagcacccagatggacagcgactgcgccgccatccagagacccgaccccgccaagagatgccacctgagaccctgcgccggctggaaggtgggcaactggagcaagtgcagcagaaactgcagcggcggcttcaagatcagagagatccagtgcgtggacagcagagaccacagaaacctgagacccttccactgccagttcctggccggcatccccccccccctgagcatgagctgcaaccccgagccctgcgaggcctggcaggtggagccctggagccagtgcagcagaagctgcggcggcggcgtgcaggagagaggcgtgttctgccccggcggcctgtgcgactggaccaagagacccaccagcaccatgagctgcaacgagcacctgtgctgccactgggccaccggcaactgggacctgtgcagcaccagctgcggcggcggcttccagaagagaaccgtgcagtgcgtgcccagcgagggcaacaagaccgaggaccaggaccagtgcctgtgcgaccacaagcccagaccccccgagttcaagaagtgcaaccagcaggcctgcaagaagagcgccgacctgctgtgcaccaaggacaagctgagcgccagcttctgccagaccctgaaggccatgaagaagtgcagcgtgcccaccgtgagagccgagtgctgcttcagctgcccccagacccacatcacccacacccagagacagagaagacagagactgctgcagaagagcaaggagctgtag

SEQ ID NO: 220874 - DNA, 4622 bp, Artificial Sequence
  derived and/or modified sequence
tcctgctgggccacaggcgagcgctttatttctggagctgagggctaaaacttttttgacttttcttctcctcaacatctgaatcatgccatgtgcccagaggagctggcttgcaaacctttccgtggtggctcagctccttaactttggggcgctttgctatgggagacagcctcagccaggcccggttcgcttcccggacaggaggcaagagcattttatcaagggcctgccagaataccacgtggtgggtccagtccgagtagatgccagtgggcattttttgtcatatggcttgcactatcccatcacgagcagcaggaggaagagagatttggatggctcagaggactgggtgtactacagaatttctcacgaggagaaggacctgttttttaacttgacggtcaatcaaggatttctttccaatagctacatcatggagaagagatatgggaacctctcccatgttaagatgatggcttcctctgcccccctctgccatctcagtggcacggttctacagcagggcaccagagttgggacggcagccctcagtgcctgccatggactgactggatttttccaactaccacatggagactttttcattgaacccgtgaagaagcatccactggttgagggagggtaccacccgcacatcgtttacaggaggcagaaagttccagaaaccaaggagccaacctgtggattaaaggacagtgttaacatctcccagaagcaagagctatggcgggagaagtgggagaggcacaacttgccaagcagaagcctctctcggcgttccatcagcaaggagagatgggtggagacactggtggtggccgacacaaagatgattgaataccatgggagtgagaatgtggagtcctacatcctcaccatcatgaacatggtcactgggttgttccataacccaagcattggcaatgcaattcacattgttgtggttcggctcattctactcgaagaagaagagcaaggactgaaaatagttcaccatgcagaaaagacactgtctagcttctgcaagtggcagaagagtatcaatcccaagagtgacctcaatcctgttcatcacgacgtggctgtccttctcaccagaaaggacatctgtgctggtttcaatcgcccctgcgagaccctgggcctgtctcacctttcaggaatgtgtcagcctcaccgcagttgtaacatcaatgaagattcgggactccctctggctttcacaattgcccatgagctaggacacagcttcggcatccagcatgatgggaaagaaaatgactgtgagcctgtgggcagacatccgtacatcatgtcccgccagctccagtacgatcccactccgctgacatggtccaagtgcagcgaggagtacatcacccgcttcttggaccgaggctgggggttctgtcttgatgacatacctaaaaagaaaggcttgaagtccaaggtcattgcccccggagtgatctatgatgttcaccaccagtgccagctacaatatggacccaatgctaccttctgccaggaagtagaaaacgtctgccagacactgtggtgctccgtgaagggcttttgtcgctctaagctggacgctgctgcagatggaactcaatgtggtgagaagaagtggtgtatggcaggcaagtgcatcacagtggggaagaaaccagagagcattcctggaggctggggccgctggtcaccctggtcccactgttccaggacctgtggggctggagtccagagcgcagagaggctctgcaacaaccccgagccaaagtttggagggaaatattgcactggagaaagaaaacgctatcgcttgtgcaacgtccacccctgtcgctcagaggcaccaacatttcggcagatgcagtgcagtgaatttgacactgttccctacaagaatgaactctaccactggtttcccatttttaacccaggttatgttgacattgggctcattccaaaaggagcaagggacataagagtgatggaaattgagggagctggaaacttcctggccatcaggagtgaagatcctgaaaaatattacctgaatggagggtttattatccagtggaacgggaactataagctggcagggactgtctttcagtatgacaggaaaggagacctggaaaagctgatggccacaggtcccaccaatgagtctgtgtggatccagcttctattccaggtgactaaccctggcatcaagtatgagtacacaatccagaaagatggccttgacaatgatgttgagcagcagatgtacttctggcagtacggccactggacagagtgcagtgtgacctgcgggacaggtatccgccgccaaactgcccattgcataaagaagggccgcgggatggtgaaagctacattctgtgacccagaaacacagcccaatgggagacagaagaagtgccatgaaaaggcttgtccacccaggtggtgggcaggggagtgggaagcatgctcggcgacatgcgggccccacggggagaagaagcgaaccgtgctgtgcatccagaccatggtctctgacgagcaggctctcccgcccacagactgccagcacctgctgaagcccaagaccctcctttcctgcaacagagacatcctgtgcccctcggactggacagtgggcaactggagtgagtgttctgtttcctgtggtggtggagtgcggattcgcagtgtcacatgtgccaagaaccatgatgaaccttgcgatgtgacaaggaaacccaacagccgagctctgtgtggcctccagcaatgcccttctagccggagagttctgaaaccaaacaaaggcactatttccaatggaaaaaacccaccaacactaaagcccgtccctccacctacatccaggcccagaatgctgaccacacccacagggcctgagtctatgagcacaagcactccagcaatcagcagccctagtcctaccacagcctccaaagaaggagacctgggtgggaaacagtggcaagatagctcaacccaacctgagctgagctctcgctatctcatttccactggaagcacttcccagcccatcctcacttcccaatccttgagcattcagccaagtgaggaaaatgtttccagttcagatactggtcctacctcggagggaggccttgtagctacaacaacaagtggttctggcttgtcatcttcccgcaaccctatcacttggcctgtgactccattttacaataccttgaccaaaggtccagaaatggagattcacagtggctcaggggaagaaagagaacagcctgaggacaaagatgaaagcaatcctgtaatatggaccaagatcagagtacctggaaatgacgctccagtggaaagtacagaaatgccacttgcacctccactaacaccagatctcagcagggagtcctggtggccacccttcagcacagtaatggaaggactgctccccagccaaaggcccactacttccgaaactgggacacccagagttgaggggatggttactgaaaagccagccaacactctgctccctctgggaggagaccaccagccagaaccctcaggaaagacggcaaaccgtaaccacctgaaacttccaaacaacatgaaccaaacaaaaagttctgaaccagtcctgactgaggaggatgcaacaagtctgattactgagggctttttgctaaatgcctccaattacaagcagctcacaaacggccacggctctgcacactggatcgtcggaaactggagcgagtgctccaccacatgtggcctgggggcctactggagaagggtggagtgcagcacccagatggattctgactgtgcggccatccagagacctgaccctgcaaaaagatgccacctccgtccctgtgctggctggaaagtgggaaactggagcaagtgctccagaaactgcagtgggggcttcaagatacgcgagattcagtgcgtggacagccgggaccaccggaacctgaggccatttcactgccagttcctggccggcattcctcccccattgagcatgagctgtaacccggagccctgtgaggcgtggcaggtggagccttggagccagtgctccaggtcctgtggaggtggagttcaggagagaggagtgttctgtccaggaggcctctgtgattggacaaaaagacccacatccaccatgtcttgcaatgagcacctgtgctgtcactgggccactgggaactgggacctgtgttccacttcctgtggaggtggctttcagaagaggactgtccaatgtgtgccctcagagggcaataaaactgaagaccaagaccaatgtctatgtgatcacaaacccagacctccagaattcaaaaaatgcaaccagcaggcctgcaagaaaagtgccgatttactttgcactaaggacaaactgtcagccagtttctgccagacactgaaagccatgaagaaatgttctgtgcccaccgtgagggctgagtgctgcttctcgtgtccccagacacacatcacacacacccaaaggcaaagaaggcaacggttgctccaaaagtcaaaagaactctaagcccaaa

SEQ ID NO: 220875 - DNA, 8774 bp, Artificial Sequence
  derived and/or modified sequence
gagcgggcgggctgcgaggccgcggggcatgcgggaggcggaggggtggggaccggggtgggctgcgccctcccgctctggcccattccacaccccgccgaaagcggacactgtcagctgaatcactccccttttaggaggagggaggggaaaaaggtgtctagctcctttctgcttaaaaaagcacagggagatcgcgggcagctttgcagtcgctgccttctcgcgcctgaccatgcacccctgcatcttcctgctgggccacaggcgagcgctttatttctggagctgagggctaaaacttttttgacttttcttctcctcaacatctgaatcatgccatgtgcccagaggagctggcttgcaaacctttccgtggtggctcagctccttaactttggggcgctttgctatgggagacagcctcagccaggcccggttcgcttcccggacaggaggcaagagcattttatcaagggcctgccagaataccacgtggtgggtccagtccgagtagatgccagtgggcattttttgtcatatggcttgcactatcccatcacgagcagcaggaggaagagagatttggatggctcagaggactgggtgtactacagaatttctcacgaggagaaggacctgttttttaacttgacggtcaatcaaggatttctttccaatagctacatcatggagaagagatatgggaacctctcccatgttaagatgatggcttcctctgcccccctctgccatctcagtggcacggttctacagcagggcaccagagttgggacggcagccctcagtgcctgccatggactgactggatttttccaactaccacatggagactttttcattgaacccgtgaagaagcatccactggttgagggagggtaccacccgcacatcgtttacaggaggcagaaagttccagaaaccaaggagccaacctgtggattaaaggacagtgttaacatctcccagaagcaagagctatggcgggagaagtgggagaggcacaacttgccaagcagaagcctctctcggcgttccatcagcaaggagagatgggtggagacactggtggtggccgacacaaagatgattgaataccatgggagtgagaatgtggagtcctacatcctcaccatcatgaacatggtcactgggttgttccataacccaagcattggcaatgcaattcacattgttgtggttcggctcattctactcgaagaagaagagcaaggactgaaaatagttcaccatgcagaaaagacactgtctagcttctgcaagtggcagaagagtatcaatcccaagagtgacctcaatcctgttcatcacgacgtggctgtccttctcaccagaaaggacatctgtgctggtttcaatcgcccctgcgagaccctgggcctgtctcacctttcaggaatgtgtcagcctcaccgcagttgtaacatcaatgaagattcgggactccctctggctttcacaattgcccatgagctaggacacagcttcggcatccagcatgatgggaaagaaaatgactgtgagcctgtgggcagacatccgtacatcatgtcccgccagctccagtacgatcccactccgctgacatggtccaagtgcagcgaggagtacatcacccgcttcttggaccgaggctgggggttctgtcttgatgacatacctaaaaagaaaggcttgaagtccaaggtcattgcccccggagtgatctatgatgttcaccaccagtgccagctacaatatggacccaatgctaccttctgccaggaagtagaaaacgtctgccagacactgtggtgctccgtgaagggcttttgtcgctctaagctggacgctgctgcagatggaactcaatgtggtgagaagaagtggtgtatggcaggcaagtgcatcacagtggggaagaaaccagagagcattcctggaggctggggccgctggtcaccctggtcccactgttccaggacctgtggggctggagtccagagcgcagagaggctctgcaacaaccccgagccaaagtttggagggaaatattgcactggagaaagaaaacgctatcgcttgtgcaacgtccacccctgtcgctcagaggcaccaacatttcggcagatgcagtgcagtgaatttgacactgttccctacaagaatgaactctaccactggtttcccatttttaacccagcacatccttgtgagctctactgccgacccatagatggccagttttctgagaaaatgctggatgctgtcattgatggtaccccttgctttgaaggcggcaacagcagaaatgtctgtattaatggcatatgtaagatggttggctgtgactatgagatcgattccaatgccaccgaggatcgctgcggtgtgtgcctgggagatggctcttcctgccagactgtgagaaagatgtttaagcagaaggaaggatctggttatgttgacattgggctcattccaaaaggagcaagggacataagagtgatggaaattgagggagctggaaacttcctggccatcaggagtgaagatcctgaaaaatattacctgaatggagggtttattatccagtggaacgggaactataagctggcagggactgtctttcagtatgacaggaaaggagacctggaaaagctgatggccacaggtcccaccaatgagtctgtgtggatccagcttctattccaggtgactaaccctggcatcaagtatgagtacacaatccagaaagatggccttgacaatgatgttgagcagcagatgtacttctggcagtacggccactggacagagtgcagtgtgacctgcgggacaggtatccgccgccaaactgcccattgcataaagaagggccgcgggatggtgaaagctacattctgtgacccagaaacacagcccaatgggagacagaagaagtgccatgaaaaggcttgtccacccaggtggtgggcaggggagtgggaagcatgctcggcgacatgcgggccccacggggagaagaagcgaaccgtgctgtgcatccagaccatggtctctgacgagcaggctctcccgcccacagactgccagcacctgctgaagcccaagaccctcctttcctgcaacagagacatcctgtgcccctcggactggacagtgggcaactggagtgagtgttctgtttcctgtggtggtggagtgcggattcgcagtgtcacatgtgccaagaaccatgatgaaccttgcgatgtgacaaggaaacccaacagccgagctctgtgtggcctccagcaatgcccttctagccggagagttctgaaaccaaacaaaggcactatttccaatggaaaaaacccaccaacactaaagcccgtccctccacctacatccaggcccagaatgctgaccacacccacagggcctgagtctatgagcacaagcactccagcaatcagcagccctagtcctaccacagcctccaaagaaggagacctgggtgggaaacagtggcaagatagctcaacccaacctgagctgagctctcgctatctcatttccactggaagcacttcccagcccatcctcacttcccaatccttgagcattcagccaagtgaggaaaatgtttccagttcagatactggtcctacctcggagggaggccttgtagctacaacaacaagtggttctggcttgtcatcttcccgcaaccctatcacttggcctgtgactccattttacaataccttgaccaaaggtccagaaatggagattcacagtggctcaggggaagaaagagaacagcctgaggacaaagatgaaagcaatcctgtaatatggaccaagatcagagtacctggaaatgacgctccagtggaaagtacagaaatgccacttgcacctccactaacaccagatctcagcagggagtcctggtggccacccttcagcacagtaatggaaggactgctccccagccaaaggcccactacttccgaaactgggacacccagagttgaggggatggttactgaaaagccagccaacactctgctccctctgggaggagaccaccagccagaaccctcaggaaagacggcaaaccgtaaccacctgaaacttccaaacaacatgaaccaaacaaaaagttctgaaccagtcctgactgaggaggatgcaacaagtctgattactgagggctttttgctaaatgcctccaattacaagcagctcacaaacggccacggctctgcacactggatcgtcggaaactggagcgagtgctccaccacatgtggcctgggggcctactggagaagggtggagtgcagcacccagatggattctgactgtgcggccatccagagacctgaccctgcaaaaagatgccacctccgtccctgtgctggctggaaagtgggaaactggagcaagtgctccagaaactgcagtgggggcttcaagatacgcgagattcagtgcgtggacagccgggaccaccggaacctgaggccatttcactgccagttcctggccggcattcctcccccattgagcatgagctgtaacccggagccctgtgaggcgtggcaggtggagccttggagccagtgctccaggtcctgtggaggtggagttcaggagagaggagtgttctgtccaggaggcctctgtgattggacaaaaagacccacatccaccatgtcttgcaatgagcacctgtgctgtcactgggccactgggaactgggacctgtgttccacttcctgtggaggtggctttcagaagaggactgtccaatgtgtgccctcagagggcaataaaactgaagaccaagaccaatgtctatgtgatcacaaacccagacctccagaattcaaaaaatgcaaccagcaggcctgcaagaaaagtgccgatttactttgcactaaggacaaactgtcagccagtttctgccagacactgaaagccatgaagaaatgttctgtgcccaccgtgagggctgagtgctgcttctcgtgtccccagacacacatcacacacacccaaaggcaaagaaggcaacggttgctccaaaagtcaaaagaactctaagcccaaaaggaagccagcttccaccagactgcagcagcctgctgaccatgacatgctttagccctgggagctgcttcgttgaggttttgcttcatatatttcagattcagctttgggtcatgatgaaacaaaatccattgtgttcctctagccaccgaatgtccctcacaggaggcctaggctgccgtacttgctgctccctgataggaaggtgaaatagctaggagaatcaggcagcacctggtatcggctcctgggaaaggtgccaggttagacagatttgtgaaatactgtatttttgttctcccttaaagataaaaacaaagagaccagctatttccctgactacctcaagagtatcaggcaacacttacccaggggacaaataatcttcttaatttatcttgatgaatacctttcttttttttttcttgcctccctgcctggggcagctgctatttaaaatgtcacagcggagctttaggaacattcctttaattcatccaggcagaggactgctttcttcaccccatgttcaactagggcaggaagtgctggttacatccctcagtctcttcctccatccctgtagggctccatatctgggctgcttagagtctcctgccaaccttgggacactagactaagaggaaacaggcataagaaacacagcctaaggggtttaggtcacttacacagaaaacacttctggtttgaagagcatttctatgaaaactcgtaaaatgcaaatgagcagaaatcaatttcttaatattacagaaaaggaactgtgggcctttattcttcccactttcctggcaaatacacactcctttgcagaagggaaaatgtgtcttcctggctgacttcctcccatcctccagtccccacaggaggcctgagctcaggtcccaccatcgtcttgctgcaggggctgtatatgcaaagaccactatgaccagctctagggctgccacctgtcctcacctcttctcaggttggaaaatggaggttccatattaaaatatttcaaagaaccaggtaaattgtactaagtacaagaacatagtgcaaacttctaatctagagaaaaaacatttctaaaaagtaaggtaaaggggatctactcctcagtgtacccaatatgtagttagtcttaaagatcttttactttggggagaacaggtgaatcagggagtccaaagaaactgaaatgaaagttagaatgcttgttctggatgttcctacctcccaccagaagtcaaagtaggcttggtctcaaattcagagcaaatttctagacaaagtgatttctaagggaaggtacttacatgaactgaacccagagaaagagggtaagtgggtgggtggaggggcataagcttcaaatgaaagaagatatcagaaccaattcttgacagggagaaaggcaaggatgtggccttcatgtgatgggcagcatattttctgactcatgcacagatacacttaatactcctcatggaacacaatatcccacgtctccctttacctatccgttcagcagaatggtgctattaaaaaaatggtgctaatatctagatggtggcagaattaatgtaaacatagataggcatacaaatgggtaagtgtatgtgaaactctccatatacatcttctgttaaacatgtaacggtgttgctgaccaatgccagttttattgcttgggtaccttgaatttaagatttaatattatgtgctttttatttttttccaagccattaacgtgtattactctcatgaattcctgtgaaaaataaaacagtgggattgggatgaaattcaagatagaccagaaacaggaggaaagtacaaatgtttacctaaagccagagaatttatttctagatgataattacattattgtattctctgcctttaaacataaacattgctggccgatagcaatctctggtgaataatggttttcgaggagaggagacacttaaattgttagtgacatgagtggaggagaatctgatatttactaatgaggcagtttgcaaagactgtccctgaagtgtagtgtagtctttcagggggattcatttagtaagctagattgatttaacctggtactgtactagcatagggtcaaatacgtgtcatcagagacctgggtatgaccaggcttacaaaactcaggaacaaactcagattcctactgacctcaaccaactaaactaggccaaatttctccgtgtacaaaatggaccacgttatttacaatccacgtggtggagaagatggtagacatgtggagagagtttggccaggtgctccattctaggtctttttccagtttctcaaaggcagaacattggctcctaattatttgccatggatatttgcttcctgttctggagctatgttgtaagacagctgtgtgatgtccatcattcttgactccagaatgaagacagggcttgctgttttctgtcctgttggtatcatctgttgccttggcgatcactcagtgatgagtcgtcagtattttgacatgtcccagtgcttgctgtacaagaggggactcagatcaacaggaagactctgaagacaggaacctgcatggtatcttacatctttgatacttgggtgctgatatgaagcagagttgttgatttactttatctaggcccttctttcttctcacctggatcaagcaactgagaagtgtatcaggagacactggatacatatctctatgaaatagagagggccatcgcagggcctggtacttaactacattaacgttctaaaacccagtttggtttacgttgtctttcacagtagtatatttagctcttctctggaaagttgtgggttaatataattcttaaacatgaaaatgtaattaaacacaccacgagagaacaatattccaggagacttaatagtgattactttcttcaatcaggaaatcgtttcagtgcctcctttgtaggaatgctttgttttgtgatgggttttcttaaagaagagcacacctccgtccaatctcctgagacagccacgtctccgctgacatcccactgtgatgctttcagatagtcagtgaatgtttctgataaccttcatccagtatctgaaacacaatgtgagagattatattgttttagataataacatcccatttagttgactaaaatcttccaaactctgaaagctgcacactgctactccagagagtgcaggtcttagctcttctcctttctgacttcaagatgaatctttgggacgatgtttctggtgcttggtccacagtgattcacttttgaaggagaggccacatgacatgaactgcctggtgttacaacctagctaacatatttgatgctactcctgttgtctgtactgcttattcaagtagtattctaagttatgttactaaaaaacatggtgggtaaagcacaatcctacccatcattgtcctccaaaataattgtatgacatacacggcccagcccattgccctccctgcatctctgtgctgctttgccatttccccttctacccagcctcctcaaggggtaccttggtggatatttcagtacttaaaaccagactgtaatcataacctccctctgtgtggcatcaataaatagccaaactca

SEQ ID NO: 220876 - protein, 1103 aa, Artificial Sequence
  derived and/or modified sequence
MAPACQILRWALALGLGLMFEVTHAFRSQDEFLSSLESYEIAFPTRVDHNGALLAFSPPPPRRQRRGTGATAESRLFYKVASPSTHFLLNLTRSSRLLAGHVSVEYWTREGLAWQRAARPHCLYAGHLQGQASSSHVAISTCGGLHGLIVADEEEYLIEPLHGGPKGSRSPEESGPHVVYKRSSLRHPHLDTACGVRDEKPWKGRPWWLRTLKPPPARPLGNETERGQPGLKRSVSRERYVETLVVADKMMVAYHGRRDVEQYVLAIMNIVAKLFQDSSLGSTVNILVTRLILLTEDQPTLEITHHAGKSLDSFCKWQKSIVNHSGHGNAIPENGVANHDTAVLITRYDICIYKNKPCGTLGLAPVGGMCERERSCSVNEDIGLATAFTIAHEIGHTFGMNHDGVGNSCGARGQDPAKLMAAHITMKTNPFVWSSCSRDYITSFLDSGLGLCLNNRPPRQDFVYPTVAPGQAYDADEQCRFQHGVKSRQCKYGEVCSELWCLSKSNRCITNSIPAAEGTLCQTHTIDKGWCYKRVCVPFGSRPEGVDGAWGPWTPWGDCSRTCGGGVSSSSRHCDSPRPTIGGKYCLGERRRHRSCNTDDCPPGSQDFREVQCSEFDSIPFRGKFYKWKTYRGGGVKACSLTCLAEGFNFYTERAAAVVDGTPCRPDTVDICVSGECKHVGCDRVLGSDLREDKCRVCGGDGSACETIEGVFSPASPGAGYEDVVWIPKGSVHIFIQDLNLSLSHLALKGDQESLLLEGLPGTPQPHRLPLAGTTFQLRQGPDQVQSLEALGPINASLIVMVLARTELPALRYRFNAPIARDSLPPYSWHYAPWTKCSAQCAGGSQVQAVECRNQLDSSAVAPHYCSAHSKLPKRQRACNTEPCPPDWVVGNWSLCSRSCDAGVRSRSVVCQRRVSAAEEKALDDSACPQPRPPVLEACHGPTCPPEWAALDWSECTPSCGPGLRHRVVLCKSADHRATLPPAHCSPAAKPPATMRCNLRRCPPARWVAGEWGECSAQCGVGQRQRSVRCTSHTGQASHECTEALRPPTTQQCEAKCDSPTPGDGPEECKDVNKVAYCPLVLKFQFCSRAYFRQMCCKTCHGH

SEQ ID NO: 220877 - protein, 1103 aa, Artificial Sequence
  derived and/or modified sequence
MAPACQILRWALALGLGLMFEVTHAFRSQDEFLSSLESYEIAFPTRVDHNGALLAFSPPPPRRQRRGTGATAESRLFYKVASPSTHFLLNLTRSSRLLAGHVSVEYWTREGLAWQRAARPHCLYAGHLQGQASTSHVAISTCGGLHGLIVADEEEYLIEPLHGGPKGSRSPEESGPHVVYKRSSLRHPHLDTACGVRDEKPWKGRPWWLRTLKPPPARPLGNETERGQPGLKRSVSRERYVETLVVADKMMVAYHGRRDVEQYVLAIMNIVAKLFQDSSLGSTVNILVTRLILLTEDQPTLEITHHAGKSLDSFCKWQKSIVNHSGHGNAIPENGVANHDTAVLITRYDICIYKNKPCGTLGLAPVGGMCERERSCSVNEDIGLATAFTIAHEIGHTFGMNHDGVGNSCGARGQDPAKLMAAHITMKTNPFVWSSCSRDYITSFLDSGLGLCLNNRPPRQDFVYPTVAPGQAYDADEQCRFQHGVKSRQCKYGEVCSELWCLSKSNRCITNSIPAAEGTLCQTHTIDKGWCYKRVCVPFGSRPEGVDGAWGPWTPWGDCSRTCGGGVSSSSRHCDSPRPTIGGKYCLGERRRHRSCNTDDCPPGSQDFREVQCSEFDSIPFRGKFYKWKTYRGGGVKACSLTCLAEGFNFYTERAAAVVDGTPCRPDTVDICVSGECKHVGCDRVLGSDLREDKCRVCGGDGSACETIEGVFSPASPGAGYEDVVWIPKGSVHIFIQDLNLSLSHLALKGDQESLLLEGLPGTPQPHRLPLAGTTFQLRQGPDQVQSLEALGPINASLIVMVLARTELPALRYRFNAPIARDSLPPYSWHYAPWTKCSAQCAGGSQVQAVECRNQLDSSAVAPHYCSAHSKLPKRQRACNTEPCPPDWVVGNWSLCSRSCDAGVRSRSVVCQRRVSAAEEKALDDSACPQPRPPVLEACHGPTCPPEWAALDWSECTPSCGPGLRHRVVLCKSADHRATLPPAHCSPAAKPPATMRCNLRRCPPARWVAGEWGECSAQCGVGQRQRSVRCTSHTGQASHECTEALRPPTTQQCEAKCDSPTPGDGPEECKDVNKVAYCPLVLKFQFCSRAYFRQMCCKTCHGH

SEQ ID NO: 220878 - DNA, 3312 bp, Artificial Sequence
  derived and/or modified sequence
atggcccccgcctgccagatcctgagatgggccctggccctgggcctgggcctgatgttcgaggtgacccacgccttcagaagccaggacgagttcctgagcagcctggagagctacgagatcgccttccccaccagagtggaccacaacggcgccctgctggccttcagcccccccccccccagaagacagagaagaggcaccggcgccaccgccgagagcagactgttctacaaggtggccagccccagcacccacttcctgctgaacctgaccagaagcagcagactgctggccggccacgtgagcgtggagtactggaccagagagggcctggcctggcagagagccgccagaccccactgcctgtacgccggccacctgcagggccaggccagcagcagccacgtggccatcagcacctgcggcggcctgcacggcctgatcgtggccgacgaggaggagtacctgatcgagcccctgcacggcggccccaagggcagcagaagccccgaggagagcggcccccacgtggtgtacaagagaagcagcctgagacacccccacctggacaccgcctgcggcgtgagagacgagaagccctggaagggcagaccctggtggctgagaaccctgaagcccccccccgccagacccctgggcaacgagaccgagagaggccagcccggcctgaagagaagcgtgagcagagagagatacgtggagaccctggtggtggccgacaagatgatggtggcctaccacggcagaagagacgtggagcagtacgtgctggccatcatgaacatcgtggccaagctgttccaggacagcagcctgggcagcaccgtgaacatcctggtgaccagactgatcctgctgaccgaggaccagcccaccctggagatcacccaccacgccggcaagagcctggacagcttctgcaagtggcagaagagcatcgtgaaccacagcggccacggcaacgccatccccgagaacggcgtggccaaccacgacaccgccgtgctgatcaccagatacgacatctgcatctacaagaacaagccctgcggcaccctgggcctggcccccgtgggcggcatgtgcgagagagagagaagctgcagcgtgaacgaggacatcggcctggccaccgccttcaccatcgcccacgagatcggccacaccttcggcatgaaccacgacggcgtgggcaacagctgcggcgccagaggccaggaccccgccaagctgatggccgcccacatcaccatgaagaccaaccccttcgtgtggagcagctgcagcagagactacatcaccagcttcctggacagcggcctgggcctgtgcctgaacaacagaccccccagacaggacttcgtgtaccccaccgtggcccccggccaggcctacgacgccgacgagcagtgcagattccagcacggcgtgaagagcagacagtgcaagtacggcgaggtgtgcagcgagctgtggtgcctgagcaagagcaacagatgcatcaccaacagcatccccgccgccgagggcaccctgtgccagacccacaccatcgacaagggctggtgctacaagagagtgtgcgtgcccttcggcagcagacccgagggcgtggacggcgcctggggcccctggaccccctggggcgactgcagcagaacctgcggcggcggcgtgagcagcagcagcagacactgcgacagccccagacccaccatcggcggcaagtactgcctgggcgagagaagaagacacagaagctgcaacaccgacgactgcccccccggcagccaggacttcagagaggtgcagtgcagcgagttcgacagcatccccttcagaggcaagttctacaagtggaagacctacagaggcggcggcgtgaaggcctgcagcctgacctgcctggccgagggcttcaacttctacaccgagagagccgccgccgtggtggacggcaccccctgcagacccgacaccgtggacatctgcgtgagcggcgagtgcaagcacgtgggctgcgacagagtgctgggcagcgacctgagagaggacaagtgcagagtgtgcggcggcgacggcagcgcctgcgagaccatcgagggcgtgttcagccccgccagccccggcgccggctacgaggacgtggtgtggatccccaagggcagcgtgcacatcttcatccaggacctgaacctgagcctgagccacctggccctgaagggcgaccaggagagcctgctgctggagggcctgcccggcaccccccagccccacagactgcccctggccggcaccaccttccagctgagacagggccccgaccaggtgcagagcctggaggccctgggccccatcaacgccagcctgatcgtgatggtgctggccagaaccgagctgcccgccctgagatacagattcaacgcccccatcgccagagacagcctgcccccctacagctggcactacgccccctggaccaagtgcagcgcccagtgcgccggcggcagccaggtgcaggccgtggagtgcagaaaccagctggacagcagcgccgtggccccccactactgcagcgcccacagcaagctgcccaagagacagagagcctgcaacaccgagccctgcccccccgactgggtggtgggcaactggagcctgtgcagcagaagctgcgacgccggcgtgagaagcagaagcgtggtgtgccagagaagagtgagcgccgccgaggagaaggccctggacgacagcgcctgcccccagcccagaccccccgtgctggaggcctgccacggccccacctgcccccccgagtgggccgccctggactggagcgagtgcacccccagctgcggccccggcctgagacacagagtggtgctgtgcaagagcgccgaccacagagccaccctgccccccgcccactgcagccccgccgccaagccccccgccaccatgagatgcaacctgagaagatgcccccccgccagatgggtggccggcgagtggggcgagtgcagcgcccagtgcggcgtgggccagagacagagaagcgtgagatgcaccagccacaccggccaggccagccacgagtgcaccgaggccctgagaccccccaccacccagcagtgcgaggccaagtgcgacagccccacccccggcgacggccccgaggagtgcaaggacgtgaacaaggtggcctactgccccctggtgctgaagttccagttctgcagcagagcctacttcagacagatgtgctgcaagacctgccacggccactag

SEQ ID NO: 220879 - DNA, 4223 bp, Artificial Sequence
  derived and/or modified sequence
gcgcggggcggcgagacagcggcggcgacggcgcggaggccccgggcgcggcgcaggctccaaagaagaagaaaccaaggcccagagagggaggcccaggtgcagggagcaggcgagggaaggatccgtacaggggcccaacactactccaccaaccgaagcccccaaaaggagcccggtgatgctgcgaaggctgtgaacaggggaggcggcactgtgggggctgccggcagccggggctggggagagacatgtggacacgtggcctctatggctcccgcctgccagatcctccgctgggccctcgccctggggctgggcctcatgttcgaggtcacgcacgccttccggtctcaagatgagttcctgtccagtctggagagctatgagatcgccttccccacccgcgtggaccacaacggggcactgctggccttctcgccacctcctccccggaggcagcgccgcggcacgggggccacagccgagtcccgcctcttctacaaagtggcctcgcccagcacccacttcctgctgaacctgacccgcagctcccgtctactggcagggcacgtctccgtggagtactggacacgggagggcctggcctggcagagggcggcccggccccactgcctctacgctggtcacctgcagggccaggccagcagctcccatgtggccatcagcacctgtggaggcctgcacggcctgatcgtggcagacgaggaagagtacctgattgagcccctgcacggtgggcccaagggttctcggagcccggaggaaagtggaccacatgtggtgtacaagcgttcctctctgcgtcacccccacctggacacagcctgtggagtgagagatgagaaaccgtggaaagggcggccatggtggctgcggaccttgaagccaccgcctgccaggcccctggggaatgaaacagagcgtggccagccaggcctgaagcgatcggtcagccgagagcgctacgtggagaccctggtggtggctgacaagatgatggtggcctatcacgggcgccgggatgtggagcagtatgtcctggccatcatgaacattgttgccaaacttttccaggactcgagtctgggaagcaccgttaacatcctcgtaactcgcctcatcctgctcacggaggaccagcccactctggagatcacccaccatgccgggaagtccctggacagcttctgtaagtggcagaaatccatcgtgaaccacagcggccatggcaatgccattccagagaacggtgtggctaaccatgacacagcagtgctcatcacacgctatgacatctgcatctacaagaacaaaccctgcggcacactaggcctggccccggtgggcggaatgtgtgagcgcgagagaagctgcagcgtcaatgaggacattggcctggccacagcgttcaccattgcccacgagatcgggcacacattcggcatgaaccatgacggcgtgggaaacagctgtggggcccgtggtcaggacccagccaagctcatggctgcccacattaccatgaagaccaacccattcgtgtggtcatcctgcagccgtgactacatcaccagctttctagactcgggcctggggctctgcctgaacaaccggccccccagacaggactttgtgtacccgacagtggcaccgggccaagcctacgatgcagatgagcaatgccgctttcagcatggagtcaaatcgcgtcagtgtaaatacggggaggtctgcagcgagctgtggtgtctgagcaagagcaaccggtgcatcaccaacagcatcccggccgccgagggcacgctgtgccagacgcacaccatcgacaaggggtggtgctacaaacgggtctgtgtcccctttgggtcgcgcccagagggtgtggacggagcctgggggccgtggactccatggggcgactgcagccggacctgtggcggcggcgtgtcctcttctagccgtcactgcgacagccccaggccaaccatcgggggcaagtactgtctgggtgagagaaggcggcaccgctcctgcaacacggatgactgtccccctggctcccaggacttcagagaagtgcagtgttctgaatttgacagcatccctttccgtgggaaattctacaagtggaaaacgtaccggggagggggcgtgaaggcctgctcgctcacgtgcctagcggaaggcttcaacttctacacggagagggcggcagccgtggtggacgggacaccctgccgtccagacacggtggacatttgcgtcagtggcgaatgcaagcacgtgggctgcgaccgagtcctgggctccgacctgcgggaggacaagtgccgagtgtgtggcggtgacggcagtgcctgcgagaccatcgagggcgtcttcagcccagcctcacctggggccgggtacgaggatgtcgtctggattcccaaaggctccgtccacatcttcatccaggatctgaacctctctctcagtcacttggccctgaagggagaccaggagtccctgctgctggaggggctgcctgggaccccccagccccaccgtctgcctctagctgggaccacctttcaactgcgacaggggccagaccaggtccagagcctcgaagccctgggaccgattaatgcatctctcatcgtcatggtgctggcccggaccgagctgcctgccctccgctaccgcttcaatgcccccatcgcccgtgactcgctgcccccctactcctggcactatgcgccctggaccaagtgctcggcccagtgtgcaggcggtagccaggtgcaggcggtggagtgccgcaaccagctggacagctccgcggtcgccccccactactgcagtgcccacagcaagctgcccaaaaggcagcgcgcctgcaacacggagccttgccctccagactgggttgtagggaactggtcgctctgcagccgcagctgcgatgcaggcgtgcgcagccgctcggtcgtgtgccagcgccgcgtctctgccgcggaggagaaggcgctggacgacagcgcatgcccgcagccgcgcccacctgtactggaggcctgccacggccccacttgccctccggagtgggcggccctcgactggtctgagtgcacccccagctgcgggccgggcctccgccaccgcgtggtcctttgcaagagcgcagaccaccgcgccacgctgcccccggcgcactgctcacccgccgccaagccaccggccaccatgcgctgcaacttgcgccgctgccccccggcccgctgggtggctggcgagtggggtgagtgctctgcacagtgcggcgtcgggcagcggcagcgctcggtgcgctgcaccagccacacgggccaggcgtcgcacgagtgcacggaggccctgcggccgcccaccacgcagcagtgtgaggccaagtgcgacagcccaacccccggggacggccctgaagagtgcaaggatgtgaacaaggtcgcctactgccccctggtgctcaaatttcagttctgcagccgagcctacttccgccagatgtgctgcaaaacctgccatggccactagggggcgcgcggcacccggagccacagctggcggggtctccgccgccagccctgcagcgggccggccagagggggccccgggggggcgggaactgggagggaagggtgagacggagccggaagttatttattgggaacccctgcagggccctggctggggggatggagaggggctggctatccccccagagcccctcttcagcatccgccccttccagttcacatagtgagaccccccctccagggtgggtctggggaggggacagctgttcaccccagcaccctttgaacccacccttagggagtccccaacactccccccctcctttgatcggaatatgtactgtgaagagtaggggtggggaggtggtctgccggtgccctgccccccagcactgccctacccctccactccgagctgggggggaatctgtgtctgctatgggaggggggggggtagcaccacctccctgacaccctcccctgacctgactagggggaggatccaccccaacctctgccctgcccgccccaggggcaccccgacatccaggccaccccctcatggtgctacagaccctgccctggggcccacacactcctgccaggaagccctacatcaataaagttctgtcttgtgta

SEQ ID NO: 220880 - DNA, 3312 bp, Artificial Sequence
  derived and/or modified sequence
atggcgccggcttgccagattctgagatgggccctggctctgggcctcgggctcatgtttgaagtcacacacgctttcaggagccaagacgaatttctgtctagcttggagagctatgaaattgctttccctacgagggttgatcacaacggtgctctgctggctttctcgccacccccaccaagaaggcagcgaagaggcactggcgctactgctgaatccagattattttataaagtcgccagtccgtcaacccacttcctactgaacctcaccaggtcctctcgcctgctggccggccatgtgtctgtcgagtattggactcgcgaaggcctggcatggcagagggctgctagaccacactgtctttatgcaggccatctgcagggccaagcatcctccagccatgtcgccatcagcacctgtggtggtctgcacggactgattgtggcagacgaggaggaatatctgatcgagcctttacatggaggccccaaggggtcacgctcacccgaggagagtggtccgcacgttgtttacaaacgcagttccctgcgacatccccatctggatactgcttgcggagtgcgggacgagaagccttggaagggcaggccatggtggcttcgcactctcaagcccccccccgcccggcctctgggaaacgaaacagagaggggtcagcccgggttgaagagatcagtgagtcgtgagcggtatgttgagacactggtagttgcagataagatgatggttgcttaccacggtcgaagggatgtggagcagtatgttctcgccataatgaacatcgtcgccaagttgtttcaagactctagcctggggtccacagtcaacatcctggtgactagacttatactgttaaccgaggatcagcccaccctcgaaatcacacaccatgccggtaaatctctggatagcttttgtaaatggcagaagtccatcgtgaaccattccggccacggcaacgccattccggagaatggggtcgcgaatcacgacactgccgtgctgattacaagatatgatatctgcatctacaaaaacaaaccatgtggcacactcggcctcgcccctgttggcggaatgtgtgagcgggagaggtcatgctcagtgaacgaagacatcggtctggctactgcctttactatcgcccacgaaattggccataccttcggtatgaatcatgatggcgttgggaactcatgcggcgcccgcgggcaggacccagcgaagttgatggctgcgcatattaccatgaagactaatcctttcgtttggagcagctgcagtagagattatattacttcattccttgatagtggccttgggctctgtctgaacaacaggccaccacggcaagactttgtttaccctacggtggctccagggcaggcctatgacgccgacgaacagtgtcgcttccagcatggagtaaagagcaggcagtgcaagtatggcgaagtatgttcagagctctggtgcctttcaaagagtaatagatgcattaccaattcaattccagcggccgaaggcactctttgccagacacacacaattgacaaaggctggtgttacaaaagggtgtgcgtgccatttggttcccgtccggaaggagtggacggggcctggggcccctggaccccctggggcgactgttccaggacatgcgggggtggcgtcagttcatcctctaggcactgtgactctccacgcccgacaataggagggaaatattgcctgggcgaaagaaggcggcaccgatcctgcaacacggacgactgtcctcccggcagccaggatttcagagaggtgcagtgtagcgagtttgacagtatcccgtttcgtgggaaattctacaaatggaaaacttatcgcggaggcggcgtgaaagcttgctccctgacctgtcttgccgaaggctttaacttttacactgagagggccgccgctgtggtagatggaactccgtgcagacccgatacagttgatatttgcgtcagtggcgagtgcaaacatgtgggctgtgaccgagtgctgggttctgatctgcgggaagataagtgccgagtgtgtgggggcgatgggagtgcctgcgaaacaatcgagggagtattctccccagctagtcccggcgccgggtatgaggatgttgtctggataccaaaaggttctgtccatatcttcatacaggacctgaatctttctctgagccaccttgccctgaagggggatcaggagtccctgctcttagaaggcttgccaggtactccacaaccccaccgccttcctcttgctggaacaaccttccagctgcgacagggacctgaccaggtgcaaagcctggaagcactgggcccgattaacgcctccctgatcgtaatggtactcgctaggacagaacttcctgcacttaggtataggtttaacgcgcccatagccagagatagcctccctccgtatagttggcactacgccccatggaccaaatgctccgcccaatgcgccggtgggtcccaagtgcaggcagttgagtgcagaaaccagctggactcttcggcagtagcaccacactattgcagtgctcactccaagctgccaaagaggcagagggcttgtaataccgagccttgtccccctgactgggtcgtcggaaactggtcactgtgcagcagatcctgcgacgcgggagtgcgatcccgaagtgttgtgtgccagcggcgcgtgtctgcagcggaggaaaaagctttggacgattctgcttgtcctcagccgagaccccccgtgctcgaagcctgtcacggcccgacttgccctcccgaatgggctgcactggattggtcagagtgtactccctcctgcggtcctggcctccggcacagggtcgtgctgtgtaaaagcgcagatcacagagcgaccctgccccccgcccactgctcccccgcagctaaaccccccgccactatgagatgcaacctcaggcggtgccctcccgcgaggtgggtggcgggggaatggggcgaatgttctgctcaatgtggggttggacagcggcagaggagtgtcagatgtacctcccacaccggtcaggcgagccacgaatgcaccgaagctctgcggcctcctaccactcagcagtgcgaagctaaatgcgattcaccaactcccggggacggcccagaggaatgtaaagacgtgaataaagtggcttattgtcccctggtgttaaaatttcaattctgttccagggcttattttagacagatgtgctgtaaaacctgccacggccactag

SEQ ID NO: 220881 - DNA, 3312 bp, Artificial Sequence
  derived and/or modified sequence
atggccccagcctgccagatcctgcgctgggccctggccctgggcctgggcctgatgtttgaggtgacccacgccttccgcagccaggatgagttcctgagcagcctggagagctatgaaattgccttccccaccagggtggaccacaacggggccctgctggccttcagccccccaccaccccggcggcagaggcggggcaccggggccacagctgagagccgcctcttctacaaggtggccagccccagcacccacttcctgctgaacctgaccaggagcagccggctgctggccggccacgtgtctgtggagtactggacccgggagggcctggcctggcagagagctgcccggccccactgcctgtatgccggccacctgcagggccaggccagcagcagccacgtggccatcagcacctgtggcggcctgcacggcctgattgtggctgatgaggaggagtacctgattgagcccctgcacggcggccccaagggcagccgcagccctgaggagagcggcccccacgtggtgtacaagaggagcagcctgcggcacccccacctggacacagcctgtggggtgagagatgagaagccctggaagggccggccctggtggctgcggaccctgaagcccccaccagcccggcccctgggcaatgaaacagagcggggccagcccggcctgaagaggtctgtgtcccgggagcgctacgtggagaccctggtggtggccgacaagatgatggtggcctaccatggaagaagagatgtggagcagtatgtgctggccatcatgaacatcgtggccaagctgttccaggacagcagcctgggcagcacagtgaacatcctggtgaccaggctcatcctgctgacagaggaccagcccaccctggagatcacccaccacgccggcaagagcctggacagcttctgcaagtggcagaagagcatcgtgaaccacagcggccatggaaatgccatcccagaaaatggagtggccaaccacgacacagctgtgctgatcaccaggtatgacatctgcatctacaagaacaagccctgtggcaccctgggcctggcccctgtgggcggcatgtgtgagcgggagaggagctgcagcgtgaatgaagacatcggcctggccacagccttcaccatcgcccacgagatcggccacaccttcggcatgaaccatgatggagtgggcaacagctgtggggcccggggccaggaccctgccaagctgatggccgcccacatcaccatgaagaccaacccctttgtgtggagcagctgcagccgggactacatcaccagcttcctggacagcggcctgggcctgtgcctgaacaacagaccaccccggcaggactttgtgtaccccaccgtggcccctggccaggcctatgatgctgatgagcagtgccgcttccagcacggcgtgaagagccggcagtgcaagtacggggaggtgtgcagcgagctgtggtgcctgagcaagagcaaccgctgcatcaccaacagcatcccagctgctgagggcaccctgtgccagacccacaccatcgacaagggctggtgctacaagagggtgtgtgtgcccttcggcagcaggcctgagggcgtggatggagcctggggcccctggaccccctggggagactgcagcaggacctgtggcggcggcgtgagcagcagcagccgccactgtgacagcccccggcccaccatcggcggcaagtactgcctgggggagaggagaagacacaggagctgcaacacagatgactgccccccaggcagccaggacttccgggaggtgcagtgcagcgagtttgacagcatccccttccggggcaagttctacaagtggaagacctacagaggaggaggagtgaaggcctgcagcctgacctgcctggccgagggcttcaacttctacacagaaagagctgctgctgtggtggatggcaccccctgcaggccagacacagtggacatctgtgtgtctggagagtgcaagcacgtgggctgtgacagagtgctgggcagtgacctgcgggaggacaagtgccgggtgtgtggaggagatggcagcgcctgtgagaccatcgagggcgtcttcagccctgccagccctggagctggctatgaagatgtggtgtggatccccaagggctctgtgcacatcttcatccaggacctgaacctgagcctgagccacctggccctgaagggggaccaggagagcctgctgctggagggcctgcccggcaccccccagccccaccggctgcccctggccggcaccaccttccagctgcggcagggccctgaccaggtgcagagcctggaggccctgggccccatcaatgccagcctgattgtgatggtgctggccaggacagagctgcctgccctgcgctaccgcttcaatgcccccatcgcccgggacagcctgcccccctacagctggcactacgccccctggaccaagtgcagcgcccagtgtgccggcggcagccaggtgcaggccgtggagtgcaggaaccagctggacagcagcgctgtggccccccactactgcagcgcccacagcaagctgcccaagaggcagagggcctgcaacacagagccctgccccccagactgggtggtgggcaactggagcctgtgcagccgcagctgtgatgctggggtgcgcagccgctctgtggtgtgccagaggagagtgtctgctgctgaggagaaggccctggatgacagcgcctgcccccagcccaggcctcctgtgctggaggcctgccacggccccacctgccccccagagtgggccgccctggactggagcgaatgtacccccagctgtggccctggcctgcggcaccgggtggtgctgtgcaagtctgctgaccaccgggccaccctgcccccagcccactgcagccctgctgccaagcccccagccaccatgcgctgcaacctgcggcgctgccccccagcccgctgggtggccggggagtggggcgagtgcagcgcccagtgtggggtgggccagaggcagaggtctgtgcgctgcaccagccacacaggccaggccagccatgagtgcacagaggccctgcggccccccaccacccagcagtgtgaggccaagtgtgacagccccaccccaggagatggccctgaggagtgcaaggatgtgaacaaggtggcctactgccccctggtgctgaagttccagttctgcagccgggcctacttccggcagatgtgctgcaagacctgccacggccactag

SEQ ID NO: 220882 - DNA, 3312 bp, Artificial Sequence
  derived and/or modified sequence
atggcccccgcctgccagatcctgcggtgggccctggccctgggccttgggctgatgttcgaagtgacacatgcgttcaggtctcaggatgaattcttaagctccctggagagttatgaaatcgcgtttcctacacgggtggaccacaatggggctttgctggctttttcccctcctccacctagacgccagcgaagaggaacaggggccaccgcagaatccaggctgttctacaaagttgcatcacccagtactcactttctcctgaacttgacaagaagctctcgcttgttagcgggccacgtgtctgtggagtattggaccagggaaggcctggcttggcagagggccgctagaccccattgcctgtacgctggtcatctgcagggacaggcctcttcaagtcacgtggctatctccacatgcggcggtctccatggcctgatcgttgcagatgaggaggaatacctgatcgaacccttgcacgggggaccgaagggctcaagatctcctgaagagagcggtcctcacgtggtgtacaaaagatccagtctccgtcacccacatctcgacaccgcttgtggggttcgcgacgagaaaccatggaagggaagaccatggtggctaaggacacttaagccgccacctgcacggccgctagggaacgaaacagaaagggggcaacccggcttaaaaagatccgtgtcccgcgagcggtatgtggaaaccttggtcgtcgcagacaaaatgatggtcgcttaccatgggcgaagagacgttgagcagtatgtgctcgctattatgaatatcgtggccaaacttttccaggattcatcactcggatcgacggtcaatattttggtgactcggctcatcctcctcaccgaagatcagcctacgcttgagattacccatcacgctgggaaatctctcgactctttctgtaagtggcagaagagcatcgtgaatcattcaggccatggaaacgcaatcccagagaacggggtggctaatcatgacacagcagtgctgataacaaggtatgacatatgcatttataagaacaaaccctgcggcaccctggggttggcaccagtgggaggaatgtgcgagcgcgaaaggagttgctctgttaatgaggacatcggcctggctacagccttcactatcgcgcatgagattgggcacacatttggaatgaaccacgatggggtcggaaattcctgcggcgccagaggtcaagacccagcaaagctgatggcggcccacatcactatgaagacaaaccccttcgtgtggagcagttgttcccgcgactatatcacgagttttctagattccggcctgggtctctgtctgaacaaccggcctccacgacaggatttcgtctatcccacggtcgctcccggccaagcttatgacgcagatgaacagtgcagatttcagcatggagtgaagagcaggcagtgtaagtatggggaggtctgtagcgaactctggtgtctgtccaagtcaaataggtgcatcacgaattctattcccgcggctgagggcaccttatgccaaacacacacaatcgataagggctggtgttataaacgtgtgtgcgtccctttcgggagcagacccgagggcgtcgatggagcttggggcccatggaccccctggggggactgctctcgtacatgtggcggtggagtgagttcgtcatcccggcactgcgacagtccacggccaaccataggcggtaagtactgcctgggcgagagaagacggcaccgcagttgcaataccgatgactgtcccccaggctctcaagacttccgggaggtgcagtgcagcgaattcgatagcatccctttcaggggcaaattctataaatggaagacatatcggggaggaggtgttaaggcctgtagcctgacgtgtctcgccgaagggtttaatttctacacagagcgcgcagctgcagttgtggacggtaccccttgtaggccagataccgtggacatctgcgtgagcggggagtgcaaacacgttgggtgtgaccgggtgctgggttccgacttacgggaagataaatgtcgcgtgtgtggaggggatggttccgcttgtgagaccattgagggcgttttctcacccgcatcccctggggctggttatgaagatgtcgtctggattccaaagggatctgtccacatcttcattcaagacctgaatctgagcctgagtcacttggccctcaaaggcgatcaggaaagcctgctccttgagggcctccctggcaccccacagccccaccgcctgcctctggccgggaccacctttcagctcaggcaaggccccgaccaggttcagtctctggaagccctcggcccaatcaatgcaagtctgatcgtcatggtcctcgctcggacagaattgcctgccttaagatataggtttaacgccccgatcgctcgtgactcattacccccatactcttggcactatgctccatggacgaaatgctccgcacagtgtgccggtggatctcaggtgcaggctgtggagtgccgcaatcaacttgacagcagcgccgtggctccacactattgttcggcacatagcaaattaccgaagcgacagcgcgcctgtaacaccgaaccctgtcctcccgactgggtggtgggtaattggagcttgtgctccagatcgtgcgacgctggcgtacggtcaagatccgtggtctgtcagagacgcgtctcggcggctgaggaaaaagcgctggatgattccgcctgccctcaacctcgcccgcccgtcctcgaagcgtgccacggcccgacctgccctccagaatgggcagctctggactggtccgaatgcaccccttcctgtggcccaggcctccgtcatagggttgtactgtgcaagtctgccgatcaccgagcgactttgcctccggctcattgttcccccgctgccaagccccctgctacaatgcgatgtaacctcagaaggtgtcctcctgcccggtgggtcgcaggagaatggggtgagtgcagcgctcaatgcggcgtgggccagcgacaaaggtctgtgaggtgtacatctcatactggccaagcctcccacgagtgcacggaagctctgagacccccaaccacgcagcaatgcgaggctaaatgcgattcgccgacgcccggagacggaccggaagaatgcaaagatgttaacaaggtcgcatactgccccctggtgcttaagttccagttttgcagccgagcttattttcgtcagatgtgctgcaagacatgtcatggacactag

SEQ ID NO: 220883 - DNA, 3312 bp, Artificial Sequence
  derived and/or modified sequence
atggcgccagcttgccagattttaaggtgggcacttgccctgggcctgggactgatgttcgaagtaacgcatgccttcaggagccaggatgagttcctgtcctcgcttgagtcctatgaaatcgccttccctacccgtgtggatcacaatggagcgctcctggcttttagccctccgcctcctcggaggcaacgaagaggtacaggagccaccgctgaatcaagactgttctataaagtggccagtccgagcacacacttcctgctgaacctcactagatcatcaagactactcgcagggcacgtttcagtggagtattggacccgcgaggggctcgcttggcagcgggcagcacgaccacattgcttatatgccggacaccttcagggccaggcctctagcagccatgtggcaatcagcacatgtggagggctccatggactaattgtagccgacgaggaagaatatctcatagagccattacatgggggtcccaaaggtagccgctcaccggaagagagcggcccacacgtggtatataagagatcatcacttcggcacccccacttagacaccgcatgcggggtcagggacgagaagccatggaagggtcgaccatggtggctgcgcactctgaagccccctcccgctagacctctcggcaacgagacagaacgaggccagcctggactgaaacgcagtgtgagtcgggaaaggtatgtggaaacccttgtggtggctgacaaaatgatggtagcttatcacgggcgaagggatgttgagcagtacgttctggccattatgaatatcgttgccaaattattccaagattctagcctgggatccactgtgaacattctcgtgactcggcttattctgttaactgaggaccagcccactctcgaaataactcatcatgccggtaagtcccttgactccttctgtaagtggcagaagagtatcgtgaatcacagtggacatgggaatgccattccagagaatggagtggctaatcatgacaccgcggtgctgataacacgttacgatatttgcatctataagaataaaccttgcgggactctgggtcttgccccagtcggtggcatgtgcgagcgcgagcgctcctgcagcgtcaacgaggacataggtctggcaacagcctttactatagctcacgaaataggacacaccttcggcatgaatcatgatggggttggcaactcctgtggagcccgaggtcaggaccccgctaagttaatggctgcgcacattaccatgaagacgaacccgtttgtgtggtcttcttgttcacgagactacataactagttttttggactcaggtctggggctgtgtctgaacaacaggcctcctcggcaggactttgtttatccgacggtggcgcctggccaggcttacgatgcagatgagcagtgtcggttccagcatggcgttaagtcccggcagtgtaagtatggggaagtctgtagcgagctttggtgtctatccaagagcaataggtgtatcactaactcaatcccggctgccgaagggaccttatgtcaaacacataccattgacaagggttggtgttacaaacgggtgtgtgtacccttcggatccaggcccgaaggagtcgatggtgcatgggggccttggactccatggggtgactgttccagaacctgcggcggaggcgtgagtagttcctccagacactgtgacagtcctcggcctacaataggaggcaagtattgcctgggcgaaaggcggaggcacaggtcctgcaatactgatgattgcccacctggaagtcaggatttcagagaagtgcagtgctcagagtttgattctatccctttccgcggtaaattctataagtggaaaacttaccggggaggcggagtcaaagcctgctctcttacatgtctggccgaaggatttaatttttatacagaacgcgctgccgcagtggttgacggtacaccctgcagacccgacacagttgacatctgcgtatctggagaatgcaaacacgttggatgtgatagagtgctgggtagcgatctccgggaggacaaatgtagggtgtgtgggggagatggttccgcctgtgaaaccattgagggagtgttttcgccagcctcacctggtgccggatacgaggatgtggtctggatcccaaaggggagcgtgcacatcttcattcaagacctgaatctttcactctctcatctcgctctgaagggcgatcaggagtcactgctgctggaagggcttcctgggactccccagccacatcgcttaccacttgccggaaccacattccagctccgccagggcccagatcaggtacagtccctagaagccctgggaccaataaacgcatccctgatcgttatggtgctggcacgtaccgaacttcccgctttgcgttatcgcttcaacgcaccaatagcgagagatagcctccctccatattcttggcactatgccccatggactaaatgcagcgcgcagtgcgctggaggatcgcaggtgcaggccgtcgaatgtaggaaccagcttgatagcagtgctgtcgctccccattactgctccgctcattccaaactgcccaagcgacagagagcatgtaacaccgagccatgcccccctgattgggtcgtaggcaattggtccctctgttcacggagctgtgatgccggagtccgctccaggtctgtcgtgtgccagcgcagagtatcagccgcagaggaaaaagccctggatgacagcgcatgtccacaacccagaccccctgtcctggaggcttgccatggccctacttgccccccagagtgggcggctctggattggagtgaatgcacgccaagctgcggacctgggctgcgccaccgcgtcgtcttgtgcaaatcagctgatcatagagccaccctgccacccgcacactgtagtccagcagcaaaaccgcctgccacgatgcgttgtaacttgcgccgttgcccccctgcccgttgggttgctggcgaatggggcgaatgctccgctcagtgcggagtggggcaaagacaacgcagtgtgaggtgcacgtctcacactgggcaggccagccatgaatgcaccgaggctctgcgaccaccaaccactcagcagtgcgaagccaagtgcgattctcctacacccggtgacggcccagaagagtgcaaggacgtcaacaaggtcgcctattgcccgttagttctgaaatttcagttttgctctagggcttacttcaggcaaatgtgctgtaagacttgtcatggccattag

SEQ ID NO: 220884 - DNA, 3312 bp, Artificial Sequence
  derived and/or modified sequence
atggctccagcatgccagattctccgttgggcattggcacttggtcttggactcatgttcgaggtcacgcacgcctttagatcccaggatgaattcctctcaagtctcgagtcttacgagatcgcgtttcctacaagggtagaccacaacggagccctgcttgccttcagtccacccccccctagacgtcaaagacgaggaactggcgctactgcagagtcccggcttttttataaggtcgccagcccaagcacgcatttccttttaaacctaacaaggtcctcccgacttctggccggacatgtttccgtcgagtactggacgcgggaggggcttgcttggcaaagggccgcgcggcctcattgtctatatgcaggacatcttcaggggcaggcctctacttcgcatgtggccatctctacgtgtggcggcctgcatggcctgattgttgccgatgaggaggagtacttaatcgagcctcttcatggaggaccgaaaggctccagatcacctgaggagagcggcccacacgtggtatataagagaagctctctaaggcacccccatctggataccgcttgtggcgtgagggatgaaaagccctggaaggggaggccttggtggttgcgtaccctgaagccaccccccgcgcgccctctggggaacgagacggaaagaggccagcctgggctcaaaaggtctgtgagcagagagaggtatgtggagaccctggttgtagccgacaaaatgatggtcgcctaccacgggcggcgggacgttgaacaatacgttctggccatcatgaacatcgtcgccaaactttttcaagattcaagtctcggaagcactgtaaacattctggtgacccgtcttatcctgttgacggaagaccagcctaccctggagatcacacaccacgctggcaagtctctcgactcattttgcaagtggcagaagagcattgtcaatcactctggacatggcaatgctatccccgagaatggagtggctaatcatgatactgcagtcctcataaccagatatgacatttgtatctataagaataaaccctgtggtactctcgggctcgctccagtgggcggaatgtgtgagcgcgagcgttcctgttctgtgaacgaggacattggcttggctaccgccttcactatcgcacacgagattggccatactttcggcatgaaccacgacggggtgggcaatagctgcggcgctcggggccaggaccccgccaaactgatggcggcccacataacaatgaagacaaatcccttcgtctggtcttcctgttcacgggattatatcaccagctttctcgattcaggattgggactgtgtctgaataacaggccccctaggcaggattttgtttacccaaccgtagcccctggtcaggcgtatgatgcagacgaacaatgccgctttcagcacggggtaaagtctcgccagtgtaaatacggagaggtttgtagcgaactgtggtgtttgtctaagagcaatcggtgcataactaattccatccccgccgccgaaggaacactctgccagacacacacaattgacaaggggtggtgttacaaaagggtgtgtgttccatttggctctagacccgaaggggtcgatggtgcttgggggccttggaccccatggggggactgtagtaggacatgtgggggaggagtcagctcctcatcaaggcattgcgacagtcctaggccaaccattggcggaaagtattgcttaggagagaggcgcaggcaccggtcttgtaatactgacgattgtccccccggctcacaggacttcagggaggtacaatgcagcgagttcgacagcatacccttcagggggaagttctataagtggaaaacctataggggcggcggtgtgaaagcatgttccttaacctgcctggctgagggattcaacttttatactgagcgcgcagccgccgtggtcgatggaaccccctgcaggcctgacacagtggacatatgcgtgagtggagaatgcaagcacgtgggctgcgaccgcgtgctgggctcagacttacgagaagacaagtgtcgcgtttgcggaggtgacggctccgcttgtgaaaccatcgaaggcgtgttctcacctgcaagcccaggagccgggtatgaggatgtggtgtggattccaaaggggtctgtgcacattttcatacaagacctaaatctcagcctttcccaccttgccctgaaaggggaccaggaatctctgcttctggaaggactgcctggcactccacagccacataggctcccactggccggcactacgtttcaactgcgtcagggaccagaccaggtccagtcattggaggccctgggcccaatcaatgcatctctgattgtgatggtgttagcgaggacggaattacctgctttgcggtaccgcttcaacgcacctatagcacgggattctttgccaccctactcttggcactacgcgccgtggactaagtgttctgctcagtgtgccggcggatcccaagtgcaagccgtggagtgccggaaccagctggattctagtgccgtggcacctcactattgctccgcacattccaagttacctaaacggcaacgtgcctgtaacactgagccttgtcctcccgattgggtggtgggcaactggtctctgtgtagcaggtcatgcgacgcaggagtcagatcccggtccgtggtctgtcagaggcgcgtgtccgcagctgaggagaaggccctcgatgattccgcctgcccccagccgagaccgcccgtgctagaggcatgccacgggcccacctgtcctccagagtgggccgccctggactggtctgagtgtacacccagttgcggccccgggctccgtcaccgcgtagtcctgtgcaaaagcgcggaccatcgagccaccctccccccagcccattgtagcccagcggctaaaccccctgctacaatgcgctgcaacctccgaagatgtcctcccgccaggtgggttgcaggggagtggggtgaatgctctgctcagtgtggggtggggcagcgacagcgatctgttcgctgcaccagtcacaccgggcaagcctctcatgaatgcacagaggcactcaggccccccacgacgcagcagtgtgaggctaagtgtgacagcccaacacctggagacggtcctgaggaatgtaaagatgtgaataaagtggcttactgcccactggtgctgaaattccagttttgctctcgagcatatttcagacagatgtgctgtaagacctgtcatggccactag

SEQ ID NO: 220885 - DNA, 3312 bp, Artificial Sequence
  derived and/or modified sequence
atggccccagcctgccagatcctgcgctgggccctggccctgggcctgggcctgatgtttgaggtgacccacgccttccgcagccaggatgagttcctgagcagcctggagagctatgaaattgccttccccaccagggtggaccacaacggggccctgctggccttcagccccccaccaccccggcggcagaggcggggcaccggggccacagctgagagccgcctcttctacaaggtggccagccccagcacccacttcctgctgaacctgaccaggagcagccggctgctggccggccacgtgtctgtggagtactggacccgggagggcctggcctggcagagagctgcccggccccactgcctgtatgccggccacctgcagggccaggccagcaccagccacgtggccatcagcacctgtggcggcctgcacggcctgattgtggctgatgaggaggagtacctgattgagcccctgcacggcggccccaagggcagccgcagccctgaggagagcggcccccacgtggtgtacaagaggagcagcctgcggcacccccacctggacacagcctgtggggtgagagatgagaagccctggaagggccggccctggtggctgcggaccctgaagcccccaccagcccggcccctgggcaatgaaacagagcggggccagcccggcctgaagaggtctgtgtcccgggagcgctacgtggagaccctggtggtggccgacaagatgatggtggcctaccatggaagaagagatgtggagcagtatgtgctggccatcatgaacatcgtggccaagctgttccaggacagcagcctgggcagcacagtgaacatcctggtgaccaggctcatcctgctgacagaggaccagcccaccctggagatcacccaccacgccggcaagagcctggacagcttctgcaagtggcagaagagcatcgtgaaccacagcggccatggaaatgccatcccagaaaatggagtggccaaccacgacacagctgtgctgatcaccaggtatgacatctgcatctacaagaacaagccctgtggcaccctgggcctggcccctgtgggcggcatgtgtgagcgggagaggagctgcagcgtgaatgaagacatcggcctggccacagccttcaccatcgcccacgagatcggccacaccttcggcatgaaccatgatggagtgggcaacagctgtggggcccggggccaggaccctgccaagctgatggccgcccacatcaccatgaagaccaacccctttgtgtggagcagctgcagccgggactacatcaccagcttcctggacagcggcctgggcctgtgcctgaacaacagaccaccccggcaggactttgtgtaccccaccgtggcccctggccaggcctatgatgctgatgagcagtgccgcttccagcacggcgtgaagagccggcagtgcaagtacggggaggtgtgcagcgagctgtggtgcctgagcaagagcaaccgctgcatcaccaacagcatcccagctgctgagggcaccctgtgccagacccacaccatcgacaagggctggtgctacaagagggtgtgtgtgcccttcggcagcaggcctgagggcgtggatggagcctggggcccctggaccccctggggagactgcagcaggacctgtggcggcggcgtgagcagcagcagccgccactgtgacagcccccggcccaccatcggcggcaagtactgcctgggggagaggagaagacacaggagctgcaacacagatgactgccccccaggcagccaggacttccgggaggtgcagtgcagcgagtttgacagcatccccttccggggcaagttctacaagtggaagacctacagaggaggaggagtgaaggcctgcagcctgacctgcctggccgagggcttcaacttctacacagaaagagctgctgctgtggtggatggcaccccctgcaggccagacacagtggacatctgtgtgtctggagagtgcaagcacgtgggctgtgacagagtgctgggcagtgacctgcgggaggacaagtgccgggtgtgtggaggagatggcagcgcctgtgagaccatcgagggcgtcttcagccctgccagccctggagctggctatgaagatgtggtgtggatccccaagggctctgtgcacatcttcatccaggacctgaacctgagcctgagccacctggccctgaagggggaccaggagagcctgctgctggagggcctgcccggcaccccccagccccaccggctgcccctggccggcaccaccttccagctgcggcagggccctgaccaggtgcagagcctggaggccctgggccccatcaatgccagcctgattgtgatggtgctggccaggacagagctgcctgccctgcgctaccgcttcaatgcccccatcgcccgggacagcctgcccccctacagctggcactacgccccctggaccaagtgcagcgcccagtgtgccggcggcagccaggtgcaggccgtggagtgcaggaaccagctggacagcagcgctgtggccccccactactgcagcgcccacagcaagctgcccaagaggcagagggcctgcaacacagagccctgccccccagactgggtggtgggcaactggagcctgtgcagccgcagctgtgatgctggggtgcgcagccgctctgtggtgtgccagaggagagtgtctgctgctgaggagaaggccctggatgacagcgcctgcccccagcccaggcctcctgtgctggaggcctgccacggccccacctgccccccagagtgggccgccctggactggagcgaatgtacccccagctgtggccctggcctgcggcaccgggtggtgctgtgcaagtctgctgaccaccgggccaccctgcccccagcccactgcagccctgctgccaagcccccagccaccatgcgctgcaacctgcggcgctgccccccagcccgctgggtggccggggagtggggcgagtgcagcgcccagtgtggggtgggccagaggcagaggtctgtgcgctgcaccagccacacaggccaggccagccatgagtgcacagaggccctgcggccccccaccacccagcagtgtgaggccaagtgtgacagccccaccccaggagatggccctgaggagtgcaaggatgtgaacaaggtggcctactgccccctggtgctgaagttccagttctgcagccgggcctacttccggcagatgtgctgcaagacctgccacggccactag

SEQ ID NO: 220886 - DNA, 3312 bp, Artificial Sequence
  derived and/or modified sequence
atggcccccgcctgccagatcctgcggtgggccctggccctgggcttgggtcttatgttcgaggtaactcacgcttttcgttctcaggacgaatttctgtcctcccttgaatcatatgagatcgccttccctacccgggtggatcataatggagccctgctggcattctctcctccgcccccccggcggcagcggcgaggaactggcgccacggctgagtccaggctgttttacaaagtggctagcccctcaactcacttcctgctgaacttaaccagatctagcaggctcttagcgggccatgttagcgtagaatattggacgagggaggggttagcatggcagagagcagctcgaccccattgtctgtatgctggacatcttcagggccaagcaagcacttcgcacgtggcaattagcacatgtggaggactgcacggactgatagttgccgatgaggaagagtacctgatcgaacccctccatggcgggcccaagggaagcagaagcccagaagagtcaggaccgcatgtggtgtacaaacgaagttcattgcgacacccccacctggatactgcctgtggcgtgagggatgaaaagccctggaagggacgtccctggtggcttcggacactgaaacctccacctgccaggcccctgggaaacgagaccgagcgtggacaacccggccttaaacgcagcgtcagcagagaaagatacgtggaaacgctcgtggtcgctgataaaatgatggtggcctatcacggaaggagggacgtagaacagtatgtgctggcgatcatgaacatcgtagcaaaattgttccaggactctagtctgggctccacagtgaatatcctcgtaaccagacttattctcttgaccgaggaccagccaacgttggaaattacccatcacgctggaaagtcccttgactccttttgcaagtggcagaaatcaattgtgaatcactcaggccatgggaacgctattccagagaatggcgtagctaatcacgacacagcagtcttgattaccagatatgatatttgtatttacaaaaataaaccctgtggaacgttggggctggcgcctgtcggtggtatgtgcgaaagggaaagaagttgcagtgtcaacgaggacattggcctggctactgctttcacaattgcccacgaaataggtcatacctttggaatgaaccatgacggagtgggtaactcttgcggagctcgaggccaggatcccgccaagctgatggcggcccatataacaatgaaaaccaatcctttcgtgtggtctagttgttcacgtgattatatcacctccttcctggattctggactaggactctgtctgaataacagacccccaaggcaggacttcgtgtaccctaccgtggctccgggccaggcctatgatgccgatgaacagtgcaggtttcaacacggcgttaaatcaaggcaatgcaaatacggcgaggtttgtagtgaattatggtgtctgtccaaaagcaacagatgcattaccaacagtatcccagctgctgagggcaccctgtgccagacccacaccatcgataagggatggtgctacaagcgcgtgtgtgtgccattcggctcacgtcctgagggggtcgatggggcctggggaccttggaccccctggggagattgcagccgcacatgtggtgggggagtgtcctcctcgtcgcgtcactgtgacagtccccggcccactatcggaggtaagtattgcttaggagaacgcagacgccaccggtcctgtaatacagacgattgtccacctgggagtcaggacttccgagaggtgcagtgcagtgaattcgacagcattccttttaggggaaagttttacaagtggaaaacatatagagggggtggcgtaaaggcttgcagtttgacctgcctggccgagggattcaacttctataccgagcgtgcggctgctgttgtggacggcacaccttgcaggccggacactgtggacatctgcgttagtggggagtgtaagcacgtgggttgcgacagagtcctgggatccgatttacgagaggataagtgtagagtctgcggtggtgacggcagcgcttgcgaaacaatcgaaggagtttttagcccggcatcacctggcgccgggtacgaagacgttgtgtggatccccaagggaagtgtgcacatctttatccaggacttgaatctatccctatcccaccttgccttgaagggtgaccaagagtcgctgttgttggaggggcttcccggaaccccacagccccacagactgccactggctggaacgacgttccagttgcgacaaggaccagatcaggtccagtctctcgaagctctgggaccgattaacgccagcttgattgtcatggtgctggcccggaccgagttgccagcattgcggtataggtttaacgccccaatagcaagggacagcctgccgccatacagttggcactacgcgccctggaccaaatgctcagcccaatgcgcaggtgggtcacaagttcaagctgtagaatgtcgaaatcagctggattcatctgctgtggctccacattattgctccgcccattccaagctgcccaagcggcagcgagcgtgtaacaccgagccttgcccgcctgactgggtagtgggaaattggagcttgtgtagtaggagctgcgacgccggggtacggtctagaagcgtggtgtgtcagagaagagtgtcagctgcagaagagaaggccctggacgacagcgcgtgtcctcaacctcgccctccggtattggaggcgtgccacggtccaacatgcccgccagaatgggccgcgctggactggtccgagtgcacgcctagttgtggtcccggactcagacaccgagtggttctatgcaagagcgcagaccatcgcgctacactgccacccgcccactgcagtcctgccgccaaaccacccgccactatgaggtgtaatctccgaaggtgcccacccgcccggtgggttgccggcgaatggggcgaatgctccgcccagtgcggggtgggccagcgccagcgatccgttaggtgtacttcacataccggacaggcttcccacgagtgtaccgaggcgctgcggccacctactactcagcagtgcgaagccaagtgcgactcccccaccccaggggacgggcccgaagagtgcaaagacgtgaataaagtagcttactgtcctctggtgttgaagtttcaattttgtagccgcgcctactttaggcagatgtgctgtaaaacctgtcacgggcactag

SEQ ID NO: 220887 - DNA, 3312 bp, Artificial Sequence
  derived and/or modified sequence
atggcgccagcctgtcaaattctccggtgggccctggcgcttggcctggggctaatgtttgaagtgacacatgcattcaggagccaggatgaattcctctcctctctggaaagttacgagattgccttccccactcgcgttgaccataacggcgcactactggcattctcgccccctccacctagacgtcaaaggagagggacgggtgctactgcagagagtcgcctcttctataaggtggcgagcccatcgacccactttctcttgaacctgaccaggtcttcgaggttgctggctggtcatgtgtctgtggaatattggactcgggaaggcctggcatggcagcgggcagcccgaccacattgcctctacgccggacacctccagggtcaggccagcacgtctcatgtagccatatctacctgtggaggtctgcacgggctgattgtggccgacgaagaagagtatttaatcgagcctcttcacgggggtccaaaaggatcccgtagccccgaagagagcggcccacatgtcgtatataaaagaagcagcctgaggcatccccacctggatacagcttgcggcgtacgcgatgagaagccctggaaaggccgaccttggtggctaagaaccttaaagcccccaccagcgaggccattaggaaatgaaaccgagagaggtcaacctgggttgaaacggtctgtctcaagagaaagatatgtggagactctggtggtagcggacaagatgatggttgcctaccatggccgacgagacgttgagcagtatgtcctcgccatcatgaacatcgtcgccaagctgttccaggattcatctctgggctccacagttaatatcttggtcaccagactcatactgctgactgaggatcagcccactctcgaaataacacaccatgcgggaaaatccctggatagtttctgcaaatggcagaaatccatcgtgaaccacagcggacacggaaatgctattcctgagaatggtgttgctaaccatgatactgccgtgctgataaccaggtatgacatctgcatctataaaaataagccttgtggaaccctgggattggctcccgttggcggaatgtgcgaaagggagcggtcttgctcagtgaacgaggacataggccttgctacagctttcacaattgcgcacgagataggacatactttcgggatgaatcacgacggagtgggaaattcatgtggagcgagaggacaggacccagctaagctcatggcagcccacatcacaatgaagaccaatcctttcgtctggtcttcttgttcccgcgactacattacatccttcttggattctggtctgggcctatgtctgaacaatcggccacccaggcaagacttcgtctatccaactgtggccccaggtcaggcttacgatgccgatgaacagtgccgcttccaacatggcgtgaagagccgccagtgcaagtatggtgaagtgtgctcggaactgtggtgcctgagcaagagcaataggtgcattacaaacagcatcccggctgccgagggcacactgtgccaaacacatacaatagataaaggatggtgctataagcgcgtatgcgtgccgttcggttcccggccagaaggagtggacggcgcatgggggccatggacaccatggggcgattgctccagaacatgtgggggaggggtgtctagcagcagtcgtcattgcgactcaccacgaccaactattggaggaaagtattgtctcggagaaagacgaagacatcggtcatgcaataccgatgactgtcccccaggcagccaagatttcagggaggtgcagtgttcagagtttgattcgattccatttagagggaaattttacaaatggaagacataccggggagggggagtaaaagcctgcagcctgacttgcttagcagaaggctttaatttttatactgaacgtgcagccgcagtggtggacggcacgccctgtcggcctgacaccgtcgatatctgtgtgtccggcgagtgtaagcacgtgggctgtgatcgagtgctcggctctgacctgcgagaagataaatgccgcgtttgtggaggggacggatcagcatgtgaaaccatcgagggtgtattcagtccagcatcccctggggcagggtacgaagatgttgtctggatccctaaagggagtgtgcatatatttatacaggatctgaatctgtccctttcacaccttgcccttaaaggggatcaggaatcgctgctcctggaggggcttcccggaaccccacaacctcacagactcccactcgcaggcactaccttccaactacggcagggccctgaccaagtccagtcactcgaagctctgggcccaataaatgccagtctcatcgtgatggtcttagccaggactgagcttcccgcactgaggtaccggttcaatgcccctatagcacgagattcgctgccaccttactcgtggcattacgccccatggactaagtgctcagcccagtgcgccggaggaagccaggttcaggccgtcgagtgtagaaaccaactcgatagcagcgccgtagctccacactactgtagtgcccatagcaagctgcccaagcgacaacgggcttgcaacacagagccttgcccaccagattgggtcgtgggaaactggagcctatgttcaagatcctgcgacgcgggtgtgcgcagcaggtccgtagtgtgtcagagacgcgtctctgctgccgaggagaaagccctggatgattcagcatgcccccagccaaggccccctgtgctggaggcttgccatgggccaacttgccctcccgaatgggccgcattagactggagcgagtgcaccccaagctgtggacccggactccgccatagggtcgttctatgcaaatctgccgatcaccgggctacactcccgccagcacattgctcaccggcagcgaagcctcccgctactatgcgctgtaacctacgacggtgccctcctgctcggtgggtggccggtgaatggggagagtgtagcgcacaatgcggcgtgggtcagcgtcagagaagtgtaagatgtacaagccacaccggacaggctagccacgagtgcaccgaggctctgaggcccccaactacacagcagtgcgaggccaagtgcgacagccccactcccggagatggtccagaggaatgcaaggatgtgaataaggtggcctattgcccccttgtgttgaaatttcagttttgctcgcgcgcatattttcggcaaatgtgttgtaagacgtgtcacggtcattag

SEQ ID NO: 220888 - DNA, 3312 bp, Artificial Sequence
  derived and/or modified sequence
atggcccccgcctgccagatcctgagatgggccctggccctgggcctgggcctgatgttcgaggtgacccacgccttcagaagccaggacgagttcctgagcagcctggagagctacgagatcgccttccccaccagagtggaccacaacggcgccctgctggccttcagcccccccccccccagaagacagagaagaggcaccggcgccaccgccgagagcagactgttctacaaggtggccagccccagcacccacttcctgctgaacctgaccagaagcagcagactgctggccggccacgtgagcgtggagtactggaccagagagggcctggcctggcagagagccgccagaccccactgcctgtacgccggccacctgcagggccaggccagcaccagccacgtggccatcagcacctgcggcggcctgcacggcctgatcgtggccgacgaggaggagtacctgatcgagcccctgcacggcggccccaagggcagcagaagccccgaggagagcggcccccacgtggtgtacaagagaagcagcctgagacacccccacctggacaccgcctgcggcgtgagagacgagaagccctggaagggcagaccctggtggctgagaaccctgaagcccccccccgccagacccctgggcaacgagaccgagagaggccagcccggcctgaagagaagcgtgagcagagagagatacgtggagaccctggtggtggccgacaagatgatggtggcctaccacggcagaagagacgtggagcagtacgtgctggccatcatgaacatcgtggccaagctgttccaggacagcagcctgggcagcaccgtgaacatcctggtgaccagactgatcctgctgaccgaggaccagcccaccctggagatcacccaccacgccggcaagagcctggacagcttctgcaagtggcagaagagcatcgtgaaccacagcggccacggcaacgccatccccgagaacggcgtggccaaccacgacaccgccgtgctgatcaccagatacgacatctgcatctacaagaacaagccctgcggcaccctgggcctggcccccgtgggcggcatgtgcgagagagagagaagctgcagcgtgaacgaggacatcggcctggccaccgccttcaccatcgcccacgagatcggccacaccttcggcatgaaccacgacggcgtgggcaacagctgcggcgccagaggccaggaccccgccaagctgatggccgcccacatcaccatgaagaccaaccccttcgtgtggagcagctgcagcagagactacatcaccagcttcctggacagcggcctgggcctgtgcctgaacaacagaccccccagacaggacttcgtgtaccccaccgtggcccccggccaggcctacgacgccgacgagcagtgcagattccagcacggcgtgaagagcagacagtgcaagtacggcgaggtgtgcagcgagctgtggtgcctgagcaagagcaacagatgcatcaccaacagcatccccgccgccgagggcaccctgtgccagacccacaccatcgacaagggctggtgctacaagagagtgtgcgtgcccttcggcagcagacccgagggcgtggacggcgcctggggcccctggaccccctggggcgactgcagcagaacctgcggcggcggcgtgagcagcagcagcagacactgcgacagccccagacccaccatcggcggcaagtactgcctgggcgagagaagaagacacagaagctgcaacaccgacgactgcccccccggcagccaggacttcagagaggtgcagtgcagcgagttcgacagcatccccttcagaggcaagttctacaagtggaagacctacagaggcggcggcgtgaaggcctgcagcctgacctgcctggccgagggcttcaacttctacaccgagagagccgccgccgtggtggacggcaccccctgcagacccgacaccgtggacatctgcgtgagcggcgagtgcaagcacgtgggctgcgacagagtgctgggcagcgacctgagagaggacaagtgcagagtgtgcggcggcgacggcagcgcctgcgagaccatcgagggcgtgttcagccccgccagccccggcgccggctacgaggacgtggtgtggatccccaagggcagcgtgcacatcttcatccaggacctgaacctgagcctgagccacctggccctgaagggcgaccaggagagcctgctgctggagggcctgcccggcaccccccagccccacagactgcccctggccggcaccaccttccagctgagacagggccccgaccaggtgcagagcctggaggccctgggccccatcaacgccagcctgatcgtgatggtgctggccagaaccgagctgcccgccctgagatacagattcaacgcccccatcgccagagacagcctgcccccctacagctggcactacgccccctggaccaagtgcagcgcccagtgcgccggcggcagccaggtgcaggccgtggagtgcagaaaccagctggacagcagcgccgtggccccccactactgcagcgcccacagcaagctgcccaagagacagagagcctgcaacaccgagccctgcccccccgactgggtggtgggcaactggagcctgtgcagcagaagctgcgacgccggcgtgagaagcagaagcgtggtgtgccagagaagagtgagcgccgccgaggagaaggccctggacgacagcgcctgcccccagcccagaccccccgtgctggaggcctgccacggccccacctgcccccccgagtgggccgccctggactggagcgagtgcacccccagctgcggccccggcctgagacacagagtggtgctgtgcaagagcgccgaccacagagccaccctgccccccgcccactgcagccccgccgccaagccccccgccaccatgagatgcaacctgagaagatgcccccccgccagatgggtggccggcgagtggggcgagtgcagcgcccagtgcggcgtgggccagagacagagaagcgtgagatgcaccagccacaccggccaggccagccacgagtgcaccgaggccctgagaccccccaccacccagcagtgcgaggccaagtgcgacagccccacccccggcgacggccccgaggagtgcaaggacgtgaacaaggtggcctactgccccctggtgctgaagttccagttctgcagcagagcctacttcagacagatgtgctgcaagacctgccacggccactag

SEQ ID NO: 220889 - DNA, 4230 bp, Artificial Sequence
  derived and/or modified sequence
gctcagtgctgaagaccagcccggctcctcctctttgacccctccctgcccaggctccaaagaagaagaaaccaaggcccagagagggaggcccaggtgcagggagcaggcgagggaaggatccgtacaggggcccaacactactccaccaaccgaagcccccaaaaggagcccggtgatgctgcgaaggctgtgaacaggggaggcggcactgtgggggctgccggcagccggggctggggagagacatgtggacacgtggcctctatggctcccgcctgccagatcctccgctgggccctcgccctggggctgggcctcatgttcgaggtcacgcacgccttccggtctcaagatgagttcctgtccagtctggagagctatgagatcgccttccccacccgcgtggaccacaacggggcactgctggccttctcgccacctcctccccggaggcagcgccgcggcacgggggccacagccgagtcccgcctcttctacaaagtggcctcgcccagcacccacttcctgctgaacctgacccgcagctcccgtctactggcagggcacgtctccgtggagtactggacacgggagggcctggcctggcagagggcggcccggccccactgcctctacgctggtcacctgcagggccaggccagcacctcccatgtggccatcagcacctgtggaggcctgcacggcctgatcgtggcagacgaggaagagtacctgattgagcccctgcacggtgggcccaagggttctcggagcccggaggaaagtggaccacatgtggtgtacaagcgttcctctctgcgtcacccccacctggacacagcctgtggagtgagagatgagaaaccgtggaaagggcggccatggtggctgcggaccttgaagccaccgcctgccaggcccctggggaatgaaacagagcgtggccagccaggcctgaagcgatcggtcagccgagagcgctacgtggagaccctggtggtggctgacaagatgatggtggcctatcacgggcgccgggatgtggagcagtatgtcctggccatcatgaacattgttgccaaacttttccaggactcgagtctgggaagcaccgttaacatcctcgtaactcgcctcatcctgctcacggaggaccagcccactctggagatcacccaccatgccgggaagtccctggacagcttctgtaagtggcagaaatccatcgtgaaccacagcggccatggcaatgccattccagagaacggtgtggctaaccatgacacagcagtgctcatcacacgctatgacatctgcatctacaagaacaaaccctgcggcacactaggcctggccccggtgggcggaatgtgtgagcgcgagagaagctgcagcgtcaatgaggacattggcctggccacagcgttcaccattgcccacgagatcgggcacacattcggcatgaaccatgacggcgtgggaaacagctgtggggcccgtggtcaggacccagccaagctcatggctgcccacattaccatgaagaccaacccattcgtgtggtcatcctgcagccgtgactacatcaccagctttctagactcgggcctggggctctgcctgaacaaccggccccccagacaggactttgtgtacccgacagtggcaccgggccaagcctacgatgcagatgagcaatgccgctttcagcatggagtcaaatcgcgtcagtgtaaatacggggaggtctgcagcgagctgtggtgtctgagcaagagcaaccggtgcatcaccaacagcatcccggccgccgagggcacgctgtgccagacgcacaccatcgacaaggggtggtgctacaaacgggtctgtgtcccctttgggtcgcgcccagagggtgtggacggagcctgggggccgtggactccatggggcgactgcagccggacctgtggcggcggcgtgtcctcttctagccgtcactgcgacagccccaggccaaccatcgggggcaagtactgtctgggtgagagaaggcggcaccgctcctgcaacacggatgactgtccccctggctcccaggacttcagagaagtgcagtgttctgaatttgacagcatccctttccgtgggaaattctacaagtggaaaacgtaccggggagggggcgtgaaggcctgctcgctcacgtgcctagcggaaggcttcaacttctacacggagagggcggcagccgtggtggacgggacaccctgccgtccagacacggtggacatttgcgtcagtggcgaatgcaagcacgtgggctgcgaccgagtcctgggctccgacctgcgggaggacaagtgccgagtgtgtggcggtgacggcagtgcctgcgagaccatcgagggcgtcttcagcccagcctcacctggggccgggtacgaggatgtcgtctggattcccaaaggctccgtccacatcttcatccaggatctgaacctctctctcagtcacttggccctgaagggagaccaggagtccctgctgctggaggggctgcctgggaccccccagccccaccgtctgcctctagctgggaccacctttcaactgcgacaggggccagaccaggtccagagcctcgaagccctgggaccgattaatgcatctctcatcgtcatggtgctggcccggaccgagctgcctgccctccgctaccgcttcaatgcccccatcgcccgtgactcgctgcccccctactcctggcactatgcgccctggaccaagtgctcggcccagtgtgcaggcggtagccaggtgcaggcggtggagtgccgcaaccagctggacagctccgcggtcgccccccactactgcagtgcccacagcaagctgcccaaaaggcagcgcgcctgcaacacggagccttgccctccagactgggttgtagggaactggtcgctctgcagccgcagctgcgatgcaggcgtgcgcagccgctcggtcgtgtgccagcgccgcgtctctgccgcggaggagaaggcgctggacgacagcgcatgcccgcagccgcgcccacctgtactggaggcctgccacggccccacttgccctccggagtgggcggccctcgactggtctgagtgcacccccagctgcgggccgggcctccgccaccgcgtggtcctttgcaagagcgcagaccaccgcgccacgctgcccccggcgcactgctcacccgccgccaagccaccggccaccatgcgctgcaacttgcgccgctgccccccggcccgctgggtggctggcgagtggggtgagtgctctgcacagtgcggcgtcgggcagcggcagcgctcggtgcgctgcaccagccacacgggccaggcgtcgcacgagtgcacggaggccctgcggccgcccaccacgcagcagtgtgaggccaagtgcgacagcccaacccccggggacggccctgaagagtgcaaggatgtgaacaaggtcgcctactgccccctggtgctcaaatttcagttctgcagccgagcctacttccgccagatgtgctgcaaaacctgccatggccactagggggcgcgcggcacccggagccacagctggcggggtctccgccgccagccctgcagcgggccggccagagggggccccgggggggcgggaactgggagggaagggtgagacggagccggaagttatttattgggaacccctgcagggccctggctggggggatggagaggggctggctatccccccagagcccctcttcagcatccgccccttccagttcacatagtgagaccccccctccagggtgggtctggggaggggacagctgttcaccccagcaccctttgaacccacccttagggagtccccaacactccccccctcctttgatcggaatatgtactgtgaagagtaggggtggggaggtggtctgccggtgccctgccccccagcactgccctacccctccactccgagctgggggggaatctgtgtctgctatgggaggggggggggtagcaccacctccctgacaccctcccctgacctgactagggggaggatccaccccaacctctgccctgcccgccccaggggcaccccgacatccaggccaccccctcatggtgctacagaccctgccctggggcccacacactcctgccaggaagccctacatcaataaagttctgtcttgtgtagatttctacg

SEQ ID NO: 220890 - protein, 848 aa, Artificial Sequence
  derived and/or modified sequence
MDEGTGLQPGAGEQLEAPATAEAVQERCEPETLRSKSLPVLSSASCRPSLSPTSGDANPAFGCVDSSGHQELKQGPNPLAPSPSAPSTSAGLGDCNHRVDLSKTFSVSSALAMLQERRCLYVVLTDSRCFLVCMCFLTFIQALMVSGYLSSVITTIERRYSLKSSESGLLVSCFDIGNLVVVVFVSYFGGRGRRPLWLAVGGLLIAFGAALFALPHFISPPYQIQELNASAPNDGLCQGGNSTATLEPPACPKDSGGNNHWVYVALFICAQILIGMGSTPIYTLGPTYLDDNVKKENSSLYLAIMYVMGALGPAVGYLLGGLLIGFYVDPRNPVHLDQNDPRFIGNWWSGFLLCAIAMFLVIFPMFTFPKKLPPRHKKKKKKKFSVDAVSDDDVLKEKSNNSEQADKKVSSMGFGKDVRDLPRAAVRILSNMTFLFVSLSYTAESAIVTAFITFIPKFIESQFGIPASNASIYTGVIIVPSAGVGIVLGGYIIKKLKLGARESAKLAMICSGVSLLCFSTLFIVGCESINLGGINIPYTTGPSLTMPHRNLTGSCNVNCGCKIHEYEPVCGSDGITYFNPCLAGCVNSGNLSTGIRNYTECTCVQSRQVITPPTVGQRSQLRVVIVKTYLNENGYAVSGKCKRTCNTLIPFLVFLFIVTFITACAQPSAIIVTLRSVEDEERPFALGMQFVLLRTLAYIPTPIYFGAVIDTTCMLWQQECGVQGSCWEYNVTSFRFVYFGLAAGLKFVGFIFIFLAWYSIKYKEDGLQRRRQREFPLSTVSERVGHPDNARTRSCPAFSTQGEFHEETGLQKGIQCAAQTYPGPFPEAISSSADPGLEESPAALEPPS

SEQ ID NO: 220891 - DNA, 2547 bp, Artificial Sequence
  derived and/or modified sequence
atggacgagggcaccggcctgcagcccggcgccggcgagcagctggaggcccccgccaccgccgaggccgtgcaggagagatgcgagcccgagaccctgagaagcaagagcctgcccgtgctgagcagcgccagctgcagacccagcctgagccccaccagcggcgacgccaaccccgccttcggctgcgtggacagcagcggccaccaggagctgaagcagggccccaaccccctggcccccagccccagcgcccccagcaccagcgccggcctgggcgactgcaaccacagagtggacctgagcaagaccttcagcgtgagcagcgccctggccatgctgcaggagagaagatgcctgtacgtggtgctgaccgacagcagatgcttcctggtgtgcatgtgcttcctgaccttcatccaggccctgatggtgagcggctacctgagcagcgtgatcaccaccatcgagagaagatacagcctgaagagcagcgagagcggcctgctggtgagctgcttcgacatcggcaacctggtggtggtggtgttcgtgagctacttcggcggcagaggcagaagacccctgtggctggccgtgggcggcctgctgatcgccttcggcgccgccctgttcgccctgccccacttcatcagccccccctaccagatccaggagctgaacgccagcgcccccaacgacggcctgtgccagggcggcaacagcaccgccaccctggagccccccgcctgccccaaggacagcggcggcaacaaccactgggtgtacgtggccctgttcatctgcgcccagatcctgatcggcatgggcagcacccccatctacaccctgggccccacctacctggacgacaacgtgaagaaggagaacagcagcctgtacctggccatcatgtacgtgatgggcgccctgggccccgccgtgggctacctgctgggcggcctgctgatcggcttctacgtggaccccagaaaccccgtgcacctggaccagaacgaccccagattcatcggcaactggtggagcggcttcctgctgtgcgccatcgccatgttcctggtgatcttccccatgttcaccttccccaagaagctgccccccagacacaagaagaagaagaagaagaagttcagcgtggacgccgtgagcgacgacgacgtgctgaaggagaagagcaacaacagcgagcaggccgacaagaaggtgagcagcatgggcttcggcaaggacgtgagagacctgcccagagccgccgtgagaatcctgagcaacatgaccttcctgttcgtgagcctgagctacaccgccgagagcgccatcgtgaccgccttcatcaccttcatccccaagttcatcgagagccagttcggcatccccgccagcaacgccagcatctacaccggcgtgatcatcgtgcccagcgccggcgtgggcatcgtgctgggcggctacatcatcaagaagctgaagctgggcgccagagagagcgccaagctggccatgatctgcagcggcgtgagcctgctgtgcttcagcaccctgttcatcgtgggctgcgagagcatcaacctgggcggcatcaacatcccctacaccaccggccccagcctgaccatgccccacagaaacctgaccggcagctgcaacgtgaactgcggctgcaagatccacgagtacgagcccgtgtgcggcagcgacggcatcacctacttcaacccctgcctggccggctgcgtgaacagcggcaacctgagcaccggcatcagaaactacaccgagtgcacctgcgtgcagagcagacaggtgatcaccccccccaccgtgggccagagaagccagctgagagtggtgatcgtgaagacctacctgaacgagaacggctacgccgtgagcggcaagtgcaagagaacctgcaacaccctgatccccttcctggtgttcctgttcatcgtgaccttcatcaccgcctgcgcccagcccagcgccatcatcgtgaccctgagaagcgtggaggacgaggagagacccttcgccctgggcatgcagttcgtgctgctgagaaccctggcctacatccccacccccatctacttcggcgccgtgatcgacaccacctgcatgctgtggcagcaggagtgcggcgtgcagggcagctgctgggagtacaacgtgaccagcttcagattcgtgtacttcggcctggccgccggcctgaagttcgtgggcttcatcttcatcttcctggcctggtacagcatcaagtacaaggaggacggcctgcagagaagaagacagagagagttccccctgagcaccgtgagcgagagagtgggccaccccgacaacgccagaaccagaagctgccccgccttcagcacccagggcgagttccacgaggagaccggcctgcagaagggcatccagtgcgccgcccagacctaccccggccccttccccgaggccatcagcagcagcgccgaccccggcctggaggagagccccgccgccctggagccccccagctag
